United States Patent Application Publication US 2019/0348154 A1 - sequence listing, part 118

SEQ ID NO: 443779 - DNA, 441 bp, Serratia marcescens
atgaaaaaaatgactaaaatggcaatcctgccggtagtaatggcgctgggcgttggtttctcttccatggcgtctgccgcttataactgcgacgctaagcgttctgctattgaatatcagattcagcaggcggaaagatacggcaactacaaccgcgtagccggcctgaagcgtgcgctgagtgaagtcaacgcgcgttgctctaccggtagcgctgtagttgacgtgcagaagaaagtcgaaaagttagagcgtaagctgctggacaagaaagaagacgtccgtgatatcaaagccgacctgcgcaaagcacaggcaaaaggcgacgcgaagaaagtggctaaatatcagcgtaagctgcgtgaaaagcaggctgaagttaaagaagtggccgctgaactgcgtcaggcgaaagctgaactggcggcagcacgtaaataa

SEQ ID NO: 443780 - DNA, 3540 bp, Serratia marcescens
atggctaaatatatattgttatttttatcgctgttttccgcttgcgtatattccgtcacgctatcgccaagccgggaaatcaatttggtcagccgtgggcaggtgcaattggcggatcccgacctgagcagcgatgactggctgtggctgcggcgtaaacgcgtattggtattcggcctggcggcgccgcactatccgccgtttgatatcaccagcggcgctaatgattatggcggcatcaacgccgattacctcggtattctcgcctataacctcaatgtgcagatcaaagtgcgttactacgaaaatgacgccgctttgcggcaggatctgcaaaagggcgtggttgatatgatcggcaacgtggcggcaatggggcaagaggagcccggcctgcggctgaccaaagcctatgtgccggcagcacctgcgctggtgctgcgcaccgacagtctgctgcgcttccagccgctgaaggagattgccattgaaagccagtatcgtaataacccgcgcattctgcagcgttttcccgtagccgactatcagagcctggacgttccccgccgtgcgctggaggcgctgtcgttcaaaaaactggatgcctttatcggcgatgcgacggtcgcccgctacctgattaatcaggggaatctgaacaacctgcgcattcagctgctgccgccacaggaggtgcgcggtttttcctttggtctggcggcggacaacgaacgcctgcaaacaatcctcgacgccgtgctgtcgatcattcctgaaagcacgcaggcggagattcaaagccgctggaacggcggcattccgatgtcgcaggggggagagcacctgctgctgacgtcgctggaacgtaagtgggtcgaggatcatccgcatgtgcgggtggtggtcaacggcgactttccgccgctgagtttcttcgacgtgcagggcggttttcgcgggttaagcgccgatgtgatggatgccatctccgatcgcaccggcctgaagttcgatattatccgtgcccgttcgctcaaggattcgctgaatgcggttcacgccggcaaggcggacgtggtggtggggctgacgctggattccgtctggccaaacggcctgatgaccacccgttcttttctggttaactcctgggtgctggtgggattggcgagccagaaggcgcagggcgatccgcaggtgatcgccctggtcgacggccatccgctgcaggcgttcctgcaggagcgctatccggagagccgtatcatcagcgtagactcgccgcaggccggagttgacgcggtgaaaaagcgccgggtgtcggcgctggtgctgccgatgattagcgcggatttcttcctcgcgcatgagcaacccgacgggctgcatattctggaatcgctggataccgaaccggcgcacttcgtgattggcgtcgccggcaccgaatatccgctggcgaccattctggataaggcgctgctcaatataccaccggaagatatccatgccatgaccagcaactggtacaacaatacctacctgcttgagggggcgcaaagcagcggcaagcgctggtttcgttactatcccgcgctgctgttcggcaccagtctgatgctgattttgctggccacggcgtatttcatcagccagatgcgcaacaagcggcaactgacccgccgctgccagctggtgatggacgccgtgccgctgcctatctatatgaccaatctgcaggggcagatcgtgatggcgaacgcgtcgttttaccgcgccatcggcgctacggcgccgcagattatcggcacctcgctggatgatatcccgttggggctgcccggcgcgtcagatattgcgctgaccgacggcgagaagggcaaggggatgttcgtcacccgctatttacagatgggcgagcagcggcacaccctgcagcagtggaattcgctgtggatcaccgaagggcgccgggcggaggggaaaataggcggctggtttgacgtgaccgagcgcgatcgcctgatcgagcagctgcgccaggcgaaagaacatgccgaccgcgccaaccgcgccaaaactacctttctggcgacgatgagccatgagatacgcacgccgctgaatgccattatcggcatgctggaactgctgctgaaccgccagccgggcgatgagccggcggatatcgagctgctgggcgtggcccatgagtcggcgcactcattgctgacgctgatcggcgatattctcgatatttcgcgtattgaagcggatcgtctggtgctgcacccccagcgcgccgacatccggcggcttatcgagtcgatggccatgctgtttgacggcgttgccagacagaaggggctggatttcaggttggaaatcgatgcggaaattaccggcgacgtactggtcgacccggtacgtttcaaacaggtgctgtcgaatctggtgagcaacgcgatcaaatttaccgaacaggggcagatcaccttaagcgcggtggtggagaaggtcaccaaagagcattttgatctgcgcctgcaggtttccgacaccggcaaaggcatcgacgcccgcacgctgggacgactgttccggccgtttacccaggggcagaacgacgtcggcggcgcggggctcggcctgtttatttgccgtaagctggtggcgatgatgggcggttttatcagcgtgaacagtgaggtcgggctgggcagcgaatttaccgtggcgctgtctatggcgcgcctgcggcggatggacgtacagccgcagagcaacgatacgactccccggccggagcggagcctgcgggtgctggtggtggaagatcaccatgccgggcgcatgttgctgagccgccagctgacgtttctcggccactgccccacggcggcagaggatggtgaacaggcattggcgctgctggagcattccccgttcgatctgattatcaccgactgccatatgcctaatctggatggctatagcctgagccgccagatacggctgaatgagcgtgagcggcatctggcgccgtcaattatctggggcctgaccgccaacgcgcaggagagcgcacgcgaagcgtgcatgcgggccggcatgaacgattgtctgtttaaaccggtcaatctggcgatgctgcagaagacgttgcagcgtctgccggtgaacgcgccagcagcggcgcaccaggaggcgattttcgccagacttccggcggagctgcagcagccggaggtactgcaggagtttatcgccaccctgttaagcagcctgcatgaggatggcggccggctgcgtaaggcgctgcggcagcaacccgtgccgtgggacgacgttcaggcactggcgcacaagctggcgggcgccgcacggttgttgcatgtcgatgcgctggaccgggcgtgccgggcgttgcaacagaccagcgagatggcgcttgccgggcgggtgctggatgaaacggaacgtctggcgtcacggcttgagggactacaggataatcatcctttcctacagcgtgattaa

SEQ ID NO: 443781 - DNA, 633 bp, Serratia marcescens
atggatacctggctggttgttgacgatcatccggcaatctgtttcgccgtcaaaacaatgctggcgcagttaggtgataatgtaattataacggcgaacagcggcactgacgcgctggcgaaaataaaagagcaccgccccggcatggtgattctggatatcatgctaaataaaatggacggcctgcaggttctccagcgtattcgtcagctgaacagcgccatcaaggttatcgtctataccggactcccggcggagaattacgcagagcgggccatgcgcgcaggcgcacgcggattctttcataaagatcaggacatcagccagctggtgccgctgtgtcagctggtactgcagggctatgcctgctttccttatgatgcggtaacgccgttgtttaatactgcggagcggaatagtaatgcgttggcgcgcctgtccgatcgtgaattaacggtattacgctatttgtcagagggcttgagtaataaggatattgccgacaggttgttgctcagtaataaaacaattagcacttataagagtcgtctgattgaaaagtttaatggcaaatctttggaggaggtttatgcgctattgaacgagcagggaagtacggaaaataatggctaa

SEQ ID NO: 443782 - DNA, 993 bp, Serratia marcescens
atggatatcgatgaatttgtggcccttagtgtaaagcataatgcttccgatctgcacctttgtaccgcccaaccgttgatgatgcgcatcgatggtgaacttcagccgctggcgggcgacgccgttctgcccgcagaagacatgcaacggctgtgtgcggcgctgctcgacgagcgccaactgcggcagctgcgacgaaccggtcagttggattgtgccttgacgaccacgggcgggacgcggctgcgcgccaactttttttatcagcgcaccggcgtgtcgctggcgctgcgccgcattgcggaacgctgcccgacgctggaacagctgcaggcgccggcgattattccggcgctcaccgagcgggaagaggggctgattctggtgacgggagcgaccggcagcggcaagtccaccacgctggcggcgatgatcgaccatatcaaccgtcatcagcggcggcatatattgacgctggaagatccgatcgaatttatccatcacagcgcgcagtcgctgattcagcagcgtgaactgggccgcgatacccgcagtttcgacgcggcgttaagcgcggcgctgcgcgaagatcctgacgttattctggtaggcgaactgcgcgacagcgccagcatccggctggcgctgaccgcagcggagaccgggcatctggtgctggcgacgttgcacacccgtaatgctccccaggcggttgaacgggtgatcgacgtttttccggcggaggagaaagcctacgtgcgtgcccaactggccagcggtttacaggcggtgattgcgcagaaattacagcgcagggtcggcggcggcagaacggcggtgtttgagatcctgacggcgacgccggcggtaagcagcatgattcgcgagggaaaaacgcatcagctggccagcgtattgcaaagcggcgcgcaggccggcatgcaaacctttgctcagggcatacagcaacgtattgcgcagggaattttataa

SEQ ID NO: 443783 - DNA, 708 bp, Serratia marcescens
atgagcactatccaacagaatctgcaggatgtcaggagccgtattgctcgcgctgccgaaagttgcgcacgcgctccggaagaggtgacgctgcttgcagtcagcaaaaccaaacctgtagcggcgatcgcagaagccatcgatgccgggcagcgcgcctttggcgaaaactacgtgcaggaaggggtcgaaaaaatccagtatttcagcacgcagccgcagggcgcggcgctggagtggcactttatcggcccgctgcaatccaataaaagccgtctggtggccgaacacttcgcctggtgccacaccgtcgaccggcaaaagatcgcccagcggctgaacgaccagcgtccggccgaaatgccgctgctcaatgtgttaatccagatcaacatcagcgatgaacagagcaaatccggcatcgggctggacgagttgccacagctggcgcaggccgtcgccgccatgccgcgcctgacgctgcgcggcctgatggctatcccggcaccggaggaagatcctcagcggcagttggaggtcttcggccggatgcagcaggcctttttgcagttgcagcagcagcacccgcaggcggatacgttgtcgatgggcatgaccgatgatatgtccgcggcgattaacgccggcagtaccctggtacgcatcggcaccgcgatttttggtgcccgtgattattcgcaggcctga

SEQ ID NO: 443784 - DNA, 822 bp, Serratia marcescens
atgcaacaccgcaagattacttttattggcgccggcaatatggcgcgcgctatcatcgccggtctggtcagcggcggctatccggccaacctgattagcgtctgcgcgccgtcgccgaacaatcgcgatgcattggccgccgactatggcattatcagcagcgccgacaacgccgcctgtgcgcaggacgccgatgtggtggtgctggcggtaaaaccgcagctgatggccgacgtctgccaggcgctgcagagccaggtcagttttgacggcaagctggtactgtcgatcgccgccggcgttcgggtcgagcgtttctatcaactgctcggccagtcgctcaatatcgtgcgcatcatgccgaacaccccgtcgctggtcgggaaaggtatgagcggcctgtacgcgccgccacaggtcagccagcaggatcgcgacttcaccggcgcgctgatgggttcggtgggcaaagtctgctgggtggacgatgagaacggcattaacggcgtgattgccgccgcaggcagcgcgccggcctatttcttcctgtttatggagtccatgcagcaggccgccgaacagatgggcttcagcagccagcaggcgcgcgagctggtgcagcaggcggccagcggcgctgcggcgctggtggaagccaacccggaaacgtcgctgtcgaccctgcgcgaacaggtgacgtcaaaaggcggcaccaccgccgaagcgctgcgcgtgcttaacgaacaacacctgccggcaaccgtcgctcaggcgatgcaggcggccgtttcccgtgcgcaggaaatggaaaaatcattctaa

SEQ ID NO: 443785 - DNA, 291 bp, Serratia marcescens
gtgagcgccgtcaccctgctgccggacgggctggtcatcaggctgtatattcagccgaaggccagccgcgaccagattatcggtctgcatggcgacgaaataaaagtcgccatcaccgcgccgccggtggacggccaggctaacgcccatctgatcaagtttctcgccaagcagttcaaggcggcgaagagcaacatcactatcgaaaaaggcgaactgggccggcataaacagttacgcattattcatccgcaacagcgcccgccggttattgcggcgctgattgactaa

SEQ ID NO: 443786 - DNA, 597 bp, Serratia marcescens
atgcaaaaagtcgttcttgccaccggcaaccccggtaaagtacgcgaactcgccgcgctgctggccgatttcggtctggacatcgtggcgcaaaccgagctgggcgtcgagtccgccgaagagaccggcctgacgtttatcgaaaacgccatcctgaaggcgcgccacgcggcacaggttaccggcctgccggcaatcgccgatgactctggcctggcggtggatgcgctcggcggcgcgccgggcatctattccgcccgctacgccggcgaagacgccagcgatcaacagaatctggacaaactgctggatgccatgcaggcggtgcccgccgggcagcgcggcgcccgcttccactgcgtgctggtgtacctgcgccacgccgccgacccgacgccgctggtgttccacggcagttgggccggggaaatcaccaccacctccgccggccgcggcggcttcggttacgatccgatcttctacgtcccggaactgcagcgcaccgccgccgagctgacgcgcgaggaaaaaatcgccgtctcgcaccgcggtcaggcgttgaaactgctgctggaagcgatgcgcaatgcccagtaa

SEQ ID NO: 443787 - DNA, 1152 bp, Serratia marcescens
atgcccagtaacgccgtacaactgccgccgctgagcctgtacatccatattccgtggtgcgtgcagaagtgcccctattgcgatttcaactcgcatgcgctgaagggcgaggtgccgcatcaggaatatgtcgaccatctgctggcggatctggacgccgacctgccgctcgccggtggtcgcagcatcagcaccatctttatcggcggcggcacccccagcctgctgagcgcggaagcgatgcaaaggctgctggacggcgtgcgggcgcgcattcccgtcgccgacgacgccgaaatcaccatggaggctaatcccggcaccgttgaggccgaccgcttcagcggctaccagcgcgccggcgttaaccgtatttcgatcggcgtgcagagtttcagcagccagaagctggagcgcctgggccgcatccacggcccggaagaggccaagcgtgcggcgcagctggctaccggcctcggcctgcgcagttttaacctggatttgatgcacgggctgccggaccagtcgctggaagaagcgctggatgacctgcgccaggccatcgccctgaatccgccgcatctgtcgtggtatcagctgaccattgagccaaataccctgttcggctcgcgcccgccgccgttgccggatgacgacgcgctgtgggacattttccagcaagggcatgaactgctgaccgccgccggctaccagcagtatgaaacctcggcctacgccaagccgggctatcagtgccagcacaacctgaactactggcgcttcggtgattatctgggcatcggctgcggcgcgcacggcaaactgaccttcagcgacggacgcattgtgcgcaccgaaaaaaccaagcatccgcgcggttttatgcagggcaactatatggcgaagcatcatgaggtagcgacggcggatcggccgttcgaattctttatgaaccgcttccggctgctggaagctgcgccgcgcgacgagttccgcatttacaccgggctggatgaaagcgcaatccgcccgcagctggatcaggcgctggcaaaaggctatctgacggaaaacgccgaccgctggcagattaccgaacatggcaagctgttcctcaactcgctgctggagctgtttttagccgacgagtaa

SEQ ID NO: 443788 - DNA, 717 bp, Serratia marcescens
atgttgaagaaaaccggcttggcattattactgttcaccgccgtgcaggcgcatgccgcctaccagtgcaatgttaaaccgcaggacgatgtgattatcagcccgcagagcgtacaggtggtgggcgccagcggtaatctgcagatctcgccggacggcgatgtgacccgcgacggccaggcgctgacgctgagcgacagccagcgccagcaggccttccgctaccagacggcgctgcgtaaagagctgccgtggatcgatgacggcgcgcagcagcacctggaaaaggcgcgcgtggcgctggataaggtgatcgtcaaggaattgggcagcgacagcaacgtgcgtaaccgcctgaccaccctgaacggccagctgaagcagcagatgaaccggattatcgagcaccgcagcgacggcctggccttccaccacaaagccattgcgcaggttgaacaggacggccgcaatatcgtgcagcagagcatgggcggcgtgctgcaggacagcctgaacgaaatgggcgtcaagcaggcggccaacagcggcggtaacccgctgcaggctatcatgggcaacctgggcggcctgcagaaggcgatccataacgagtggaacaaccaggagcaggatttcaaaaacttcggccacgacgtctgcaaccgcgtcacctcgctggaagaccagcgcaaggcgttactgagttcgttgaagtaa

SEQ ID NO: 443789 - DNA, 1146 bp, Serratia marcescens
atgctgcaatcgcgcatcaatatctgtctgatacgaaacccgattatgatgcaagcacgccagttctcgcaccaggtgcttgaatggtaccaacgctacgggcgcaaaacgctgccgtggcaattagataaaacgccctatcaagtatggctctccgaggtgatgttgcaacagactcaggttgccaccgtcattccatactttcagcgatttatggcgcgttttcccaccgtcagccagctggccgccgcgccgctggacgaagtgctgcatctgtggaccgggctcggttactacgcccgtgcgcgtaatctgcacaaggcggcacagaccattgtcgcacaacatggcggcgaattcccgaccagctttgaagaaattgccgcgctacccggcatcggccgctccaccgccggcgccattctgtcgctgtcgctggggcagcactatccgatcctcgacggcaacgtgaagcgcgtgctggcacgctgctatgcggtagaaggctggccgggtaaaaagccggtggagaaccgtctgtggcaaatcagcggcgaagtcaccccggcggaaggcgtcggccagttcaaccaggcgatgatggacctcggcgcgctggtctgcacccgctcgaaaccgaaatgcgagctgtgcccgctcagcaacggctgcatcgcctatgccaaccacagctgggccaactatccgggcaagaagccgaaacagacgctgccggaaaaaaccgcctatttcctgttgctgcaacagggcgagcgcgtctggctgcagcagcgtccggcggtcggcctgtggggcggcctgttctgtttcccgcagttcgccgttcgtcaggaaatggaactctggctgcaacagcggggtctgaacgcagagcacgcgcaacaactgacggcgtttcgccatacgttcagccattttcatctggatatcgtgccgatgtggctaccgctcgacggtgccggcggcgccatggatgaaggcgacggtctctggtataacttggcgcagccgccgtcggtcggactggccgcgcctgttgagcgattgctgcaacagctggtcaaacagccgccgacccaatcgaatctatttggcaacagcgccaccgatgaggaactagcatga

SEQ ID NO: 443790 - DNA, 1077 bp, Serratia marcescens
atgaagaaaattttagctttgctagtgatagcacctttattgatttcctgttccggtaaaaaaagcgatgagttcaacgaagcctgggtgaaagacaccaacggcttcgacattctgatgggccagttcgcccacaacatcgaaaatatctggggtctgaacgaagttctgatcgccgggccgaaggattacgtcaaatataccgatcagtatctgacgcgcagccacatcaactttgatgccggcaccatcacctttgaaaccatttcgccgaccgatccggccgccagcctgcgcaaggcgatcgtcaccaccctgttgatgggcgacgacccgagctcggttgacctttattccgacgccaacgatatccagatcagcaaagagccgttcctttacggccaggtggtggataacaaaggccagccgatccgctgggagtggcgcgccgcgcacttcgccgactatctggtgcagaacaagctgcaaaaacgcacctccggcctgcacgtgatctactcggtcaccattcagctggtgccgaaccacctggataaacgtgcgcataagtacctgccgatggtgcgtaaagcctcggagaaatacggcgtggaagcgtcgctgattctggcgattatgcagaccgaatccagctttaacccgtatgcggtcagcggttccgacgcgctcggcctgatgcaggtggtgcagcacaccgccggtaaggatgtgttccagatgcacggcaaatggggcaaaccaagccgcagctacctgttcgatccggcgaacaatatcgataccggcaccgcctatctggcgattctgcagaacaactacctgggcggcatcaagaacccgacctcgcggcgctacgcggtgatcaccgcctacaacggcggcgccggcagcgtgctgcgcgtgttctccagcaaccgcagcaaggcgtttgacgtcatcaacgacatgcagccgggcgatgtgtacaccaccctgaccaccaagcacccggccggcgagtcgcggcgctatctggtgaaggtgaacaccgcacagaagagctatcgtcgccgttaa

SEQ ID NO: 443791 - DNA, 1344 bp, Serratia marcescens
atgaaaaataaaaaaatgggattcaaaaaaagtaatttgttaatgatgttacctctggcggcactggcggcgtttaatgccgatgcggcagaaaataaaaaattcggcggtgtttttgccggatttgtttatgatagccatgccgatctttccttccgcaatgtatttaaaaacctgagtacggaagattacggctcgcgctctaaccagaccgcgtgggggcagggaattacgctggattaccagtcgggctatatcaacgatatgctcggggtggatgcgtcatattatggcgtggtcaaactggccgccagcgatgatttctgggggcgcagcgtgctgtataacgacgatggccaggcgaaaggttttaacaagctggggcagctgtatatgaaggcgcgcctgggggatgaggatacctatctgcgtctctacggcggctggcagcaaattaaaaagtggggcgcgctgaataactcgacccgcgctatcccgagcacctatctgggctggcgcggcgaaaccggcagcgggccgctgcgcctgcgcggcgcctatgtcacgcgctacagcgacagggactccccggagaaagtgcatttccgcaccgccgacaagaagcagattagccagatcgccaccggcgagctgagctacgcgcagcgtgactacggcgcccgctatttctttggcgaaagtcataactatctgcagcgtcacggcctggagtttgactggcggccggcgatgctggcggactatcgcgccctgctcggcacccagctttatatgaaccatggcctgcaggactggaccagcatgtcgccgagcaagaaaacctttgaccgcgatgcctaccacgccgcgctgtcgctgaactggcaggccgggcgctggaagaataaggccggtctctcctatacgcgcgcgcacctgtcgcaggggctggggcgttttgaatggcacctggcgaagctcagccgcggcacctttaattcgatggccgacagttggggcaacgactatgtcggccataacgaaaaaatggtggcctggacgtttggttatgccgtgacgccggaagttgaaatggggatggtgaccaactacggctggggcatgaagtatcagggacgcggcatccagcgcggcgaaaccctgatgtactcgcgctggacgccgtcagcggtgaaggatctgagcctgcagctgtccggcgggccatcctggaactaccaaagccagaacaaccggccgatattgaccgccgacggcaaaccgatgcgggcgcaaaaccactcggtcgaactgcaggtcgattacaaatttaatctgttctaa

SEQ ID NO: 443792 - DNA, 1971 bp, Serratia marcescens
atgaaactattaaaatcagtcagtaaagtgacgttattagcagtgatgatatccggtgtctgccacgccgccacggtgaatctgcgggtgatggaaaccaccgatatgcacggcaatatgatggattacgactactacaaggatcgcgcaacggctcagcatggcctggtgcgcgccgccacgctgatcgatgcggcgcgtgcggaagtagacaacagcgtgctggtggataacggcgacgtgattcagggcagtccgatggccgactatgccgcagcgcacctgaaaaaaggcgacgtgcacccggtttatcaggcgatgaaccgtctggactacgcggtaggcagcgtcggcaaccacgagttcaactacgggctggactacctgcagctggcgctgagcggcgccaaattcccttacatcaacgccaacgtctaccatgccgacggtgagaaaccgtacttcaaacagtatctgatcgtcgatacgccggtgaaggacagcgaaggcaaaacgcataacctgcgcatcggctatatcggctttgtgccgccgcagatcgctctgtgggatcgggggcatctggaaggcaaggtggtggtgaaagacatcaccgaaacggctaagaaactggtgccgcagatgcgtaaagagggtgccgacgtggtgatcgccattgcccactccggcatctccgccgatccgtacaaagcgctggcggaaaactcgacctactacctgtctcaggtgccgggcattaacgccatcgccttcggccactcccacggagtcttcccgagcgccagtttcgcttcactgccgggcgtggatatcgccaagggcacggtaaacggcgtgccggccgtgatgccggggcgttgggccgatcacctgggggtgatcgatctggtcattgaaggtgaagagggcaaatggcaggtcacctccggcaaggccgaggcgcgccctatctatgacagcaaggcgggcaagtcgctggtggatgcgaagccggaactggtcgaggcgctgaaaaatgcccatgacagcacgcgtgaatacgtcaacaagccgatcggcaagctggctgccggcatcgactcttatctggccctggtgcaggatacggcggcgatgcaggtgatccgcgatgcgcagcgagcctatgtggaacgtatgattcagggcgatccggatctggccgatctgccggtgctgaccgccgccgcgccgtttaaagtcggcggccgcaaaaacgcgccggatgacttcgtcgatattgccaagggcgatctgagcttccgcaacgcggcgcagctgtatcaatacgccaacaccctcgccgccgtgcgcgtgaagggcaaggacgtgaaacagtggctggagtgttcggcggggatgtacaaccagatcgacccgaacagcgaagcgccgcagtcgctgctgaactgggacggtttccgcgcctacaacttcgatatgttcgacgcgctcagctatcagatcgatgtgacccagccggcgcgttatgacgtcgactgcaacctgatcaacccgcaggcgcagcgtattgcctcggttacctatcagggcaaaccgctggatgacaacgctgaattcctggtggcggtgaacaactatcgcgcctttaccggcaagttcgccggcaccggggaaaagaacgtagtgatcaatgcgccggatgaagtgcgttcgatcatcgccgactatatcaatacgcaaacccagcagcatggccagtacgcgccggcggcgaagaacggctggagcattgcgccgatcgcgtcggagaaaaagctggatatccgcatggaaacctcgcctgatgagcatgccgcgcagcttatcaggcagtcagcgcagcatccgatgacttacgtcggcaaagacgacatcggctttgcgatttataagatcgatctgcaaagtccctccgctaataaaaaataa

SEQ ID NO: 443793 - DNA, 1182 bp, Serratia marcescens
atgaagtatctcattggtatatcaagcattttggttatttatgctttggcggtgttggtgagtaataaccgtaaaaatattcgctaccgaccgctgggtgtgatgttattgtgccaatttgttatggcattgttactgctgaaaacggacgccggcaataccggcatcgccgccgtggccggagtatttggccatctgttggcctacgccaatgaaggcgtcaactttgtgttcggcggcctgctgaataaaggggagatctcgttcttcctgtcggtattgctgcctatcgtgtttatttccgcgctgatcggcattttgcagcactggcgtattctgggctttatcatcaagtacatcggtctcgggctcagtaaaatcaacggcatggggcgtctggagtcctataacgcagtagcgtcggcgatcctcggccagtccgaagtgtttatctcggtaaaaaaacagctcggcctgctgccggagcatcgcctgtatacgctgtgcacctcggcgatgtcgacggtctcgatgtcgattatcggcgcctacatggtgatgctggagccgcgctacgtggtgacggcgttagtcctgaacctgttcggcggttttatcatggcgtcgctgatcaacccttatcaggtgaacccgcaggaagatctgctggacgtcagcgaaggggagaaacagagcttttttgaagtgctgagcgagtacatcctcgacggctttaaagtggcggtgatcgtcggcgcgatgctgatcggctttatcgcgttaatcgccatggccaacgccatcttcaccgggctgttcggcatctctttccaggatattctcggctacctgttctcgccgctggcgttcctgatcggcgtaccgtggcatgaagccgtgcaggccggcagcctgatggcgaccaaaatcgtcagtaacgaatttgtcgcgatgctgaacttctcacagggcgactttaatttctccgagcgtaccgtggcgatcatctccgtctttatggtgtcgttcgccaacttctcctccatcggcattatcgtcggcgcgatcaaggcgctggacagcaagcaggggaacagcgcggcgcgctttggtctgaaattgctgtacggctcaacgctggtcagcttcttgaatgcgacggtggtggggctgctgttttaa

SEQ ID NO: 443794 - DNA, 561 bp, Serratia marcescens
atgactctgaggtgtctgttaaacccgtggcgattcaggatgaggcagaaccagctgttacacatacgtctgatggatgttgatatggatgccaattctatattgctgtgcagagaagggagtaagacgcatcgcgaatggcttgtacctatagttaatttcgcgcgtgaacggatgcgaatattaatcgatcgggcaataaatcagggggctgagccagaggattatttatttgacgtggatcggtttaaaaatcctttgggggaagtgggtcctgagccagaaatacaaccggtgcgttcgttttttacccggctgacgaaggagtgcggttttaaagtcacgccacatcgttttcgccacaccctggctacggagatgatgaaatccccggatcgcaacctggccatggtcaagaaccttttggggcacaggagtgtcagtactacgatggaatatattgagctggatctgaagataaccggaaaggctttagagagtgagctggcgctttatatggacataccccggatacccgcaagtggacccggagtatcttga

SEQ ID NO: 443795 - DNA, 450 bp, Serratia marcescens
atgtctcatctcgttctctcccgccacggcatttggtactaccgtcgaatctacctgacagctcgaaaacgccgggaaatccgcgtttcactccgcacccgttcaaagcgtgaagctctggagcgcgttcagctctacctcgcatcccgtcctttccccctctctgagggcatcccggcacacacgtcacctgctgcggctgcaccacaaccactaaagccaaaaatcaatcttaagaaagagttacaagtctatatcgcgtctaagcgcggggctgttggcgagcgtgagttgctcaccattgagcgctgtgtcaatgcctacctgacggcgacaacacagccattcagtaaacgcagtgcggccgattatgtcgataatctgaaaggctccgcatcaaccagaaaccgctatgtaagcatccctgcaaaacgaaccattcacttttag

SEQ ID NO: 443796 - DNA, 315 bp, Serratia marcescens
atggaatccacagacccgactttccgccagcgcgtctttcacgtcgtcgccgccattccctgcggcaaggtgattgcctatggcgacgtggcccagttggccggctcaccgcgggcggcgcgccaggttggcggtatactgaagaaactgccggcgggcagcaccctgccctggcaccgggtgatcaaccggcacggcaagatctcgttgcgtggcgaggattttcagcggcagcggcaggcgctgctggcggaaggaattatgttcgatgccgaaggcgcggtggactttgcccgtttcggctggcggccataa

SEQ ID NO: 443797 - DNA, 489 bp, Serratia marcescens
atgaaattctggcaaatccttgctggggccgccgccgtgacgctggccggctgtgcccagaatggcgcagatgccccgacatcggcagcaggaagcccggcgaccgcacaacaaatgcaggtgaccggccctgcggtgacggggacggtcaatatcgcccagcgtattgccttgccgccgcatgcggtgctgacggtcacgctgtccgatgcctcgctggcggacgcaccgtccaaggtgatcgctcagcgggtgatccgtactgaaggccagcaggcgccgtttacctttgccgttccctacaacccggcggatatccagccgaatgcccgcgtcatactgagtgcggcggtaaccgttgacgggcaactgagctttatcaccgacacgattcaggaagtcgtcaaccgcaacggcacccacgccgacctgcaactggtgccggtgcagaacgtaccggtacaggcggcatcaaccgcgatgccgtaa

SEQ ID NO: 443798 - DNA, 1776 bp, Serratia marcescens
gtgagattatttgctcaaatcggctggtatttccgccgcgaatggcgccgctatctgggtgcggtggcgctgctgatcattatcgccattctgcaactgctgccgccgaagctggtcggcgtgattgtggacggcgtaaccaaagagcatatgtctaccggcgtgctgttggcatggctgggactgatgatcgccaccgccatcttggtgtacctgctgcgctatgtctggcgcgtcctgctgttcggtgcctcttatcagctggcggttgagctgcgggagaacttctaccgccagctgagccggcaaaacccggcgttttatctgcggcaccgcaccggcgatctgatggcgcgagccaccaacgatgtcgatcgggtggtgttcgcggccggcgaaggcgtgctgacgctggtggattcgctggtgatggggttggtggtgctgatcgtgatgagtacccaaatcagctggcaactgacgctgctgtcgctgatcccgatgccgattatggcgattgtgatcaagtattacggcgaccagctgcaccagcgctttaagtcggcgcaggcggcgttttccagcctgaacgaccaggcgcaggaaagcatgaccagcatccgtatgatcaaagccttcgggctggaggatcaccagtccaaccagtttgccgaggtggcggcgcgtaccggcgcgaaaaatatgcatgtggcgcgcatcgacgcgcgttttgatccgaccatctatctggccatcggcgccgccaacctgctggctatcggcggcggcagctggatggtggtgaacgggacgctgaccttggggcaactgaccagctttgtgatgtatttggggctgatgatttggccgatgttggcgctggcgtggatgtttaatattgtcgaacgcggcagcgccgcctacagccgcctgcgcagcctgctggatgaggcgccggcggtggtggacggcgaaggtgatttgccggccgggcgcggtgagctggcggtggatatccgccgtttccattacccggagaatcagcacgcggcgctgcatgacgtcgctctgcggcttaaaccggggcagatgcttggcctgtgcggcccgaccggcgccgggaagaccacgttgctttccctgatccagcgccagttcgatattgatgacgggcagatctgctaccacggcatgccgctgacgacgctgaagctggacgcctggcgcgcccgcctgtcggtggtgagccagacgccgttcctgttttccgacagcgtggcgaacaacattgcgctcggcaagccggatgcgacgcaggaagagattgagcaggcggcgcggttggccagtgtgcatgacgatattctgcgcctgccacaggggtatgaaaccgaagtgggcgagcgcggcgtgatgctgtccggcgggcagaaacagcgtatctccattgcgcgcgcgctgctgctggatgcggagattttgatcctcgacgatgcgctgtctgcggtggatggtcgtaccgagcaccagattctgcataacctgcgcagctgggggcagaaccggacggtgatcatcagcgcgcaccggctctcggcattgaccgaagccagcgaaatcctggtcctgcagcatggcagcgtggcgcagcgcggcctgcacgccgttttggcgtcgcagccgggctggtaccgcgatatgtatcgctatcagcagttggaggccgcgctggatgaggcgccggaaatcggcgtggagatgttaaccaatgaataa

SEQ ID NO: 443799 - DNA, 939 bp, Serratia marcescens
atggataacacgctgagaaataccggaatcattattatcctgtttaccctggtcgccctgacctggggcaccacctggatggcgatgaagatcgccgttgccaccgttccgcctatttacgcgaccgggctgcgtttccttgccgcgtcgccgctgttgctgctgctggcttactttactcgtacgccgctgctgtttcccaaaggcagccgcggattccagctattggtctgcctggcttacttcgctattccctttacgctcatgatttacggcgagcgctacgtcagttctgcgctggcctccatcatctttgccaatatgcccgtcgttgtgttgatggcttcggtactgctgctgggagagcgcgtgagcatcgcgcagctgatcggtctgatcgtcggcgtggccagtctgtccggtattctgtggcaagaatccaccgccagcggcgaaacccgctggcccggcgtggtcgccctgctggcggcggtgctgatccacgcggtgatgtacgtgctgagtaaaaagcgcggcgaaaaaatctcggtgctgacctttaacgcgttgccctgcctgggcgccggcattctgctgtttattgtcggctatgtcaccgaaaaaccggacagcgccgcgtttaccagcgcctcactgctatccgtggcctatctcggcgtggtggccggcgtcttcggcatcatggcctactttgccctacagcaaaaagccacggcgtttcaggcctctttggtgttcctggtgtttccgctgattgccatcgccgtcgagaaagtggtcgatcacaccaccatcagcaccacctctctctggctgctggcgccgctgctggccggcatcctgctgacgctctacagcgccaaaagtgcaaaaccggtcagcagcctgcgcaaactggaagcgtcatcgcaacaataa

SEQ ID NO: 443800 - DNA, 819 bp, Serratia marcescens
atgtatcgcctggctgctttcgatatggatggtacgctgctgacgccggagcaccgggtcggcccggaaacgctggcggtgctgaaccagctggtggcgcggcagataaccgtgacctttgccaccggccgccactatcttgatgcgcaacccatcatggcgcagctgggtctgcagggctttctgatcaccggcaacggcacccgcatctacgatcggcacggtcaatgtttacaggctaccgatctgccgccggacattgccgaagcggttatccacagccactggcagacatccgccgggatgcatgtttttcgcgatgaaggctggctgaccgaatcggcaaccccggcgatgctgcaggcgcaccatctgagcggtttcggttatcagctgactgacccgcggcggctgccggcgtttggcaacagcaaaatctgttttgtcggcgagcacgaagagctgcagtcgctgctggggcgactgcgggtctattttggcgagcaggtagatttgtgtttttccgcttatgactgtctggaggtgctgccggctggctgcaacaagggcagcgcgctggcgctgctgagcgggcacctgaacgtaacgctggatgagtgtatggcgttcggcgatgcgatgaatgacaaggagatgctggcgtcggtcggacatggcgtagtgatgggcaatgcgctgccgcagcttaaggcgctattgccccagttaccggttatcggccactgcgaaacccaggcggtggcccactatttggcacattggctgcgttcaccacacgttccttatacccccgtatag

SEQ ID NO: 443801 - DNA, 1710 bp, Serratia marcescens
atgcgtctgattcatcgcctcagtcagtatcaacgcctgtaccaacagctgggcagtgagccggcggccgtcaccatggcgcagctggcggagctgttttactgcagcgagcgccacgcccgcaccctggtgcagcaatttcaggagcagggctggctcagctggcactcacaggccggccgcggcaagcgggcacggctgcactgcctgaaaacgcctgacgaactgcgcgccgccttgttacagcaactgctgcagcagggcgatcaccaaaacgcgctggagctggcccgtttagatccgcagcgtctgcaacagttgcttgcgccgcatttgggcggccagtggcaggcgggcagccccactctgcgcatcccctactatcgtcagctggaatccctggatccgctggcgctcagcggccgcgccgaacagcatctggcctcaacgctgcatgccggcctgacccgctttatcaccggcaatccgcagccccagccggatctggctcaccattggcaggttgaaggcgacggcctgcgctggcgttttttcctgcgcagccaactacgctggcataacggcgaacccatcaccggccaacaactgctgcaaacgttggaaaagcagcgccggcacccgcgcggccaggccagcctggcgaatgtcgccgccgtcagcctgccgcacgcgttgtgtctgcagttcgatctgcatagcgccgattactggctgccctaccgcctggcggagctgacctgtctgatgacccacccggacgataccgccatcggcgccggcccgttcaaactggtattgaatgaaacgccgctggtacgtctggaacagcacccgttctaccacctgcaacatccctatctggacagcattgaatactggatcaccccagaactgcaggccgatggcaatggcaacaccaccagctgtcaacatccggtgcgcatcaccatcggacagcaggaagatctggcgctggcgcgcccggtgcagcgcagtatgagcctgggctggtgctatctggcgctgaacctgcgccgcggcgtactgagcgaagcgcaggggcaaaagctgctgatgctgatccagcgctcagggctgctggccgatctgccattgccgaacggcgttatcattcccagccaagagatgctgcccggctgggggatcccgacccatcaggccagcgccgatatcccactgccagccaagctgacgctgctgtaccacccgccggttgaactggtcacggtcaccgaagcgctgcaggcgttgctggcggaacagggctgcgaactggaggtgcgttatttctccggcaagcgctggcagagcagcgaacaaattgcccaggccgatctgctgctggcggataacctgatcggcgaagcgccggaatcgacgctggaaagttggctgcggcaggatgtgttgtggcaggggattttaccgacccatctctggcggcatcagcagcaaacgctgctgcggatccagcaatatccggacgagcagaagcgcatcagcgaactcaaaagctactaccagcagttgatgacgtccgccatcatcaccccgctgtttcactaccaataccagatcagcgcgccgccgcgcatgcagggcgtaacgctaaccgcgcatggctggttcgatttcggccaggcgtggctgccgccgccgttgatctag

SEQ ID NO: 443802 - DNA, 696 bp, Serratia marcescens
atgaaacgcgcagtcgttgtttttagtggcgggcaagactccacgacctgcttaattcaagccttacagcagtatgatgaagttcactgcgtcacgttcgattacggccagcgtcaccgcgcggaaatcgatatcgcccgtgagctgtcgcagtcactgggcgccaaggcgcataaagtgctggatgtcggcctgctgaacgaactggccatcagcagcctgacgcgcgacgatatcccggtgccgacgtttagcgccgagcaggacgggctgcccagcacctttgtgccggggcgtaatatcctgttcctgacgctggcggcgatctacgcctatcaggtcgaggccgaagcggtaatcaccggcgtgtgtgaaaccgatttttccggctacccggactgccgcgacgagtttgtcaaagcgctgaatcaggcggtagtgcttggcatcgcccgcgatatccgttttgaaacgccgctgatgtggctgaacaaggctgaaacctgggcgctggccgactattatcagcagctggacctggtgcgtcagcacacgctgacctgctataacggcatcaagggcgacggctgcggcgaatgcgccgcctgtcacctgcgcggtaacggcctgcagcagtatcaggataaccgtacggcggtgatggccgaactgaagcgtaaaaccggcctggtctga

SEQ ID NO: 443803 - DNA, 393 bp, Serratia marcescens
atgcaaacctatatcaacgttcgcggttttcacattgatgtttatcagcacgttaataatgcccgatatctggagtttctggaggaggcgcgctggaactggctggatcaccgtgaagagttccgctggatggtggccaacaatatcgcgttcatcgtggtgaatatcaatattaattaccgtacgccggcggtattgggcgataagctgtgcgtagagggccggctggagcagttgaacggcaagagcggcgtattgagccagacaattacccgggatgccgatggcgcccaggtggcggacgcgctggtgacgtttgtctgcgtggatttgaccactcagcgtgcattgccgatagaaggtgagctacgggaaaaactgcagacgctgtaa

SEQ ID NO: 443804 - DNA, 381 bp, Serratia marcescens
atgtcattaaccttaaatctggcgcttgcacgccatcaaaccctcgccggcgcgctgctgagtgccgtgctgtgcgttatcccatcactaacggcggccgcagcggaaaagccgggggtggttcagacctcggcggcggcgcgcacccagccgcaggctgcgggcaatacggctgccgggcaggaggcgacggtcagtatcaatcaggccagcgcggagcagcttgccgatacgctgaacggcgttggcctgaagaaggccgaggcgatcgtccgctatcgtgagcaaaatgggccgtttaccgatattgaacagctgcaggaggtgccgggcatcggtctggcgctgttggagagaaaccgggagcgcttgagaatgtga

SEQ ID NO: 443805 - DNA, 1884 bp, Serratia marcescens
atgatggacagtttacgcgcggctgctaaccacgtcgtgctcaaaattatcctggccctgatcattctgtcatttgttttgaccggggtaggtaactacctgatcggcggttccggcgattatgcagcgaaagtcaacggcgaggtgatcgaacgcgccaggttggaacaggctttccagagcgaacgtagccgcatgcagcagcagctgggcgatcagttctcggcgctggccggcaacgaaggctacatgcagcagctgcgtcgtcagacgctgtctcagctgatcgatgaaacgctgctggaccagtatgcgaaaaagctgggtctcagcatcagcgacgaccaggtcaaggacgctatccgcaaagcgccttacttccagaccaacggtcagtttgataacgccaagtatctcgatttgattacccgtatgggctacagcgcggacaactatgcgcagtctatgcgtcagcagctggtgaaccagcagcttattcaggcgttcggtcattccggctttgtgctgccggccgagtctgacgcaatggcggcgctgatgctgcaagagcgtgacatccgcctggcgaccatcgatctccaagcgctgcaggccaagcagagcgtgagcgatgatgagcttaaagcctattacgaccagaacaaaaacagctttatcgcccctgaacaggtgcaggtgagctatatcccgatggacgcggcggcgatgcaaagcaaggtcacggtcagcgatgcggatatcagcggctattacgagcagcataaaagcagcttcggccagccggaacgcaagaattacagcgttatccagctgaagaccgaggcggaagccaaagcggtgctggatgagctgaacaaaggcgcagacttcgccaagctggcggaagagaagtccaccgatatcatctccaagcgcaacggcggcgagctgggctggctggagccggataccaccgcagacgaactgaagcaggccaatctgaccgaaaaaggccagatttccggcgtggtgaagtcatccgtgggctacctgattgtgcgtctgaacgatatcgaagcggaaaagctgaagccgctgagcgaagtgcgtgatgcaattgccgccaaggtgaagcaggaaaaagcgctggatgcctactttgcgctgcagcagaaagtaagtgaagcggcgaccaacgataacgaatcgctggcctcggcagaagaagcggcgggcgttaaagcggcgcaaaccggctggtttacccgcgataacatcccggcagagctgaacttcaaacctgtcgtgcaggcggtcttcgacggttcgctgattggtgagaacggcacgccgggcagcaactcggatgtgatcaccgttgagggcgaccgcgccttcgtggtgcgcgtcaccggccataaagcggaaggcgttgagccgtttgacaaggtgaaagagcgcgttgccgagctggtgaagcgcaacaaggcgcagcaggcggccaaactgcagggcgagaaactgctgaccgagctgaaacagggcaaaggtgacgaggcgttgaaagcggccggcctgagctttggcgcggagcagaagatgacccgttccgggcagggtgcgcagctggaagagagcgtctttgcgctgccgcatccgcagcagggcaagccggtgtacggcatgtcgcaggaccgccaggacaacgtggtgctgatcgcgctggatacggtcaagcctggttcgctgtcggcggaagaaatgaaggccttcggcgataaaatgcaggaaggttcggttggcgtaaccttcgattccctgctggcgaatctgcgtaaggacgccaagatcaaaatgggcgcagcggagcaacagccgcaataa

SEQ ID NO: 443806 - DNA, 579 bp, Serratia marcescens
atgttaaaaaaactttgtcttcctttattaggcgcgctgctgctggccggctgcgccagcagcggcaatacccttaacgtcacgccgaagatcgtgctgccaactcaggatccgacgttgcagggcgtgaccatcagcatcaacggcgccgatcagcgtaaggatcaggcgctggccaaagttaaccgcgatagccgtctggtcaccctgacgccatcgcgcgatctgcgtttcctgctgcaagaagtgctggagaagcaaatgggcgcgcgcggctatatgatcggcccgaatgcaccggttgacctgcagatcgtgatgaacaatctgtatgccgacgtcaccgaaggcaacctgcgctacagcatcaccaccaaggccgatatctcgattatcgccgtggcgaaaaacggcaacaagcaggtgaagaactatcgttcgacctataacgttcagggcgcctttaacgcaaccaacgataaaatcaccaacgcggtcaataccgtgctcggcgacgtgatcgctgatatggcacaggacaccagcgtcaacgactttatcaagcagaacgcgcgttaa

SEQ ID NO: 443807 - DNA, 915 bp, Serratia marcescens
atgaaaataactgttcttggttgcggcgccctcgggcagctgtggctctcccggctgtatcagcagggccatgatgtacaaggatggttacgcgtacctcagccgttttgcgccgtcgatgttattgaaaccgatggctcccgcttcagtcagagcctgctcagcaacgacgccgagcatctgcgcagcagcgaactgctgctggtgacgctcaaggcctggcaagtctccgatgcggtagcggccctgctgccgaagctcaaccccgcctgcgccattttgctgctgcacaacggcatgggcacacaggatgaactaccggccaacgagcagccaatactgcaaggcaccaccacccacgccgcgcgccacgacggccataccattattcacgttgccgacggcaccacccatatcggcccgacgtctccggctgcggaagcgctcagccacctggcggaggttctgcatcaggcgctgccggacgtcgcctggcacaatacaattaccgccgcgctgtggcgtaaattggcggttaactgcgtgatcaatccgctgaccgcgctgtatgactgccgcaacggcgagctgcgccattatcctgagcaaatcacgctgatctgcagcgaagtagccggcgtgatggcgatggaggggcaccacaccacctgtgaggggctgcggcagtatgtgatgcaggtgatagaaagcacggcggataatgtctcctccatgctgcaggatattcacgcccagcgacacaccgagatcgactatattaccggttatctgctgcggcgcgcccgcagccacggcatgatgctgccggaaaacgcccggctgtttgatttggttaagcgaaaggaaaatgagtatgaacgtatcggtgttggtctgcctggcgcctggaagtga

SEQ ID NO: 443808 - DNA, 267 bp, Serratia marcescens
atgccgaaaaaacccgcacaatcagacagtacagagcaaaatgtcagttttgaacactccctgaccgaactggaaagcattgtgacgcgcctggaagcgggcgaattgccgctggaagaggcgctcagcgaatttgagcgtggcgtacagctggcgcgtcagggtcagcaaaaactgcagcaggcggaacagcgcgtgcaaattctgctgaacgacagcgacgacgacgataccgcattaacgcctttcaccccgaacgccgagtaa

SEQ ID NO: 443809 - DNA, 903 bp, Serratia marcescens
atgtctgacttcaacagccagctacaaagctatcgtcagcgcgccgatcgcgccctgctggactttatcgccccgctgccgtttaacgacggccggttggtggcagccatgcgctatggcgccctgctgggcggtaagcgtctgcgcccgttcctggtgtatgccaccggcgagatgttcggcgtgccgtcggacaacctcgatgcgccggcggcggcggtagaatgtatccacgcctattctttgatccatgacgatctgccggcgatggacgacgacgacctgcgccgtggccagcctacctgccacctcaaatttgatgaagccagtgcgattctggccggcgatgcgctgcagacgctggccttctccattctggccgacgccgagatgccggatgtcgcaatgcgcgaccgcctggcgatggtgtcggaactggccggcgccagcggcgtggccggcatgtgtggcggtcaggccttggatcttgctgcagaagaccgtcagattaatctggaagaactggagcaaattcaccgccacaaaaccggtgcgctgatccgctcagccgtgcgtctgggcgcgctggcggcgggcgagccggggcgtgcggcgctggccgaactggatcgctacgcggcggccatcggcctggcgtttcaggttcaggatgacattctcgacgtcatcggcgacactgcaaaaataggaaaacgccaaggcgccgatcagcaacacggaaaaagcacctatcccgcgctgctgggcctggacaatgccagggccaaagcccgggatctgtatcaggaagccttgagcgctctggatacgctggcggcgcaatcatacaacaccgcatcattgcgcgcgttggccagctttattattgaacgcgacaattaa

SEQ ID NO: 443810 - DNA, 978 bp, Serratia marcescens
atggcatgcggcgaatttgaccttattgcccgctattttgaccggttcaagagtttgcgccgggacgtacagttgggcattggagatgactgcgcactcctgacagtggcagaaaaacagcttttagccatcagcaccgataccctggttgccggggtgcacttcctgccggatatcgatccgggcgatctcggttacaaagccctggcggtaaacctgagcgatctggccgccatgggcgcggatccggcctggttgtcgctggccctgacgctgccggaggtggatgaagcgtggctgaaagcctttagcgatgccctgttcgaacagctgaattactacggcatgcagctgatcggcggtgataccacgcgcgggccgctcagcatgaccctgaccatcaacggcctggtgccggcggggcgggctttacgccgcgacggcgcgcgtatcggcgactggatctatgtgaccggtacgctgggcgacagcgccgccgggctggcgttgctgcaacagcggttggcggtggatgatatgacggcgcgcgattatctgctggcccgtcatctgcgtccgcagccgcgggtgttgcaggggcaggcgttgcgcgatctggccagcgcggcgatcgatatttccgatggtttaatctctgatttacagcatctgttaaccgccagccagtgcggcgcgcgcatcgatctggacgaattgccgctgtcgcaggcgctgaccgagcataccgacagcgaacaagcgctgcgctgggcgttaaccggcggtgaagattacgaactgtgcttcacggtgccggagatcaaccggggtgcgctggacgtggcgctgagccatctgggcgccgactacacctgtattggtcagattggcccggaagcggaaggcgtcaaattcttccgtgatcatgaagcggtggagctgccttggcggggcttcgaccatttcagcagcaaatag

SEQ ID NO: 443811 - DNA, 1110 bp, Serratia marcescens
atgcctaaagatcaactgtatatggcgcgcgcgtttgaactggcgcgcctgggccgttttaccacggcgccgaaccccaacgtcggttgtgtgatcgtgcgcgatggcaagatcgtcggcgaaggctaccatttacgtgcgggtgaaccgcatgcggaagtgcatgcattgcgtatggccggggaactggcgcgcggcgcgaccgcctatgtcacgctggagccctgcagccaccacggccgtacgccgccgtgcgccgatgcgctgatcaatgccggcgtcagccgcgtggtggcggcgatgcaggatccgaacccgcaggtggcggggcgcggtctgtaccgcctgcagcaggcgggcatcgacgtcagccatggcctgatgctggcggaggccgaagcggtgaaccgcggtttcctcaaacggatgcgcaccggttttccctatgtgcagctgaagctgggggcgtcgcttgacgggcgcaccgcgatggcgtcgggcgaaagccagtggattacctcgccgcaggcgcgccgtgacgtgcagcgtctgcgggcggaaagcgcggcgatcctcagcaccagcgccaccgtcctggcggacgacccttcgctgaccgttcgctgggatgagctggacgccgatacgcagcgccgctacccgcgtgacaatctgcgccagccgctgcgcattattcttgacagtcagaaccgcgtcacgccgcagcaccgggtggtgcagcagccgggcgcgacctggctggcgcggctgcagcctgaccagcaggcgtggccggaaggcgtggagcagctgacgctgccggcgcacggtggcggtatcgatctggtggtgatgatgatgcagctggccaagcgccaggtgaactccgtctgggtcgaggccggcgcgcagctgtccggcgcgttgctgcaggccgggctggtggatgagctgattgtgtacgttgcgccgaagttgctcggcgataatgcccgcgggctgtgtcacctgcctggcctggaacggctggcggaggcgccggagttcgtgttcagcgacgtgcggcaggtcggtcccgatttgcggttgcgcctgacggcgaaacagtga

SEQ ID NO: 443812 - DNA, 546 bp, Serratia marcescens
atgacaatcagttatcctaaagtctgcctgcttaccgccctgattttgcttgccggctgcgcgcaaaaccgcgacgtgccgaacctgcgcaaccaggtcggcgagctgagccaaaaagtcaccacgctgaccgaacaggctacggcgctggaacgccagaaacagctgaaccaaggttcgaccagcggcgtctatctgctgcccgccgccaacacgccggcacgactgcagagcaatatcggcgaactcagcgtcgcgctggatcgggtaaaaagcgaagccaacggctcgcaggcggtgctgcatatccgcacgctgtccggcaaagcgctgcccgccttcaaggcgatggtggagtggggacggctggatgacaacggccagttgcaaaatgccggcgcgctgtcccagccgattcaaaacggcgactcgctgctggcgaaaaccacgcaaagtttcgagctgcgcttcagcgacgtcaccccggaacagctgggctatatccgcctacacagcgttgagccgctcaccgccgaaagccgttaa

SEQ ID NO: 443813 - DNA, 582 bp, Serratia marcescens
atgaatttccttgctcatctccatttggcccagctggcggacagctcgctgctgggtaacctgctggccgactttgtacgcggcaacccggcggcggactatgcgcccgaagtggcggaaggcattatgctgcaccgccgtattgacgtcctgacggactcgctgccgcaggttaaacagagccgcgattactttggtgccgactatcgccgcgtggcgcccatcacgctcgatgtggtgtgggaccactttctggcgcgccactggcggcagatcgagccggcgcgtccgctcagtgattttacccgccaggcgcgcgatcaaatcgttcctcatctggcgcaaacgcccgagcgttttcagactctgaaccattacctctggtcagaacgctggctggagcgctacgccgaactgccgtttatcgctcaggtgctgcgcggcatggccagtcggcgaccgcggctggcggcgctgggcggctctttcgccgacgtagaacgccactatcatcagcttgaaacacagttctggcagttttatcctcaactgatgcgtcaggcacaggccaaacgcctgtag

SEQ ID NO: 443814 - DNA, 1821 bp, Serratia marcescens
atgctggaagcctggcatctgccggtgccgccgtttgtggaaaagaatgggcagcagttggatatcacgctgtggttgcaggcttcaatgccgcctctgcaggtattgctgcgtgcggaaccggataatgaagagtggctgctgccgatggcggcgcaggccgttgacggtcggctgtgctatcgcgccagcctgacgctgaatgaaggagaggcgacgcggcgctactgctttaagctgctgtgggccgaccgccagcgctggttcggcccgttaggctggtcgctgacgccgccggatcaactgacgcagtttgcgctcgacgagccggacgacggcccgggctgggtggcggatcgactgttttaccagatattccccgatcgcttcgccagcagcggcggcgcacatgggatacagagcggcagttacgtgcatcatgccgccggtacgccggtggagcggcgcagctggcagcagccgttggacgaacggctggcggcgtcgaccttttacggcggcgatctggacggcattattatgaagctgccctatctgcagcagttgggcgtcaccgcgctctacctcaatccgattttcaccgcccccagcgtgcataaatacgataccgaggattactatcaggtggatccgtacctgggcggcaacgcggcgctgcgacgcttgcgagtaagcactcacaaaatagggatgaaactgctgctggacggcgtatttaaccataccggcgattcgcatccgtggttcgatcgccaccggcagggtgaagagggcgcctgccaccatccggattcccgctaccgtaactggtttaacttttatcccgacggcaccgcattaacctggaaaggcaacgccagcctgccgaagctgaattacgccgagccgcaggtagcggcggcgatctatggtgatgccgacagcgtggtgcgtcactggctgaagccgccgtacagcattgacggctggcggctggacgtggtgcatatgcttggggagaacggcggcgccggcggtaacctgcgccatttggcgggcatctatcaggcggccagagaggagaatcctgccgcctatctgctgggcgaacattttggcgatgcgcgccgctggctgcatgccggcgtagaagatgcggcgatgaactatatgggctttgccctgccgctgcgggcgtttctggcgggggttgatgtggcgcgtcatcctgtcgatttggacgccgccgccgttgcaacatggatggacagctaccgcgccggtctgccgcataaccgccagctgatcatgttcaatcagctcgacagccatgacacgccgcgttttttgaccctgctgggcggtaatatggcgcggatgcgcatggcggcggtgtggctgatgagctggatcggcgtgccctgcctgtattacggcgatgaagtagggttggacggcgagaatgatccgctgtgtcgtaaaccgtttccctgggatgagagcctgtgggaacggccgctgctggcgctgtttcagcggatggcggcactgcgcaagcagagtctggcgctgcggcgcggcggctgtcaggtgctgtacgcgcaaggggagacgctggtgtttgtacgtacttaccagcaggagcgcgtgctggtggcgctgcagcgcagcggcggtaatcaggcggtgcggctggcatatagcccgctgctgacgccgggcgactggcggaggctggaaggcgagggcgaactgtcggcgtgcgatggcggcctgtcgctgcgtctggtcgcggaatcggcgagcgtctggcggctttag

SEQ ID NO: 443815 - DNA, 1266 bp, Serratia marcescens
atgcaacaacggattgctcaatggttagatcagtttggcatcgaatttaccgacatcatgtcgctggtgctggtactggtgctgatcgccctgatttcggttgttatccactttatcctgcaccgcgtagtgctggcggccattcagcgccgcggccagcagtcgcagcgcgtctggcaacaggcgctgacccagtacaaactgttccagcgcgcggcgctgctgctgcagggcgtgatcatcaacctgcaggcgctgttatggctgcacagcggcactcagacccaggcggtaatcgtcaccgccgcgcaggtatggatcatggcctatgccctgctgacgctgttctcgctgctggataccctgctggcggtgctgcgcgaaagcccggcggccaatcagctgccgctgcgcggcattttccagagcgtgaagctgatcgccgccgtgttaatcggcattatgatcgtttcgctgttgatgggtaaatcgccgctattgctgctcagcggtttgggcgccatgaccgcggtgctgatgttggtgtttaaggatccgatcctgggcctggtggccggcatccagctgtccgccaacgatatgctgaaaatcggcgactggctggagatgccgaaatacggcgccgacggcgcggtcaccgacatcggcctgaccacggtcaaagtgcgcaactgggataacaccgtcaccaccatcccgacctacgcgctgatctccgattcgtttaaaaactggcgctccatgtcggaatccggcggtcgtcgcatcaaacgcagcatcaatatcgacaccaccagcgtgcacttcctctccgagcaggaagagcagcgcctgaaccgcaacccgctgctgcagcactacctgaacaacaaaacggaagagctgcaacaatataatcagcaggcgcaggtggatctcagctcgccgctcaacggccgccgcctgaccaatctgggcacgctgcgcgcctatctggaagcctatctgcgcgcccacccgcacatccaccagcatatgacgctgatggtgcgtcagctggcaccgacgccggaggggctgccgctggagatctacgcctttaccaacaccacgatctgggcgcagtacgagagtatccagtcggatattttcgaccatatctatgcggtgattgaagagttcgacctgcgtattcatcagacgccgaccggcaacgatatgcgcggcctgttgaaagatatccgcccgacggccgacgtttcctga

SEQ ID NO: 443816 - DNA, 258 bp, Serratia marcescens
atgcacttaacacagctcaaacatcgctttttcacgctgctcagcacgctgctgtttatcggctgcctgcacagcgccgcacgcgttgaagggaacctgaaggtcacgctgcagccggcgctgagcgccttaagccgcgatatgcgggatatccgtgacgcgctgacgcgctacgccggtgaaggcgaggaatcccccacgcccctcacgcgcggcgaaacccgcgctgccgaacgtggagatactgaagataaatag

SEQ ID NO: 443817 - DNA, 1107 bp, Serratia marcescens
atgtgcaattgcaatcatgccgttcatgctgacgtcgtcggcagtttattacgtcctgcggcgctgaaaagcgcgcgtcagcagtttcagcgcggtgagattgacgcggcgcagctgcgggcggtggaagatgagcagatccgccaggcggtggaaaaacagcgccagctgggactggcggtggtgaccgacggggaattccgtcgcgcctggtggcactttgatttcctcgaaggcctggacggcgtacagggctacgacgccgaacagggcatccagttcaacggcgtgcagaccaaggcgcgcagcgtcaaggtgacgggcaagctgggctttaacccgcagcatccgatgctggcggattttcgtttcctgcagcagattgccggcgacgcgcagccgaagatgaccatccccagcccgagcgtgctgcacttccgcggcgggcgtcaggcgatcgacagcacggtttatccgcagctggatgcctattttgccgatctggcgcaaacctatcgcgatgcgatccgcgcgttttatgacgccggctgccgctacctgcagctggatgatacggtgtgggcttacctctgttctgacgatcagcgccgccagatccgcgagcgcggcgaagatcccgaccagctggcgcgcatctatgccgacgtgctgaatgcggcgatcgccggcaagccggacgatctgaccatcggtttgcatgtctgtcgcggcaacttccgctccacctggatctcggaagggggctatgagccggtggcggagatcctgttcggccaggtcaatatcgacgccttcttcctggagtacgataacgaacgctccggcggcttcgaaccgctgcgctttatcaagcccggcaagcaaaaagtcgtgctggggctgatcaccaccaaagacggcgagctggaaaacccggagcaggttaagcagcgcctgcaggaagcggcgcagttcgtcgcccctgagcaactgtgtctgagcacccagtgcggcttcgcttcgaccgaagagggcaacagcctgagcgagcagcagcagtgggacaagctgagcagcgtggtcagcattgccggacaggtctggtaa

SEQ ID NO: 443818 - DNA, 936 bp, Serratia marcescens
atgcgactgacccgagggatatggctctgcctgctgttattgtgcagctccggcctgcgggcgcagccgagcggcatgctgtcgggcaatctttccagcgtcggttctgacacgctggcgaacttgatgtcgctgtgggcgcaggacttcagccagcactatccgaatatcaatctgcagatgcaggccgccggttcatcgaccgcgccgacggcgctggccgccggcgccgcgcagctggggccgatgagccgtccgatgaaggcggcggagctgtcggcgttcgaacagcgctacggctacgcgccgctggcggtgccggtggcggtcgatgcgctggtggtgctggtgcatcaggacaacccgctgccggggctgaaccttggccagttggatcagatcttttccgccacccgccgctgcggcgaagccgccgcactgcggaactggggccagctggcgctgccgggcgactgggcgcagcgcagtattcagcgttttggccgcaattccgcctccggcacctatggctatttcaaactgcgcgcgctgtgcggcggcgactttatggcgcgggtcaatgagctgcccggctcggcgtcggtagtgcaggcggtgtccggatcgctgaatagcatcggctatgccagcatcggtttccgcgccagcggcgtccggctgctgccgctggcggagcggggcgatcgctacgtggcgcccagcgctgccaacgtgcgcaacggcagttatccgctggcgcgctacctgtatatctacatcaacaaagcgccgcaccggccgcttgagccgctgacggcggcgtttcttgaccgggtgctgtccgaggaagggcaggcgctggtcaatcaggacggttatctgccgctgtcgccggcaaccctgcggaaaacccgccaggcgctcgggctgaagtag

SEQ ID NO: 443819 - DNA, 1230 bp, Serratia marcescens
atgcgcctgatacacacctctgactggcatttgggtcagtattttttcaccaaaagccgtgccgccgagcatcaggcgtttttgcgctggctgattgcgcagattgaacagcatcaggtagacgcgctgatcgtcgccggggatctgttcgacaccggttcgccgccgagctacgcgcgcgaactctacaaccgctttgtggtggaactgcagcagaccggctgccaactggtggtgctgggcggcaaccacgactccgtggcgacgctgaatgaatcgcgcgagctgctctcctgcctgaacacccgcgtgatcgccagcgcgcaggccgagaccgggcagcaaatcgtgacgcttaaccgccgcgacggccagcccggcgcgctgctgtgcgccatcccgttcctgcgcccgcgcgatttgctgaccagccgcgccggcgaatccggcacgcagaagcagcaggcgctgcaggaagccatcgccgaacattatctaacgctgtatcaggcggcctgcgcgcagcgcgaggcgctcgatcttacgctgccgatcgtcgccaccggccacctgaccaccgtcggcgtcaccacctcggattcggtgcgcgatatctatatcggcacgctggacgccttcccggcgcaggccttcccgccggcggactatatcgccctggggcatattcaccgggcgcaaaaggtggcgaaaagcgagcatatccgttacagcggctcgccgatcccgctcagctttgatgagctgggcagcgccaaaagcgtgtttatggtcgacttcgccgacggcgggctgcagcaggtcactacgctgcccgtcccgcttttccagccgatgcagttgatcaaaggcgatctcgcccagatagaacagcagctgcagcagtttgccgactatcagggcgagctgccggtgtggctggatatcgaggtggcgacgcaggattacctcagcgacattcagcgccgcatccaggcgctggcggataatctgccggtggaggtggtgctgctgcggcgcagtaaagagcagcgccgtcaggccatcgagcagcaggataaagagacgttgaacgaactgagcgttgatgaggtgtttgaacgccgtctggcgcaggaaagcgaactggaagaagcgcggcgcggccggatgcgcgccatgttccgccagacggtcgacgctctgcagcagaatgaggagccatcggcatga

SEQ ID NO: 443820 - DNA, 3255 bp, Serratia marcescens
atgaaaattctgagcctacggctgaaaaacctcaactcgctgcagggcgagtggaaaatagacttcagcgccgaaccgttcgccagcaacggcctgttcgccatcaccggcccgaccggcgcgggcaaaaccaccctgctcgacgccgtctgcctggcgctgtatcaccagacgccgcggctgcacgtctcccccagccagaacgatctgatgacgcgccatactgccgaatcgctggccgaggtggagttcgaggtcaaaggcgtcggctaccgcgccttctggagccagcgccgggccaaaaacgatccgaacggcaacctgcaggcgccgaaggtcgagctggcgctgctggcggacggcaagatcctcgccgataaggtgcgcgacaagctggaggcggtcgccgccatcaccggcctggacttcggccgttttaccaaatcgatgatgctgtcgcaggggcagttcgccgccttcctcaacgccgacgccaacgatcgcgccgaactgcttgaagaactcaccggcaccgaaatctacggccagctgtccgagcgggtgttcgaacagcataagcaggccaaacttgagctggatgcgctgcaccagcgcgccagcggtattgaactgctgagcgacgaacagcgccaacagttggaaacccagctcgacgcgctgcgtcaggaagaaaccgcgctcagtcagcacgatgaacagcagcggcagacacttaactggctacaacagtggcagcgtctgcagcaacagctgcaacagtgccggcagcgcttacaggcgctgcaacaggaacaggagcaggccgaaccgcagctgcagacgctggcgcgcagcgaacccgccgaaaaactgcgcccgctgcacaatgaacgccagcgctaccgcgatgaactgcaggcatcgcaacagcagttgacccagcttgaccaacagcaacagcagcaggccgcacaaatggcaccgctgcagcaggcgctggagcaggcgcgcgccgaacaacagacacaggcggcgcaccggcaacagcagcagcagctgatcgacgaacaggtgctgccgctcgatcaccacatcgcacagctgagcaaaagtcgtagcgaactgcagcacacccgcgacgacgccgtgcgccagtgcggacagcagaaacagacgctggacaaactgcacgccgaacgcgcacagctggcgacacaggccgagcaacatcagacgcagctgagcgccctgactcaggcgctcgccgcacaacagcagcagcacagcgtgctggaagccgaaacgccgctggccgccctgcgccagcgcctgcagcagctgagcgacctgcgcccgacgcgccagcagctggcgaccctgtcctcgctggcacagcagttggatcaacggctgacgcaacagcggcaggagttggccgccggccagcaacagctgcaacagctggcgccgcagttagaacaggccagacagcagtatcagcagcacaaaaccctgcaggcggaagtagagaaaacccatgagcttgagcagcgcattgtcagtctggaagccgaacgcgcccggctgcagaccggcgcgccctgcccgctgtgcggctctaccgagcacccggccattaccgattatcagacgcttaacccgtcagccagcgcccggcgccttgacgagctgcgccagcagggcgaagcgctgtataaaaacggcgtcgagctgcgcgcccgtcacgacggtatgcagcaacagcaacagcgtcagcagcaggcgattgagcaggatgaacagcaactggcggcccaccagcaacggtggcagaccctgaccgccgagctggcgtttgatttcggcctgcaggagagcgagcgcctgcagcagtggctgagcgactgcgaccgcgaagagcgcgagggccagcagcgcctcagccaacatgagcaggcggcgcaggcggtgcaacaggccaaagatgcgctgatcgcgttgcagaacgcacagcagcaggcgcagcagcagacagcgctgctgaatgaacgcctgacgctgctggaaaaacagtatgccgacgctcagcagcagcagcagcgtctgcagcagcagtggcaggacaacgaggagcagctcgccgcccagcaacggcagcgcctggcgctgtttggcgagcagccggtggcgcaggcgcgcgaacagctgcgcgccaaacaggcggcctgcgaactggccagccagcaggccgccgaacgctggcagcaggcgcaggaacagcgtgaacgcctgaacggccagttggcggggctgcagcagcagctggcgcagcaaacgcagcgcgccgagcaggcgcagcagcagtggcagcaggcgctgagcgccagtgaatttgccgatgacgccgccttccacgccgccctgctggacgatgcgcagcgtcagcatctgcaacagctgaaagagcagctgcaacagcgtcaggtggaaacccgcgcgctgctggcgcaggccgaacaggcgcgcgagcagcaccagcagcagcgcccgcaaggtgtggatgaccaacatgccgatctcacggcgctggcacagcagcagcaggcgctggcgcagcagttgaagacgctgcagctgcgtcagggcgagctgcgcaaccagctgaccagcgacaccgagcgtcgcggcaatcagcaggcgctgttcgcgcaaattgcccagagtcagcggcagtatgacgactggagctacctcaaccagctgatcggctcaaaagaaggcgataaattccgtaaattcgcccaggggctgacgctcgatcatctggtctatctggcgaacaaccagctcagccgcctgcacggccgctatctgctgcagcggaaaaacagcgatgcgctggaactgctggtagtggacacctggcaggccgacgcgcagcgcgacacccgcacgctgtctggcggcgaaagttttctggtcagtctggcgctggcgttggcgctgtccgatctggtcagtcacaaaaccagcatcgactcgctgttcctggacgaaggcttcggcacgctggatgccgagacgctggataccgcgctggacgcgctcgacagccttaacgcctccggcaagaccatcggcgtgatcagccacgtcgaggcgatgaaagagcggatcccggtgcagatcaaagtgaaaaaggtcaacggcctggggatcagccggctggagccgcagtaccgcgtcgaaggctaa

SEQ ID NO: 443821 - DNA, 909 bp, Serratia marcescens
gtgcgtattggaattgatttagggggcaccaaagttgaagtgattgcgctggcggacgacggcagcgagcggtttcgccaccgtatcgccacgccgcgcgatgattatgcgcagacgctgcaggccatcgccggactggtgcagatggcggagacgcataccggcgagcggggcacggtgggcgtcggtattcccggcacgctgtcgccgtttaccggcctggtaaaaaacgccaactccacctggctgaacggcaagccgctggataaagacctgtcgacgctgctgcagcgcgaggtgcggctggcgaacgacgccaactgcctggcggtgtcggaggccaccgacggcgccggcgccggcaaaccggtggtgtttgcggtgattatcggtaccggctgcggcgccggcgtggcgatcaacggccgggtgcatgccggcggcaacggcattgccggcgagtgggggcataattcactgccctggccggatgacgacgagctgcgctttcgcgatgaggtcccgtgctactgcggcaagtccggctgcatcgaaagttttatttccggcaccggttttgccgtcgactacgcgcgtctgagcggcaatcccctgaaaggggaagcgatcatgacgctggcggcgcagcaggatccgattgccgagcgggcgattcgtcgttatgagcagcgtctggcgaagtcgctggcgcatgcggtcaatctgttcgacccggatgtgatcgtgctgggcggcggcatgagcaacgtggagcggctgtatcacaacgtcccgcaaaaagtacgggagtgggtgttcggcggcgagttcgccacgccgatccgtcaggcggtgcacggtgattccagcggcgtacgcggcgccgcctggctgtggcctcagcaataa

SEQ ID NO: 443822 - DNA, 399 bp, Serratia marcescens
atgacacagttaaccccgcaagatatcgtgctgcaggcgctgcaacaggtggtggcgcagccacaacatcagccggcggccatcgccgcatttttcgccgacgattatcggcagacggtggacgggcagtcgctggactatgcgcagtttgtcagtcatatggcgctgcttaagcagatcacccggcggatgacgctgcgggtgcaggcgctggcggcgcagggcgacagcgtgctgagccatcaccgggtcgaggtggaaaaatgcgacggcacacgcagtgagattcaggtgatggcgcatttcatactgcgcgacggcaagattatcgcctgcgatgaactgacccgtcagctgtcgggcgatcgtgccgatcatgaccttggcggccgttattga

SEQ ID NO: 443823 - DNA, 735 bp, Serratia marcescens
atgcaactgcgcggcataccgctatctcatcccaaccggcaccttaccccctggcatcagcatgatgacgggcagatttacctgctgacgcgcggcactatcgccctggaaaccgagcggcgccagtgggcgatgaccgccggcacgcttggctggctgccggcgcgctgccgccatcaggcgcagtcctgcgggcaggttgaaggttggctgctgtttctgccgccggagaactgccggcatctgcctgctcagccgcggctgttggccgccagcgctctggcgcaggcgttaatggcgcgcatcgcgcagtttccgccgtcgccgttaccggcgccgcagcggcgcatggtgcaggtgttgcttgatgagatgcagggagaagaagagacggcgctacagctgccgatgccgcaggatccacggctgctgaaaatcgcccgtgcgctgctggacgaccccgccagcacgcggcggcagaatgaatgggccggctgggccggcatcagcgtacgcaatctcagccggttatttatggcgcagaccggcatcggctttgcccgctggcgtcagcaggcgcgcattatccgttcgctggaagcgctgtcgcgcggagtttcggtcgccaacgtggccgccgactgcggctatgacaacgtcagcgcctatattgccgcgttccgccgccacttcggcgtcacgcccggcggctacttcgccgcgctccccggctag

SEQ ID NO: 443824 - DNA, 477 bp, Serratia marcescens
gtggggagcgcgttggcgcaggcgatggactatcgctttattgatatcgatctgtttatgcagcagacgacgcagatgagcgtcgccgaaatcgtcgcgcaggagggctggcagggctttcgccgccgcgaaagcctcgccttgcaggcggtgacccatccgtcaaccattgttgccaccgggggcggcgcggtgctggcggaagagaaccgtcgctttatgcagcagcacggcacggtgatctacctacgcgcaccggcggaggtgctggcgcagcggctggaggagtctccgcaagacgcacagcgaccaaccctgaccggccggccaatcgctgaagagatgctggaggtgctggccgcgcgcgaagcgctgtatcaggatgcggcgcatcatgtgctggacgctgcactggacccgcaccgggtggtgacgcagatcctggagatgctgcgcctgcatgaggcggtgaaatag

SEQ ID NO: 443825 - DNA, 516 bp, Serratia marcescens
atgagtgtgacgattcgcccggcgcagactgcggatatcgaggcgatgatggcggcggaacgttcggcggcggaattgtttcgcccgctgccgcagtgggcgtttattgccgatgacgccatcatgtcggccgcgcagcatgcggcgctgattgccgaagagagcgaatggctagcgcaggacggcgcggccgtcgccggttttatcgccgtacgccggcatggggacgaatggcatattgccgaattgtcggtagcggctgagcaccagcgacgcgggattgggcgtcagctgatcgtagcggtggccgactgcgccagccggcagggcgtcaggcagctgacgctgaccacgtttcgcaacgtgccgtggaatgcgccgtattaccgccggctggggtttgaaaccatccctacggtggagctgtcggcgcggctgcgcgcccagatggcgagcgaagccgagcacgggctgccgttgggcagtcgatgtgcgatgaaatttacactattgtaa

SEQ ID NO: 443826 - DNA, 2124 bp, Serratia marcescens
gtgaataactatcaacgcggctggctgtgcgccattccgctggcggccggcagcgcctggccggccgtcggggccgaaaatcataacgataaatcagaacatatgctggtgatcggcagcagccaggcgccgagcgccgagagctatcagccgctgaccagcgtgaccggcacgcgcagtgaaaccagcctgctgaacgtgccgcaggcggttgacgtggtgccgacgcaggtgctgaccgatcaggcggtcagtaatcttgatgaggcgctgtacaacgtcagtggcattacccaaagcaatacgctgggcggcacgcaggacgcggtgatgaagcgcggttttggcgacaaccgcgacggctccatcttacgcgacggcgtccgttctattcaggcgcgtaactttaccccgaccaccgaacgggtcgaggtgctgaagggacctgcgtcgatgctgtacggcatgggcgaaccgggcggcatgatcaacatgatcagcaaaaagccgcagctgcagcagcatacccacgttgaaggctggggcagcagctttaagggcggcggcggccagctggatgtgaccggcccgctgggcacctcgggttttgcctatcggatgatcgtcgaccatgatgaaaccgactactggcgcaatttcggccgcaaccgccagacgacgattgcgccgtcgctgatgtggtacggcgagagcaccacggtgcgtctggcctacgagcatatggagtacctgacgccgttcgaccgcggcaccattatcgattcgcgcaccggcaagccggtcgatacgccgcgcgatcgccgttttgatgaggcctacaacgctacccgcggcgatcaggacagcgtgacgctgcagatcgatcaggtgctgaacgaccgctggaaaagctcgctgacctacgcttataaccgcaacagctacagcgataatcaggcgcgcgccaccaagctggacccggagagcggcgcgctgacgcgtcaggcggacgctaccgcccatgcggtcagccatgccaacgcggtgcagctgacgttgaacggcgacgtggattggggacgggtcaatcatcagttgctgttcggttttgatttcgaagacagccgcacctaccgcggcgatatgatccgcggcagtaaaaacagtgatttcaatatctaccatccggtgtacggtcagatgccggcctcgaccaaggtcagcgccaaagacagcgatcagcgtgaaaacctgaccagctatggctggtttatgcaagattccctgcaactgaccgataactggctggtgatgggcgggctgcgttacgacacctttgacgtctatgccggcaaagggcggccgtttaacgtcaataccgacagctcggaggcgaagctggtgccgcgcgccggggtggtgtacaaactgacgccgtatgtctcgctgtacggcagctacaccgagtccttcaagcctaactcctccatcgccacccagattggctcactgccgccggagcaggggaaatcctgggagatgggcggtaaggtcgccttgccgaacggcatcaccggcacgctggcgctgtttgatatcaccaaacgcaatgtgatggtcagcgagctggtggacggcgaaagcgtgacccgcaccgccgggcgcgtgcgttcgcagggggttgaactggatatggccggcaatatcaccgacagcctcagcctgatcggcgcctacgcctataccgacgcgcgggtggtggatgacccggccaacaaaggcaaggagatggctaacgtggcgcgccataccgcctcgctgttcctgacgcagaacctgggatcgccggggctgtacagcggcgatgagctccgcgtcggcgccggggcgcgttatgtcggacgccggccgggcgatgccgccaacagcttttatctggatcactacaccgtggccgacgcttttgccgcctacagcatgccgttgcacggctaccgggtaaaatggcagcttaacgtcaagaacctgttcgacaaaacctattatccttccagcggcaacaatctgcgggtggcggtaggcgaaccccgcgaggtggtgctgcgggccagcgtggatttttaa

SEQ ID NO: 443827 - DNA, 1119 bp, Serratia marcescens
atgcgtaaatccttcctgttgttactggcctccctgctattttccattctgtcctgcgcccaggcgaaaacggtgacggatattctgggccgtcgcgttgacgtgcccgataatccgcagcgtatcgtgctgggggaaagccgcatgctgtatacgctggcgctgctggagccgggagatccggcccggcgggtggtgggctggccgcgcgatctggcgcgttatgacgcccagagctggcagctgtacagccggaaattcccgcacattgcgcagatcccggcgatcggcggcggcaactttcgtcagatcaatccggaaagcctgatccaactacggccggatctggtgattctggcgcgctatgcgcgcgaagacggcgatgaggcgcagcgggtggcggcgctgggtaaagcggggatcccggtggtatatgtcgatctgcgtatcgatctgctgcacaacaccgtaccgagcgtgcgcctgctgggtgaactgctcaaccgtcaggcgcgtgccgaggcgtttattaccttctatcagcagcacatgacggcggtccgcgaacggctggctgcctatcacggcgacaagcccaaagtgatgctgcatctgcaccttggccggcgtgacacctgctgcaccaccgccgcgcacggcaatctgggggatctggtgacctttgccggcggcgagaatatcgccaacgccagcattaagggcgtgtacggcgaactgaacccggaaacgctgctgaccgccaaccccgatgtctatctggccaccggcatggccggtgagcagggcaagcgctattccgacctgttgctggggccgcaggtcagccgccggcaggcggacgacagcttccgccgcctgattcaacaacaaccgatgatcgccgggctgaacgcggtaaaaaaccagcgggcctggagcatttggcacaacttttatctcagcccgtaccacgtggtggcggtcgagatgtttgccaaggcgttttatccgcaactgtttgccgatatcgatccgcaagagactttccggcagctctaccaacaatttttgccgttgccattttcagggacctattggagtcagttaacaggtgaataa

SEQ ID NO: 443828 - DNA, 558 bp, Serratia marcescens
atgatcaatgcgacacggctgcaactgaaacaccgcttttcttatatccagcagtttatggcctcgccgcgtaccgtcggcacgctggcgccatcctcgccctggctatgccaggccatgttggatcagatcgaatggacccgcacgttatccatcgccgagctgggcgcggccgacggcgtattgaccaagcgtattatcggccggatgcgcgccgacgccgggctggacgcctatgaaatccagccgaactttgtccggcgtctgcagcagattgaggagccgcggctgcaggtgatggcgcagtcggcggaaaggctggagcgggagtacgacgtgattttctcttgtctgccgctgctgtcgataccgctcaagatcagcatgcgcattctgcagcaggcgcgggaaaacctgcaggggcgcaacggtacgctggtgctgttccagtacagccatctgtcggaaaagctgctgtcgcgctacttccactggaagaagcagcgcgtggtgcgcaatttcccgccggcgctggtgtacgtctgcaccccgcgttaa

SEQ ID NO: 443829 - DNA, 285 bp, Serratia marcescens
atgaaacgcttttattcttacctcaccgccgcgctgctggccggcgcttcgttttccacctttgccgcgccgctcagcgtcacggcggtcaataatcagcaggctgcgtcgttacagagcctgggtgcggtatcggtgtccggcgttgccggcacgtcggacgacgcggtcagaaaactgcaggaaaaagctgcggctcagggcgcctcccattaccgtgtgatcggtctcgatacgccgggagactccagcctgtggcggggtaatgcagaaatttaccgctaa

SEQ ID NO: 443830 - DNA, 756 bp, Serratia marcescens
atgtataaaaagggtgacgttttttaccacatcggcctgaaggaaggtgacgtcgggcgttatgtgctgttgccgggggacccgttcaggaccgatatcattgcgcagagcctggacaacccgcggctggtggctcaccagcgcgagcataaaacctggacggggacgttaaacggcgagaaagtgtcggtcacctcgaccggcatgggctgtccgtcgacggccatcgccgtcgaagagctgatcgccgccggtgcggatacctttattcgcgtcggcaccgccggccgtgtggccgcgccggcgcatgacggcggtgtgtccggtaccatcgtcacggcggcgatccgcgatgaaggcaccacaacgcagtatttaccgattgaatacccggcggtcgccgaccggcgggtggtgcaggcgctggccgaggcggcggatacgctgggctatcgcttcctggaaggcattacgcactcgaaagactcgttctatacccaggtgttccctgatgcggtgccggcgggcgagctgtggcaggcgcggcagaaaatctggcagcgctccaacgtgatgtgctccgagatggagtcggcggcgatttttgttatctcctcgattcgcggctgccgagcgtccggcgtgatggccttctccgatgcgccggatcaggccgccgaggtggcgaaggcgatcgacaccgcctgtgaagcgattaagattctgatcgcgatggataaacagagcgggaaataa

SEQ ID NO: 443831 - DNA, 768 bp, Serratia marcescens
atgaacagcaatagccacaacgatgccgtcgaccgtcagtttggcgcacaggccaacgcctatttaaccagtgcggtgcacgcgcagggcaatgatttacaacgtctgggccggctgctggcggcgcacccgcaggcgcgggtgctggatctgggatgcggcgccgggcatgccagctttacggccgccgcgcaggtgtcgcaggtcgtggcctacgatttgtcggcgcagatgctggcggtggttgcgcaggcggcacaggagcgggggctgagcaatattcagacgcagcagggcgtggcggagtcgctgccctttgccgacggcgactttgatctggtgatcagccgctattcagcacaccactggcatgatgtcgggcaggcgctgcgtgaagtcaaacgggtgctgaagccgggcggcaaggcgatcctgatggatgtggtctcgccggggcatcctttgctggatatttatctgcagaccgttgaggtgctgcgcgatacttcgcacgtgcgcaactatgcgccgggtgagtggttaagcatgctgacggcggcggggttgcgggcggaagaggtgaccagcgaccgcctgccgctggagttcagcagttgggtggcgcggatgcgcacgccggagacgctggtggccgccatccgggagtttcagcggcaggtgtccgacgaggtggtcagccatttcgccattcagccggacggaacctttaccagcgatattatgatgctggtggcgcggcgcggttaa

SEQ ID NO: 443832 - DNA, 792 bp, Serratia marcescens
atgacctcaacatcagaagccctgtccggcccgaaggccctgggcgcattcctgcgcgcccaccgggaacgcatcacgccggaaatgatcggcctgcccagttcgccgcgccgccgcaccagcggcctgcgccgggaagagctggcgcaaatcagcggcatcagcgccacctggtatacctggatagagcaggggcgagaagtgtcgatttcaccgcacacgctggcgcgcatcgccaaggcgctgcgcctcggtaatgcggaacgtcactacctgtttaccctggcgcgcgtggccgacccgcaacagacgccgcaacaggacggcgtcaatcaactgattttgcacagcgtacaggcggtaacggtgccctgttatctgctggacatcacctggaatatgctggcctggaacgcccaggcggaagcgctgtttgccggctggctgggcgaggaggcccagcctaatctgctgcactttatgtttttccatccgctggcaaaaacgctggtcgatgactggccggatcgcgcccgccgcgtggtagccgagttccgcgcagaaaccagccatcatcagagcagcgaaaccatgcgcgctttcgtgcgccagatgacgcaccacagcgaagattttaaccattggtggcaacagcacgacgtgatggcgcgcgccggcggggagcgtcgttttcgccatgccgagcagggccagatgcgctaccagcagctgaccctgcacccggcggaaagcagcgcgctgaagctggtgatgctgatgcccttgccgtaa

SEQ ID NO: 443833 - DNA, 747 bp, Serratia marcescens
atgcaatcagaagaacaacgccttatcgatggcctgttcggccgcttaaaagaggctgaaaccaaaacgggacaacgggatgctcaggcagaacagcaaattaaccggcatctgagcgaacagcccgccgcgccttactatatggcgcaggcgatcattattcaggaagccgcgctgaagcagttggatcagcgggtcaaagagctggaaggccaagtcacgcagctacagcagaacggcgccggccagcaaagcagcggcggatttctcgccgggctgtttggcggcggtaccggccgcagcgcccccagcccgcaggctcaggcccaggcgcgccagcagaacaacgccgcgtggaataatcagccgcagggcggctatgcgccgcaacagcagcaggccacgccgtcacgcgccggcagtttcctcggcggtgcgctgcagactgccgcaggggttgccggcggcgtcatgctggcggatatgctgaccggtatgttccgccatacccagccggaagagattgtgaatatcattaatgaaacgcccgccgacgacgcgcagaacgctgcgctgcaggatgatagcgcgatgcgtgagtttgatgcgtccaataatctcgacacctttaacaacggtgacggcagcttcctgtcgcaggacagcggctggcagaatgccgattatcagagcgatgatttcgccgacgatgacggcttcggcaatgatgatgattcatttctttaa

SEQ ID NO: 443834 - DNA, 258 bp, Serratia marcescens
atgggaatcagtgaagaagaatatattcgtcgccaaagtcgggagaaacacgccgtcggtaatatggcgaagtgggtagcgattgtttcggcggtatattttgttttgatggccttctacggtcatccgaccggcgtactggccatgtccggcgtcatgtttctggtgtccaccaccacttggctgaagaagcgccagaaagtaaagtcctaccgtcgcgcgctggcgcgtatcgaaacggacgaagtcccgcagtaa

SEQ ID NO: 443835 - DNA, 333 bp, Serratia marcescens
atgaaaatgcgattgaaagctctggcgctgccggcgctggccgccgcggtgttgttcagcagcagcgcgatatcggcaccgacggccaaagaggcgcctgcaccgcagatggcggggaaagagcgcccgccgttcccggggccgcatccgatgcctaagcccggcttctgccacggcggcgagctgttttgcgcctcatcgctgagcgacaacccgacggaaaccatcaataagctgacctcggtgatcccggcgggcaaggccaagcgctatgaagtacgggtgtcggtggttgagctgccggctcagccgccggtgccgcctgcatcttaa

SEQ ID NO: 443836 - DNA, 888 bp, Serratia marcescens
atgaaaaagatccttggcgtgtatgacagcccgcaggcgcactgggtcggcaacggttttctggtcaactccctgttctcatataacgagctgggggcggaaatgagcccgttcctgctgttggatcatgcggcgccgaccaagtttcgtgaaaccaccgggcggcgcggcgtcggccagcatccgcaccgtgggtttgaaaccgtaaccatcgtctatcagggagaagtggaacaccgcgactccaccggcggcggcggcgtgattggccccggcgatgtacagtggatgacggcggcttccggcattctgcatgaagagtttcattctacggcgttttcccgccgcggcggcaccgtagagatggtgcaattgtgggtgaacctgccggccaaagacaaaatggcggcgccgggttaccaaacgctgctgaatcaggcgattccgcaggttccgctggcggacggtgccggccaggtacgggtgattgccggtaactttgacggtcacgccggcccggcgcgcaccttcagcccgctgaacgtctgggatatgaagctgaatgccggccatcgcacggagctgacggtgaccgagggccatacgttggcgttggtgatcctgcacggcgcggtgctggtcaatgatgagcagatcgtgcgtgaaacccagatggtgcggttggatcgcgccggcgacagcatcaccgttgaggccaacaacgacgtgagcctgctggtgctcagcggggagccgatcgatgaaccgatcgtcggttacggcccgtttgtgatgaacagcgaagcggagatccagcaggcgtttcatgatttcaacagcggcgagtttggcgtgatgccgccggtggaagcgcagttggaacgctga

SEQ ID NO: 443837 - DNA, 909 bp, Serratia marcescens
gtgttggttgatttaaacgatctgttctttttcgccagcgtggtggatcaccggggatttgccccggccggccgggcgctcggcatccccaaatccaagctcagccgccgggtggcgctgctggaagagcggctcggcgtgcggctgctgcagcgctcaacgcgtcgcttctcggtcaccgaggtcggccagagctattaccgccactgcaaggcgatgctggtagaggccgaagcggcgcagcaggcgatcgaacaaacccgtgccgagccttgcggcacggtgcgcatgagctgtccggtggcgattttgcatacccgcgttggcgatatgctggccgcctttatggcggattatccgcaggtcacgctgcatctggaggccaccaaccggcgggtagacgtggtgggcgaagggctggatctggccatccgcgtacgcccgccgccgctggaagacagcgatctggtgctgaaagtactggcgacccgtcgctggtgtatcgccaccagcccggcgctggtacgcaccttgggcgaagtgcggcagccggaggatctggagcgctacccgacgctcgacctcggcccggcgcgcgcgcaacatcagtggacgctgtacggcccgcaggaaaaaaccttccgctgggagcaccatccgcgcctggtcagcgacgatatgctgatgctgcgtaaagcggcgatcgccggcgccggcattgtgcaactgccgcgtatgatgatgcacgatgaaatgctacgcggcgatttaaccccgctgctgcctgactggcaccccgaaggcggtatcgtgcatgcggtctacccgtcccgccgcggcctgctgccggcggtgcggctgctgctggattatctcggccagcagttcgccgcgctggaagaagagtaa

SEQ ID NO: 443838 - DNA, 612 bp, Serratia marcescens
atgttactgagaatcgcaaggtggctgtttcaattacccggcaggctgtttggcatggtattcagccgccgtctgacgacctttatcttttttatgctggtggcgctgggcgtcatcgccgtgaagcgctatctgcgcaccgacccgcaggccgagccgctctccccggccgcgcagccccactatgatattcagcgcgaagtgccgccgcgcgaggcgcgcgggcagtgtggcgggccgctgcacgacaaccagggcagcccctggccggattccgccggctatttacggcagcccgacgcacaggaacgcggccggacgcagcgcatcacgctggataatcagcataacgccttcgccgtgcgggtaaagctggccagtgcggaaaacccgcagcacgtcgccgacctgtttattcccgccgccgccagtttcagtatccagaccaccgcggcggaacgctatgtgatgaaagtgaaagatatccaaagcggctgcagctaccgttcacagccctttgctctggccagcgaccacaactggcggctgcccatcagcctgcacagccacggtaaggtgcaatttcaggccattgacgccggccagttttaa

SEQ ID NO: 443839 - DNA, 210 bp, Serratia marcescens
atgaaaaccaataatgatgcgccgccgccgccgccgccgccacgaaccatcggcatggcgaatccggccgatgtttactgcacggagattggcggcaaactgaacgccaaagagaatgagcacggccagtattccacctgtacgctgccaagcggtgaagaaattgagagctggcagctgttccgccgtgaccatccggtgaaaaaatag

SEQ ID NO: 443840 - DNA, 483 bp, Serratia marcescens
atgaataataagcatcgtgcattgttggcgctggcattggccacctcattgagcgccggcgcggcgcaggccggtttaatggattccgtcagcaacgccgccggcgaactgagcaaatccggtggggaaagcggcggtacgtcgctgtcgaccctgaccggtctgctgaacggcggcgacaaggcgctgagctccggcagcatgaccaacgcggccggtatcctgcagtactgcgtgaaaaacaatgtcctgtcggaaagcggcgcggcggatgtgaaagacaaactgctggggaaactgggcatcagcagcgagtctgacgccaaaagcgaagactaccagcaggggctgggcggcctgctgcaaaccggcgaaggcaagagcctggatctgaacaacctcggcacctcgcagatcaccgaaaaagtgaagcagaaagcctgcgatctggtgttgaaacagggcaaatcctttatttcttaa

SEQ ID NO: 443841 - DNA, 1680 bp, Serratia marcescens
atgaaaatcactatcggacaatttatcctgcaacaacttcgcaccctgaatattgaacatatctacggcgtgcccggcgattataatctgtcgctgctggaaatgattgagcatgacgatagcgtgcagtttgtcggcaactgcaacgagctgaacgcctcttacgccgccgacggctatgcccgtctcaacggcgccggcgcgctgattaccacctacggcgtcggcgatctggccgcgctgtccggcattgccggcgcctatgccgagtcatcgccggtgatctgtctggccggcaccccgccgctgcacgcgatgaaagatcacgccctgctgcaccattcgctggcggacggcaacttcgacaacgtgatgaactgctttaaacagtttaccgtcgcccaggcgctgattacgccggaaaacgccgccagagaaattccacgggtgattgccgccgcctggacggagaaaaaaccggtctatctgcagttgccgtcagatatctgcgaggtgcagatcgatatcgccgggccggttgccgcgccgcagctgcccgccagcgatccgcacaacctgcagctggccgccaaggtgctgctgcagcggctgcgcagcgccaaacatccgctgatgctggtcgatcaaatggtcgaccgctatcagctgcagcaactgactatcgccgtggcgcaacgcttcggcattgcgctgaccaatatgccaaccgccaaatgcattattccggagacgaccgccggctggatagggggctacagcggcaacctgtcgcgtccggagctgtttgaactgatggccaaatccgactgcgtgctgagctttggcgtacgtctggtggattccaccaccggctatttctcccaccaaatcccggccgcggcgcaggtcgatatccagccctactcgctgaaactggataacaccgcctacccggcggtggcgaccgccgatttactgcagacgctgctcgacgccgatgatcggccacacgccgcgccaatggcaacgctgcctaacccgcacgcccagctggccgcgccgagcgacgcaccgctcgatcaggcctatttctggcagcgaatgagtcgctttattcgtgaggatgacgtactggtggtggaaaacggcacctcgggcgcggccgtcggcggcatgcgaatgccggacggggtaaaagtggttaaccagccgatctggggctcgatcggctacaccctgccggcgctgctcggcacgctgatggcggcgccacagcgacgccatatgctgtttatcggcgacggctccttccagctgaccgcgcaggaagtctcgaccctgctgcgctatgagcagaaaccgatcatcttcctgattaataacgacggctacaccattgagcgctacattctgggggaaaattcgtcctacaacgatattggcccgtgggactacgccaaactgccggcggtgcttaatacccaggcgcggccgttctgcgcagcggtagaaaccagccagcagctggaaatagcgctggaacacgcctcacgtcaggagacgctggcgtttatcgaggtaaaactgccgatgatggatacgccgccggtgatgaaagagttctgcaaccgctgcaacagctttaacttcggcctgaccaacccgcgccgcagcgcataa

SEQ ID NO: 443842 - DNA, 1104 bp, Serratia marcescens
atgcctaactatcgaacatttaccggtcgcgcgctgacgctgaccgcgctgctggtgttggccggctgtaccagcaaaattacgccgcaggcgccaagccgcactccggcggaggtgaaggcacaggtggtcaaactgatgccggccaacgcgcagaataagcagggatgggccggcgacattagcgcggcctttgccgcccaggggctggatgccagcgatgagaacctgtgcgccgtgctggcggtgaccgagcaggagtccaccttccatgccgacccgcaggtgccggggctgtcgaaaatcgcctggcaggagatcgaccgccgggccgataagctgcatatcccgcattttgtggtgcgcaccgcgctgctgcttaaatcatccaacggcaaaagctacagcgagcgcctggacaaggtgcgcagcgaaaaagagctgagcgccatcttcgacgactttatcgatatggtgccgatggggcagcgcctgttcggcaacctcaatccggtgcataccggcgggccgatgcaggtcagcatcgcttttgccgaagcgcatgccaaaggctacccgtactcggtcgacggctctattcgtcgcgaagtgttcagccgccgtggcggcatgtatttcggcattatgcacctgctggattatccggccaattacagccgctcgctgtaccgcttcgccgactttaacgccggctggtacgccagccgcaatgccgccttccagagtgcggtcagccaggtcagcggcattccgctggcgctggacggcgatttgattatttatggcagtgataagccgggcaccaccgaactggcggtacgcacgctggcgaagcggctggatatcagtcattccgccattcgtcgtgcgctggagaaaggggatacgctggagtttgaagacaccgatctgtatcagcaggtgtttgcgctggcggataacaccgccgggaaaaaactgccgcgtgaaatgctgccgggcattaccctggaaagcccgaaaattacccgtaaactgaccaccgcctggttcgccaagcgggtggacgagcggcgtcagcgctgtatggcgcgcgcccgctaa

SEQ ID NO: 443843 - DNA, 609 bp, Serratia marcescens
atgtccgcagacattcagccggaagactactttcatcagaaatatggcttaacccgcacccactcggaagtgattgccgccgccgggcgactgcccgccggcaaggcgctggatctgggctgcggcggcgggcgcaacgcgctgtatctggcgttgaagggctttgacgtcaccgcctgggataaaaacgccgtggcaatcgccgagctgaaccgcattatcgacgccgaagggctgagcgcgatccgggccgccgagcaggatctgaacaatctgcgtttccacggcgactatgattttattctctcgacggtagtcatgatgtttctgcagcctgcggcgattccgtcaatcattcaggatatgcaggccagcaccgtcagcggcggccataacctgatcgtcgccgctatggatacgccggatttcccctgtccgctgccgttccccttcgcctttaagcccgatgaactgaaaaactactatcgggactggcagatagtgaaatacaacgaagacgtcggcgaactgcataaaaccgacgccaacggcaaccgcatcaagctgcgcttcgccacgctgctggcgcgcaagccgtccgcactctga

SEQ ID NO: 443844 - DNA, 639 bp, Serratia marcescens
gtgttagaaagtttcggcgtcctgaatttatggacctatctggccggggtgatatttattatcgtgctgcccggccctaataccctgttcgtactgaaaaccggcatctcccgcggtattcgcgccggttacaccgccgccctcggcgtatttatcggcgacgctattttgattttttgcgcctatatcggcgtggccacgctgatccgcactacgccgctgctgtttacgctggtgcgttatctgggggcaatttatctgctgttcctcggcgtgaagatcctctacgccaactttgtgcaaaaaaatctgccggaacaccagacgctggaagacagccacagcattctgcgcaagtcgctgacgctcagcctgaccaaccccaaggcgattttgttttacgtatctttcttcgtgcagtttatcgacttcaactacgcgcataccggcctgtcttacaccattctggcgctgattctggaatcggtcagctttatctatatgagcacgctgatctttgccggcagcatgctggcgcacttcttcagccataaaaaacggctggccaaactgggcaacggcctgatcggcctgctgttcctcggctttgccacccgcctggcgacgctcagctcctga

SEQ ID NO: 443845 - DNA, 1500 bp, Serratia marcescens
atgcctgatactaccgtagcagtgatggacaacgtgttgcgctttcttgaacgtcagcacggcttgtatatcgatggacagtggcagagctcgcagtctgcgacgcggctgccggtctataaccccgccgacggcaaacagatcgccaccagcgccgacgccagtgcggacgatgtcgcccgcgcggtgcaatccgcccatcgggcgttcagcgacggcgtctggtcacggcgcctgccggccgagcgtgaacgtattttgctgcgctatgccgatctggtagagcagcacgccgaagagttggcgcagctggaaacgctggaacagggcaaatccatcaatatctcccgcgcgttcgaagtgggctgcaccctgaactggatgcgctataccgccgggctgagcaccaaaatcaccggccagacgctggacgtttccattccgatgccgccgggcgccaactatcaggtatatacacgcaaagagccgatcggcgttgtggccggcatcgtgccgtggaacttcccgctgatgatcggcatctggaaagtgatgccggctctggccgccggctgttcaatcgtgattaaaccgtcggaaaccacgccgctgaccctgctgcggatggctgaactggccagcgaagccggcgtgccgccgggagtattcaacgtggtgaccggcagcggtgccgtctgcggcaaagcgctgaccgaacatccgctggtcgccaaagtcagctttaccggctcgaccgccgtcggcaagggcatcgcccgcgccgccgctgaccggctgacgcgcgtgacgctggaactgggcggcaagaacccggccatcgtgctgaaagacgccgatatcccgcaggtggttgagggtctgatgatgggcagcttcctgaatcagggccaggtgtgcgccgccagctcgcggatctatattgaagcgccgatctacgaccaactggtcgccggctttgagcaggcggtgaaatccctcagtgtcgggccggggatggatccggcggcgcagatcaacccgctggtttcccgcgcgcaccgcgacaaggtcgccgcctatctggaagacgccagaaacaagcgcgccgagctgatcggcggcgccagctgcccggcgggcgacggcttctatattccgccgacgctggtggtcaacccggacgacagcctcaacctgacgcgcgaagaggtgttcggcccggtggtcaacctgattcgggtggctgacggtgaagaggcgctgcagaaggccaacgataccgattacggcctgaccgccagcctgtggaccaccagcctgcaaaccgcgatggcctatacgccgcgcattcaggccgggacggtgtgggtcaacacccatacgctgattgacgccaatatgccgttcggcggctttaagcagtcaggcagcggccgcgacttcggcccggactggctggatgcctacaccgaaagcaaatctgtctgtatccgctactga

SEQ ID NO: 443846 - DNA, 915 bp, Serratia marcescens
atggcggttaccgtacaggcccggagtgccggttttgacgaatggctgcaaagcatcaacgcggcctgcgggcgttttcgcgccacaacgctggggccggcgttcagcggcgcgatgcaggcataccatacgcatgcgctgcggctgagcatcgttgatgcggcgcagacgcggctgtaccgcacccggagggatgtcgcccagagcaatggcggctacttttttaccgtctttcaactgcgcggcagcgccctgatggagcagggtgaaaggcaggcatgcctgtcggcaggcgatatgacgctgattgacgccgggcggcccagcaatttcctgttccagcatgattcgcagcaaatctcgctgcttttgccgcgtcactatcttgaatctccggcgcgtcgcggcaaggtgcagtgcgccgcgcgtcttgatgccgggaatgcgctggtcagattcagccatcaactggtgtgcggctatatcaacggcccgacgctgggggcggaagagagcgaagccacgctgaacgcgctggccagcctgctgcatccgctgctggtcggcggggaagcgacgggagaggagggcgaacgcgggtttaatcaggcgctacgctttatcgatcgccatattcagtccgagagtttgcggccggagtgggtggcggaggagatcggcatgtcgctgcgtacgctgtaccggctgtttgcccgccacgggctggtggtggcgcaatatattaaacagcgccgcctggaactgtgcgcgcaggcgctgcgccatgcgccggcatggcaaaaattatcccatcttagcgatgactgggggtttcgcgaccacagccatttttccaccgcgtttaaaacgcactttggcatttcgcccagcgaataccgcaagcgctatcagtaa

SEQ ID NO: 443847 - DNA, 216 bp, Serratia marcescens
atgaaaaaaataagcatgaaaaaagctgataaggtcatcggcggttatattcttttctgcagcccggaaacgtttgaatggggcgccgggggaaatagcgatttatgctattcggtggtggaatgccgcaataagtatggcgtaccgcgcaagacgataaacgttgtggccaagaactactgccctgccaaacctgctccaacgcctacaccttaa

SEQ ID NO: 443848 - DNA, 225 bp, Serratia marcescens
atgaaaaagatgaccatgatggaatcttccaacatcatcggcggttattataactgttcagcaaccacctatgagaaatcaacggtaggcggagttgaaagctgcaccgcagtcagaaactgcaccaacaagtttggccagccgacgaaagtgatgttttacgtgccagtaagcaactgcgcctctaccggcggcggcaccaccacgcctccaacgacgccgtaa

SEQ ID NO: 443849 - DNA, 1488 bp, Serratia marcescens
atgagccatctgcctgccgccacggactttcgccagtttatcgactacttgcgcgcgcatcaggaactgctggatatcaacataaccgtcagctctgagctggaagccggcgcgattacccgcaaggtctatgaaaccggcgccccggcgccgctgtttcagacgctggaaaacaacccgcacggcttcaggatcctcggcgccccggccgggctaagccgccgcgacggccagcgctacgcccgtctcgccgcccacttcggcctgccgaaaaacgccacgccgcgcgaaatactggagacgattatcagcgccggcgatcgggcgcccatcacgccggttcaggtcagcagcgcaccctgcaagcagaacgtgctgctgggcgatgacgtcgatctgcaccgctttcccattccgctgctgcaccaggaagacggcggtcgttacttcgccacctacggcttccacgtggtgcagtcacccgacggccgctgggacagctggtccgtggcgcgcgccatgctgcacgatcggcgcacgctggtcggcccggcgatggcgcaacagcatatcggcatgatccatcaaatgtggcgtgaacagggcaagaataccccttgggcgatggtgctgggcgcaccgccggcggcgatggcggtcgccggtatgccgctgcccgcctgggtcagcgaaccgggctacatcggcgcgctgaccggccggccggtggaggtagtcaaatgtgaaaccaacgatctgtacgtgccagcctcggcggaaatcgtggtggaaggcgagatcagcgtcgggcaaaccgcgatggaaggcccgatgggcgagtaccacggttacgcgttcgccgaaggtaaaccgcagccgttgttccacgtcaaggcggtgagctatcgcgatcgcgccattttgccaatctgcgtcgccggtacgccgccggaagaaaaccacacgctgtggggcaccatgatttccgccgaagcgctgaaacactgccgccagcagcaactgccgatcgatatggcctggtgttcctatgaggccgccacctgctggctggtgctgtcggtggatattgaaaaactggcggcgctgaataccgacgccgacggcctggtacagctgattgccgacaaatttttcacctcgcacgtcgcctggctggtgccgaaaatacttctggtcggcaacgatatcgatatcaccgatatcaatcaggtggtctgggcgctggcaacccgcagccatccgaaacgtgatttccatgactttagcgacagccccggcattcccatggtgccatatctggacgccgaggataaacaggccggcagaggcggtaaaatgatcatcaactgtctgttcccggaagcattcgccgggcgacagcgcgccaccaccgccaattttgaacactcctaccctgagacgattaaacagcaggtgaaccgccgctggcgcgattacggcttttaa

SEQ ID NO: 443850 - DNA, 1302 bp, Serratia marcescens
atgcaagagctgttatctatctggaactggctgctggcgacgccgctgacgttttccctgttgtcgatcgcttttctgctcttcgccggcttcgtttcctttgtggtctgtaaactgttcctactgggcattgtcagacgctttatcttacacacccataaatccgatccgctggataaagatatgcgggtcgccagacggctggccaatattgtgccggtggtgacggtttatttcctgtcgcgactggtgcaggggctgccgtcagggctgctggaaaccattcaggcgatctgcggcgtgctgttcattatccactctgcaatgctgattaatgaactgctggatatcagcaacagcgcctatatccgcaagcacggcgaaaaatcccactcgatcaaaggctatgtgcagatcggcaagatcatcgtgtcgtcgatcgccaccattttggtgatcgccacgctgtccaacaaatcgccggtgatcattatctccagtctgggtgcggttgccgcggtgctgatgtttgtgttccagcatacgttgatttcgctggtggccaatatccagctgtcgtcatccaatgtgattcagctgggagactgggtggagatgccgcagggcaatatcagcggcgaggtgacggatatcgcgctgcataccatcaccatccgcaactgggacaacaccgtttcccgggtgccgaccaagaactttattaccgaaacctataccaactggcagccgatgttctcctcgggcggccgacgtatcaagcgcagtttctttatcgatcagtccagcatcacctttgccgacggcgcgctgctggagcgactgaaaacggtatcgccggtgaaattcgccgggctgagcgactatctcagcggaaagatggaaacgctgtccgacgaacagctgatccaccacggcattaccaacctgggcctgttccgcaagtatctgcttgagtatctgaaggcgcgcgacgatatccgcaatgatatgtacctggtggtgcgccagcttagcccgacttccgaggggttgcctattgaggtgtactgctttacctcgaaggtgttctggagcgagtacgaagatacgcagtcggaaattttcgaatacatgtacgccaccgcccgctatttcgcgctgggtatctatcagaagccatcgggtattgatatgaacaatatgatgccgaaaagaacgcgccacggcgcgcattctctccccgccgatgcgccggcgggggagcattcagttggcgctcaggacatcgagcgccgcctttag

SEQ ID NO: 443851 - DNA, 1254 bp, Serratia marcescens
atgatgtattatttaaaaaatactaatttttggatgttcggttttttcttcttcttttacttttttattatgggagcctatttcccattcttccctatctggctacacgaaattaatcatatcagccaacgggataccggcgttatttttgcctgtatttctctgttttccctgctgttccagccagttttcgggctgctctccgataagctcggcctacgtaaacatctgctgtgggtgatcaccggtatgctggtgatgtttgccccgttctttatttacgtcttcgggccgctattacagttcaatatcttactgggctcgatcgtcggcgggatttacctcggctttatttacaacgccggcgcgccggcgattgaggcctatattgaaaaagtcagccgccgcagcagctttgaattcggccgtgcgcgcatgtttggctgcgtgggctgggcgctgtgcgcttcgatcgtcggcattatgtttaccatcaacaacgaatttgtgttctggctgggttccggctgtgccgtgattctggcgctgctgctgttcttttcacgcaccgatacgcactcttctgcggtggtggcggacgccgtgggcgccaatcagagcgcttttagcctgaagctggccctggaactgttcaaacagccgaagctgtggttcctctcgctgtacgtggtgggtgtctcctgcacctacgatgtgtttgaccagcagttcgccaactttttcacctctttcttcgcctccggtgaacagggtacccgggtgttcggctatgtcaccacgctgggcgagttgctgaacgccactatcatgttttttgcaccgctgatcgtcaaccgtatcggcggcaagaatgcgctgctgctggcgggcgccattatgtcggtgcgtattatcggctcctcgtttgccacctcggcgctggaagtggtgatcctgaaaacgttgcatatgtttgaggtgccgttcctgattgtcggctgtttcaaatatatcaccagccagtttgaggtgcgcttttcggccaccatctatctggtgtgcttctgtttcttcaagcagctggcgatgattttcatgtcggtgtttgccggcaatatgtatgaaagcatcggcttccagggcgcgtatctggtactggggctggttacgctgggctttacgctgatgtccgtgttcaccctcagcggagccgggccgttttctctgcgccgtggtgccaaagaggcggtgtaa

SEQ ID NO: 443852 - DNA, 3084 bp, Serratia marcescens
atgaccctgaatacggattcacttgccgccgttctggcgcgtcgtgactgggaaaaccccggcgtgacacagcttaaccgtctggaggcccacccgcctttttgcagttggcgcaatgccgatgaggcgcgacataaccaccacgccgaccgagtgcgcagcctgaacggcgactggaaatttgcctggttttccgcgccggaagcggtgccggaaagctggctgctgaacgatctgaccgatgctgacaccgtgaccgtcccctctaactggcagatggacggttacgatgcgccaatctactccaacattacctatccgtttccggtcgatccgccgcaggtgccggccgacaatcctacaggctgttactcgctcacattcagtttggataagcaggcgatacgcggtgagcagacccgtatcatctttgacggcgtgaactccgcgttccatctgtggtgcaacgggcgctgggtcggctatggccaggacagccgcctgccgtccgaattcgatctcagcgattttctggtcaacggtgaaaaccgtctggcggtcatggtgctgcgctggagcgacggcagctatctggaggatcaggatatgtggcggatgagcggtattttccgcgacgtatccctgctgcataaaccggcggcgcacatcggcgatctgcgcatcacgacccgttttaacgatgattttagccgcgcgtgtctggaggccgaggtcaggatggcgggggaaccgcgtgacgatttacgcgtcaccgttcaactgtggcgggatgactcgttgacggcagaggccagtgcgcctttcggcagcgccgccattgatgagcgcggcgcctacgccgagcgtgctacgctgcggctggaggttgaacgcccggcgctgtggagtgcggaaaccccgcacctgtaccgcgccgtggtggtgctgcagcgcgccgatggcacgctggttgaggcggaagcctgcgatgtcggcttccgtcaggtcagcattgaaaacggtctgctgttgctgaacggcaaaccgctgctgattcgcggcaccaaccgccacgagcatcatccgcagcgcggccaggtgatggacgaagagactatgctgcaggacattctgctgatgaagcagcataactttaacgcggtgcgctgctcccactacccgaatcatccgcgctggtacacgctctgcgaccgctacggcctgtatgtggtggacgaggcgaatatcgagacgcacggcatgacgccgatgagccggctgagtgacgatccgcgctggctgccggccatgagccagcgcgtaacgcgcatggtgcagcgcgatcgcaaccacccgagcattattatctggtcgctgggcaatgagtccggccacggcgccaaccacgatgccctttaccgctggctgaaaacggacgatccgtcgcgtccggtgcagtatgagggcggcggcgcgaataccgcggcgaccgatattatttgcccaatgtatgcgcgcgtcgatcaggatcaaccgttccccgtcgcgccaaaatggtcgatcaagaagtggctgtcgatgccgggagagcagcgcccgctgattctctgtgaatatgcccacgcgatgggcaacagcctcggcggctacgcgaaatactggcaggctttccgccagtatccgcgactgcagggcggttttgtctgggactgggtggatcagtccctgaccaagtatgacaccgacggtacgccgtgggcggcatacggcggcgattttggcgatacgcccaacgatcgccagttctgcatgaacgggctgctgtttgcagaccgcacgccgcatccttcgctgtatgaggccaaacatgcgcagcagctgttccagtttacgctgctgccgggtgatgggcaccggattgaagtcgtcagcgagtatttgttccgccatagcgataacgaagtgttgcactggtcgattgcgcaggacggccggccgctggctacgggagaggtggtgctggatatcgctccgcagggccgtcagctgatcaccttaccggccgtgccgatgccggaagcggcggggcagatgtggctgacggtgcacgtggcgcagccgcaggcgacggcatggtcaccggccgggcatatcagcgcctggcagcagtgggcgctggaggaaaaactcgacgtgcagcctgccgcgtacgccgacgaggctccgcagctgaccagcagcgagacgcattttagtattgcgttgggtgataagcgctgggaattctgccgccagcagggcgtgctgatgcagtactggatcggtgaagaggcgcagctgctgagcccgctgcgcgaccagttcacccgcgcgccgctggataatgacatcggcgtcagcgaggtgacccgcatcgacccgaacgcctgggttgaacgctggaaggccgccggccactaccgggctgaggccgcgctgctgcagtgcgaggccgaagcgctgcctcgtgcggtgctgatcaccaccgcgcatgcctggcagcatcagggagcaacgctgtttatcagccgcaaaacctatcgcatcgacggccgtggcgatctgcagattacggcggaggttgaggtcgccaacggcacgccgccgccggcgcgcatcggcctgagctgccagctgtcgcagctggcgcagcgcgtgaactggctggggctggggccgcacgagaattacccggaccgcctgaccgccgcctgctttgaccgctgggagcagccgctggaggcgatgtacaccccgtacgtcttcccgtgcgaaaacggcctgcgctgcggcacccgcgaactgcaatatggcgcgcaccgctggcgtggcgacttccagttcaacatcagccgttatagccagcagcaactgatggaaaccagccatcgtcacctgctgcagccggaggcgggcgtctggctgaatattgacggtttccatatggggatcggcggcgacgactcctggagtccttccgttgcaccggaatacctgctcagcgccgggcgctatcgctaccagctggtctggggtcaaaaataa

SEQ ID NO: 443853 - DNA, 1077 bp, Serratia marcescens
atgaatgtgaaaccggtcacgctatacgatgttgcagcgcatgcgggcgtctcttatcagaccgtctcccgcgtggttaaccaggccaaccacgtttccgccaaaacccgtgagaaagtcgaggccgcaatggcggcgctcaattatatccccaaccgcgtcgcccagcagctggcgggcaagcagatgccgctgatcggcgtcgtcaccgccaacctggcgctgcatgcgccgtcgcaaatcgttgccgccattaagtcccgtgccgatcaggccggcgccagcgtggttatcggcatggttgaacgcagcggcgtggaggcgtgccgggcggcggtgcataacctgctgacgcagcgggtcaacgggctgattatcaactacccgctggatgaagacgatgcgctcgccgttgccaaggcctgcggcaacgtgccggtggtgttcctcgatgtttccgatagctaccccgttaacagcattattttctcccatgacgacggcgcgcggctgggggtcgaacatctgctgcagcacggtcatcaacgtatagcgctgctggcggggccgcgttcttccatctcggcgcggctgcggctggcgggctggcataagtatctggcgcagcatcagctgcagcccgttgcggaaattgaaggcgactggagtgcgatgtccggttttcaacagacgtcgcagatgctgaacgatggcacattgcccacggcgatgctggtcgccaacgatcagatggcgctgggggcgatgcgcgcgataagcgagttcggcctgcgcgtcgcggctgatatttcgttgattggctatgacgatactgaagacagctcctgctatatcccgccgctgaccactatcaagcaggacttcccgcagctgggtcagagcagcgtcgacaggctgctgcaactctcccgtggcgagtccgtcaccggcaaccaactgctgccggtcacgctggtcaaacgtaaaaccgtcctgccgttcaacgcacaggcctcttcaccgcaggcgttggccgaatcgctgctgcagcttgcgcggcaggtttcacgtctgtaa

SEQ ID NO: 443854 - DNA, 570 bp, Serratia marcescens
atgcatcgcctcaagcgccctggccgtgtcggccgttatctgctgatttttttcacactgctggtgctgtgtccgctggcctatagctggctgatggcgcactttggctacggtgcgccgccggcgcagcgtacggcggcagagcaggttgaccaggtgctgattcgcaaggcgtcgcgtacgctgagcctgctgaaggacaaccgggtggttgccagttaccctattgcactagggggggcggcagacggcggggcgaaaacgcgcgagggcgatcggaaaacgccggaaggcgattacaccatcgattggcgcaactcccgctccaagtattttctcagcctgcatatctcttacccggatgctgacgatatcgcgcaggccaaagcgggcggttattcgcctggcagccatattatgatccacggacagcccaacggctggggatggctggcgccgttgctgcagcgtatggactggaccgatggctgtatcgcagtgaccaacgccgaaatgcaggacgtgtggtcgcgggtgccggccggtacgccggtacgtattgagccgtaa

SEQ ID NO: 443855 - DNA, 339 bp, Serratia marcescens
atgaataaaataattagcgccgccatattggggacggcttttttgttatccggctgttcatcagaaccttcagagagcgatatcaccaaagcgatacaagcatcattcgacgagagtaataaacaacgtgaagaactcgttggtgagattgcaaaaaaagaagaaaacagagtctctcttatttctgccagaaaaatatcctgttccaaatcaggggataagaaatacaactgcgaagtcgaaatggaaacaaaaatgccgctggtaggcacatcaaaatcaataagtccgttacagtttatcaaagacgacggcagatggaggctggtctcaggctaa

SEQ ID NO: 443856 - DNA, 300 bp, Serratia marcescens
atgcaaacagtaaaactgcacaacaatattgatatgcctctgccgggctttggcgtgtacccgatcacaaatgccgccgaatgcgggcgcgccgttactgacgccatcgaaagcctgaacgatacgacggcaacctatcagcatgcgcgcatggaagaaaatatcaacgtcctcgatgttgcgctcaaccccgaagagatgctgcagattaccgctcttgataccgcaaccagcgcgttcttctcacgccatgacccggccagagtggaatggctgaccaatcgtaaactcgacgtttaa

SEQ ID NO: 443857 - DNA, 990 bp, Serratia marcescens
atgcaaaaacgttatcttggtaaatccggcctggaagtgtcggcattaggactgggttgcatggggctgagctacggctatggcccggcgactgatacccgccaggccgtcgcactgattcgcgccgccgttgagcgcggcgtgactttcttcgataccgctgaagtctatggcccgtacctgaatgaagaggtggtgggcgaagccctgaagccgctgcgcgatcgggtggttatcgccactaaatttggctttacctttggtgatgataacaagcagcagattttaaacagccgcccggaacacatccgtgaagcggtggaaggttcactgcgccgcctcaacactgaggtgattgatctgctgtaccagcaccgcgtcgatcccgatgtcccgatcgaagacgtggcgggcacggtgaaagatctgattgccgaaggcaaggtcaaacactttggcctttccgaagccggagcgcaaaccattcgccgtgcgcatgccgtccagccggtcaccgccctgcagagcgaatactcaatgtggtggcgtgaacccgagcaggaaatcctgccgctgctggaagaattgggaattggctttgtgccgttcagtccgttaggcaagggcttcctgaccggcgccatcaccgccgggacgacgttcggcgcggacgatttccgcagcaaagtaccgcgctttacggcagaagcgattgaagccaatgaaaaactgctcacgctgctgggcgaacttgccgcagaaaaaggtgcgaccccggcgcagattgcgctggcgtggctactggcgcaaaaaccgtggattgcacccatccccggcaccacaaaactgcaccggctggaggagaacctgggggctgccgccatcaccctgtctcaggacgatttgcgcaaaatgtcccaggcgctggaaacggtgaaaatcgtcggcgagcgctaccccgccgcgctgcaggctcgggtcggccggtaa

SEQ ID NO: 443858 - DNA, 894 bp, Serratia marcescens
atgctgaaagagaacttcaacgaactgcagagctttcttgtggttgccagggagagaagttttaccaaggcggccgctaagcttggggtttcgcagtccgcgctcagccatgcgatgaaggcgctggaagcgcggttgaatatacgcctgctgacccggaccacccgcagcgttgcgccaacggaagccggcgaaagaatcattgcctgtctggaaccacgcattaccgatctggagcaggagctggaggcgctgattcagctcaacggcaccgcctccgggaatatccgcctgtcggcgggggagcatgccgcacgcagcctggtgtggccaaagctgaaaccgttccttcgggaatatccgcaaatcaatgtcgaactggtggtggataatggctttgtcgatgttgtcgccgggcgttacgatgccggcgtgcggcttggtgaaagcgtcgataaggacatggttgcggtgaaaatagggccggatatgcgtctggcggtcgtcggcgcgccggagtattttgcggccaagcgcattccgcagacgccgcatgagcttcagcatcatcgatgcatcaatatgcgcctgcccaccgccggcggtctgtatcactgggagtttgaaaaggacgggaagccgctgcgcgtcagggttgaagggcagctgacgttgaatctgctgtcggaaaggatggatgcggtgctgtcgggattcggccttgcctgtgtgcccgaagatatggtgcaggagcaggttgcatccggggaactcgtccaggttctgcaggaatggtgcccctcatttccggggtattatctgtattatcccagccgtaagcagcatccgcccgcctttgcgttgatgatagatgcgctgcgctattcggagtaa

SEQ ID NO: 443859 - DNA, 339 bp, Serratia marcescens
atgataaaaacagaagacatcatcgaagaaataaccctgtggattgactcaaacattcataaacccctgcgaattgaggatgtggcatcccgggccgggtattccaaatggcacctgcagcgtattttttctcaggtgcaaaaaatcagtattggaaaatatataagggagaaaaggttagcactggcagaaaaggaactagttgaaaccaacgccccgattatcgacattgtttgtaaatacggttttgattcacagcagacgtttaccagagtattttcaaggaattataagctgccgccgtcaaagtaccgggatatgaagagaatgcaggactga

SEQ ID NO: 443860 - DNA, 456 bp, Serratia marcescens
atgaataaaaagctgctctatataccggcaatgattacttgtctccttgttgggtctttcgtttggctctcgctgtgtacggttgaaattgtcgcagtttatgagaatgataattttagcgatgttttggtcaaggagtttcctctcacggaccgtggaaaaatagactggtggctgaataataaagatatgctaaaggagcgctatagtattcccaaaccggcaagctatggtagttttaccataactttttgggattttggcagcggctataaagaggaagggaagtatgacaggctgtgttttgatgccaggaaagccaaggataattgtattgataagaacgctgtgttttccgtaagacagataaaaaatgatcgtacgttattgattacatatgacggccgctatttactgcaagataacggagatgtggtcaacgttgagcgtgagtaa

SEQ ID NO: 443861 - DNA, 471 bp, Serratia marcescens
atgaaagtaaggagtgacattttacgctatgcatcattatttctagtcggttgtatacttgtcggatatatactctatttatcgttacggactgtagggattgctgctgtctatactaatgataacttcagcgacgtcttggtaaccaattttccgctcaccgataaaggtaaaataaactggtgtttggagaataaggataagttaagtaagaactatggtatacctaacccatcccttgattctggacgtttctccattactttttggtattttggtgacggctataaaaagaaagaaaaatacgacaggatttgttttcctgagatgaagacagatgtgaactgcattgaaaaagatgccgtacttattgttagcaataaccgtgctgggagcgtatttttcaccgtggataatgggcgctatatggtgaaaggtaatggcgatattgtgaaaatgaaagggtggtaa

SEQ ID NO: 443862 - DNA, 546 bp, Serratia marcescens
atggagcagaatacggaaataaaggaagggacgttacgtcgattgacgttgggtgaaatagcgatggctcgtcaggtttttggaaacagaattgtttatagccgcgtttgggtacactgtgatagctactttccctttggtttgcagagtcctgattatgctatggcacctaatggtgaactttggttcagggaagaaggatattcctctgatttttcagcaagctctgtctctgatgagagaaagcatgtctttatccatgagttaggccacgtttggcaacaccagcatggacaatgggtaagggtgagaggcctattcagttgggccgccaattattactataagctcgataaaggtaaactgaccgattactctcttgaacagcagtcatccatcattgctgattactggttgatgattgtatatggaatagacaggtggaagtattttcaggtacaaggaaggcaaggtagataccgcggtaatgatgatatccgggctatcccaaagatctatcgaaaaattgtcacaggaaggaagtaa

SEQ ID NO: 443863 - DNA, 339 bp, Serratia marcescens
atgaataaacttttactgatcgccgggctgatgttcaccatctccgccggagcagcagctcccggctgtacatcatggccgatgaacatggccgaagtctggatgaaaaatgaaaaaattgttgatatcgcagatattgacgaggcaaaaacagaatccaaactgctggctatcgagaaacatgacaaaggagaatacacacagatttatcactttgtatttcatgataaaaatgggaataagtacgaagtaatcacgcaaaatgacgcatcggacgaggagtgctcattaagcgacgttaatgtgttcttgatatctaaaagcacagacaaccactga

SEQ ID NO: 443864 - DNA, 573 bp, Serratia marcescens
atgtccgcaaaaatcgacaatgtgaaaaaagagctgctatctgacaattggtatgtgctcaataaatattcctttgatctgaaacgtaaaaacggcggaagcgtgcagcaggtgcgggaggtgtatgaccgtggtaacggcgccaccatcttgctgtataaccgcgccaagggcagcgtggtgctgaccaatcagtttcgtatgccgacctacgtcaacggtaatgaaagcggcatgctgttggaggcctgtgccgggctgctggatggtgatgcgccggagctgtgcgcccgccgcgaagcggaagaagaaaccggttttcaggtggataaggtgcaaaaggtgtttgaggcctacatgtcgccgggtggcgtcaccgagcttatccacttctttattgccgagtatcaggatgaacagcgccgcgcggccgggggcggcattgaggatgaggatattgaggtggtcgagttgccgtttagcgaagccatcgccatgatcgccgacggccgcatcaaggacggcaagaccattatgctgctgcagtatctgcagttgcataatctgatgtaa

SEQ ID NO: 443865 - DNA, 609 bp, Serratia marcescens
atggctgaacataatactgataaaaaaccggggccgatccgccgtttgtggcaatggtggcgcaggccaagccggctggcgctgggcaccttgctgctgctggggtttgtcgccgggatcctgttctggggcggtttcaacaccgggatggaggtggcgaacaccgagcagttctgtatcagctgccatgaaatgcgtgaaaacgtgtacgaagagtatatggagaccgtgcactacaacaaccgcagcggggtgcgcgccacctgcccggattgccatgtgccgcatgagtgggggccgaaaatgctgcgtaagctgaaggccagcaaggaactgtatgccaagattttcggtctgatcgacacgccgcagaagtttgaaagccaccgtctgacgatggcgagtaacgaatgggcgcgtatgaaagcgaataattcgcaggagtgccgtaactgccataacttcgagtatatggatttcaccgcgcaaaaaaccgtggcggctaaaatgcatgacaaggcgattagcgaagggaaaacctgtatcgactgccataaaggcatcgcccataaactgccggatatgcgcgaggtgccaaacggtttttaa

SEQ ID NO: 443866 - DNA, 450 bp, Serratia marcescens
atgaaaagcaccgtactgaaaaagcgcggggccctgtgggcggcgctgatgtctctggccgtggcaggtttcgcctttgccgccaccgatgtcgacctcagtcagtcgccggaggtatccggcactgccgaagggcagatcaaaatgcctaagcagcaagagcgcatggcgcttaactacgtcaatcagccgccgatgattccgcacagcattgatggctatcaggtgagtaaaaacaccaaccgctgtctgcagtgccatggcgttgagcactaccgcaccaccggtgcgccgcgtatcagcccgacgcactttatcgacagcgacggcagggtgcgcggcgacgtcgcgccgcgtcgttatttctgtctgcaatgccacgtaccgcaaaccgacgcggcgccgattgtcggcaataattttgagccgttgccaggctttggcaaataa

SEQ ID NO: 443867 - DNA, 909 bp, Serratia marcescens
atggcaaatccggttgctcaggccggccgtgatgcgcgtctgcgtcacggctggtggcgcagtcaccgctttttgatcctgcggcgctgcagccagctgttgattttgctgatgtttctgtccggcccgctgtggggcgtgtggatcctgcgcggcaactacagcgccagcctgctgcttgacactgtgccgctcaccgatccgctgatgctgctggaaagcctgctggccgggcagtggccggcctggctggcctgggtcggcgcggcggtggtgttgacgtacgggctgatcggcaaccgggtgttctgcggctgggtctgtccgctgaatccgctgaccgatctggcagcctggctgcggcgacgactggggctgcgccagtccgccacgctgtcacgccggctgcgttacggcatcttgctgatggtgctggcgggcagcgcgttcagcggcagcctgctgtgggagtgggtcaacccggtggcgctcaccggacgcggcctgatccacggcgccgccggcgatgccgccggttggctgcgtgggttggcggcggcgtttggcgccggcgtctggctgctgctggcgctgtttctgttcgacctgctggtggtggagcacggctggtgcggccacctgtgtccggtcggcgccatgtacggcgtgattggcagccagggcgtgatgcagatcagcgcgcagcggcgggagcaatgcacccgctgtatggactgtttccacgtctgtcctgaggcgcagatactgcgcgaaccgctgttgtcaccagacgccccgccgcaggtggccagcgatgcctgcattgcttgcgggcgctgcatcgatgtctgtgcggaaaacgtattcacaataacaagcaaatttcattcttcgggagccaaaaaatga

SEQ ID NO: 443868 - DNA, 753 bp, Serratia marcescens
atgagccggcaacgagacaaggccccggcgcgtcgccgcttcctgcgggatgcggcgcgcagtgccgccgggctggcagggatcgcggcgctgctgggattgcagcagcgtcagtcgcaggcgcgcgacggtctggcgttgcgcccgccgggggcgctggcggaaggggattttgtcaacgcctgcatccgctgcggccagtgcgtgcaggcctgcccgtatcagacgctgaagctggcgaccttgctgtcgccgctggcggcgggcacgccgtattttgtcgcacgcgatgtgccctgtgagatgtgcgaggacattccctgcgtagcggcctgcccgagcggcgcactcgacccacaactgaacgatattgaccaggcgcggatggggctggcggtgctgctggatcatgaaaactgcctcaactggcaggggctgcgctgcgatgtctgctaccgcgtctgcccgcagattgacgccgccatcacgctggagctgcagcgcaacccgcgtaccggcaagcacgcgctgtttttacccacggtacacagtgatgcctgtaccggctgcggcaagtgcgaacaggcctgcgtactggaggaagcggcgataaaagtgctgccgctgtcgctggcgcgcggccagctgggcggtcattaccgctggggctggcaggagaaacagcgcgccggtcaggcgctggtgccggaaggcggacagttgccggcgcacggcgtcggggaggggaaataa

SEQ ID NO: 443869 - DNA, 2487 bp, Serratia marcescens
atgaaactcagtcgtcgagacttcatgaaagccaatgccgcagcggcagccgccgcggcggccgggttgaccattccgacggtggcgcaggcggtggttggcggtacggaagagattaaatgggacaaggcgccctgccgcttctgcggtacgggctgcggggtgctggtcggcacgcagaacggccgcatcgtcgcctcgcagggcgacccggatgcgccggtcaaccgcggtctgaactgcatcaaaggctacttcctgcccaaaatcatgtacggcaaagatcgtctgacgcagccgctgctgcgtatgaagaacgggcagtacgataaacagggcgagtttacgccggtcagttgggaccgcgcctttgatgttatggcggagaagttcaaagacgcgctgcgggaaaaagggccggatgcggtggggatgttcggctccggccagtggaccatctgggaaggctacgccgccgccaaactgttcaaggcggggctgcgcaccaacaacctcgatccgaacgcgcgtcactgcatggcttccgccgtggtgggctttatgcgcaccttcggcatggatgagccgatgggctgctacgacgatatcgaacaggccgacgccttcgtgctgtggggctccaatatggcggagatgcacccgattctgtggtcgcgcattaccaaccgccgcctgagcagcgagcaggtcaacgtctcggtgctctccaccttcgaacaccgcagcttcgaactggcggataacgccatggtgttcacgccgcagaccgatctggcgatcatgaactacatcgccaactacattattcaacatgacgccgtcgaccgtgacttcctggcgcgtcacgtcaatatccgccagggggcgaccgatatcggctacggcctgcgtccgacgcatccgctggaaaaggccgccaaaaacccgggcagtgacgcgtcggagccgatgagctttgaggcgtttaaggcattcgttgccgactatacgctggagaaaaccgccgagctgagcggcgtgccgcaggatcagctggaagcgctggcgaagctgtatgccgacccgaacgttaaggtggtctcctactggacgatgggctttaaccagcatacgcgcggcgtatgggccaataacctgtgttacaacctgcacctgctgaccggcaagatctccaagcccggttgcgggccattctccctgaccggccagccttccgcctgcggcaccgcccgcgaggtcggcacttttgcccaccgtctgccggccgatatggtggtgaccaacgacgcgcaccgcaagattgccgaggaaaaatggcggctgccggccggcaccattccggccaaagtggggctgcacgcggtggcgcaggaccgggcgctgaaagacggcacgctcaatgcctattgggtgatgtgcaacaacaacatgcaggccgggccgaacatcaatgaagagcggatgccgggctggcgcgatgcgcgcaactttgtggtggtgtccgatccatatccgacggtcagcgcgctggcggcagacctgatcttgccgaccgcgatgtgggtcgagaaagagggcgcctacggcaacgccgagcggcgcacgcagttctggcgccagcaggtacgcgcgccgggcgaggccaagtccgacctgtggcagctggtggagttctccagacgtttcaaggtggaggaagtctggccggagacgctgctggcgcaaagcccgcagctgcacgggaaaacgctgttcgatgtgctgtacgccaacggcagcgtcgatcggttcaaactggatgagatcccggacgatcaactgaacgacgaggcgcgcgcctgcggtttttatattcagaaagggctgtttgaagagtacgccagcttcggccgcggccacggccacgatctggcggcgttcgatatgtatcaccaggcgcgcggtctgcgctggccggtggttgacggtaaggaaaccctgtggcgttaccgtgaaggcacggacccttacgtgaaagcgggcgagtcggtgcgtttctacggcaaaccggacggtaaggcggtgatcttcgcgctgccgtacgagccggcggcggaaagcccggatgaagaatacgatctgtggctgtcgaccggccgcgtgctggagcactggcataccggttcaatgacccgccgcgtgccggagctgcaccgcgccttcccggaggcggtgctgtttattcacccgctggatgccaagcgtcgcaatctgcggcgcggcgacaaggttaaagtgctgtcgcgccgtggtgaagtggtgagcatggtggaaacccgcgggcgcaaccgcccgccgcaagggctggtgtatatgccgttcttcgatgcggcgcagctggtgaacaacctgacgctggacgccaccgatccgttatccaaagaaaccgacttcaagaagtgcgcggtcaagctggagaaggtgtaa

SEQ ID NO: 443870 - DNA, 264 bp, Serratia marcescens
atgaataacgaatggcacgtcagcggtctgctggtgcaggcctgcccggaggcttttcagcagttggttcccgcgctgctggcgatcccggacaccgaaataccggcgcaggattgcgcacagggcaagctggcggtggtgatgcaggcggcgcactcgcatgcgctgctggaaaaaattgagtcggcgcgcaatctggaaggcgtgctggcggtgtcgctggtttatcaccagcaggatgagcaaggtgaggtaatgccatga

SEQ ID NO: 443871 - DNA, 495 bp, Serratia marcescens
atggccgaattgtcgcggcgcaaactgctcagcggacaatggcgtcgaccttccaacgtacagcgtccgccctgggcgcgtgaggaagccctgtttatctccggctgcagccgctgccgcgcctgtatcgacgcctgtgaaaccggcgtgctgatcgccggtggcggcggttacccggaaatcgatttttcccgtgcggagtgcagcttttgtcgccgctgcgtcagcgcctgtgacgcgggcgtatttgacgcggaggcggacaggccatggcggctgcagccgagtgtctcgacgtgctgcctggcgctgcagggcgtggagtgccgtagctgtcaggacggctgcgataccggggctatccgctttcggccacgcctgggcggtattgcgcagcccgtgctgacggcggcggcctgcagcggctgcggcgcctgtgttgcgccttgtccgaccgacgccatcgcgctaacccggagtgaaaacaatgaataa

SEQ ID NO: 443872 - DNA, 1683 bp, Serratia marcescens
ttgcttgttaaacgctccgtcacccgcagcctggccaaggccctgatcgccatcgtcgccctgtcggtgctgtccaccggcctagcgctgaccaccgtcgccgacagcctgcgcgacgccgaagcggtgaatatcgccggttcgctgcgtatgcagagctaccgtctggcgtatgacctgacgcaaaacaacgcggcgctgccgcagcacctgcgccactaccgccaatcgctgcaggcgccggcgctgcaaaagctcagtcgtttctacgtgccggccgacgtgcgcgacaaataccgggcgctgcagcaggcctggcagccgctggaacagcatatccgcgccggccgcgtgcaggcgtatcaggccagcgtggtcagttacgtcaaccagatcgaccattttgtgctggcgctgcagcgctattcggagatcaaactggcaatcgtcgccgccttcagcgtgctcggctatgtcgtgattatcgcgctggtgctgttctgtatccgcctgatgcgcaagcaggtggtggcgccgctcaggcagttggtggacgccagccaacagatccagcgccgcgacttcaaccacacgccgctggacgttacgctgccgaacgaactgggcgtgctgtcgcaggccttcaccgccatgtccggcgaactttcgcgcctgtatcactcgctggagcacaaggtgcaggagaaaaccgagcgcctgcaacaggccaataaaacgctggaggtcatgtatagctgttcgcaggcgctgagcagcgggcaaatcgatcgccacgcctttgaaaaggtgctgcatatcgtgcgccagagcgaacagctgcagtgcctgcagcttggcgtgcaggacggacagcatcgctggcagctgtgcagcggcagcccgcaggaaggcgccgagtggcagcggctgaccatcatgcaggaacagcattcgctgggtcagctctgctggcaggcccggcagcaggcggccaacccgcacctgatgcaaagcgtggcgaacatgctgggccgcggcctctacttcaaccgtacgcaaaagcagcatatgcagtttttgctgatggaggagcgcgccaccatcgcccgcgagctgcacgactcgctggcgcaggcgctggcatttttgcgcattcagatgacgctgctgaaacgcacgctggccgacagcccgccgcagacgcagacgattatcgacgacttcgatcgggcgctggccgacgccaaccgtcagctgcgcgaactgctggccacgttccgtctgagcattcaggacgccgacctgaacaccgcgctgcagcagctgctggcgccattaaaagttctaacccaggcgcggattcagttacactgtgagctgccttcgcaggcgttaaatgcgcagcagcaggtgcacgcgctgcagatcgtgcgcgaagcggtgctcaacgcgatcaaacacgccaacgcgcaggatatcgtcattcgctgcggcaaaaccgcaggcggcgataaccaaatcaccattaccgacaacggctgcggcattgccagcctgaatgagccggaaggccattacgggctgaatataatgaatgaacgcgccgcccgccttggcggaacattacgcattgcccgtggtcaacagagcggtacggaagtcagcttgtcttttccggcataa

SEQ ID NO: 443873 - DNA, 633 bp, Serratia marcescens
atggtgatgcaaaattataaggtaatgatcgtcgatgaccatccgctgatgcggcgcggcatcaaacagctgctggggctggatccgcagttcagcactatcgccgaagccagtaatggcaacgaggccattgcgctggcggcacagaaacagccggatatcattctgctggacttaaacatgaaggggctttccgggctggatacgctgaaggcgctgcgtgacgacggcgtcgatgcgcgcatcgtggtgctgaccgtctcggacgcgcgcagcgacgtgtacgccctgatcgacgccggcgcggacggctatctgctcaaagacagcgagccggaacagctgctggaagatatccgcgcggcggcggaaggcaataatgtgatcagcgaagcgatcgccggctacctcgcctcccgcagcgagcagcacgatcctttcgccgaactgaccgagcgcgagctggacgtactgcaggaagtggcgcgcggcatgtcaaacaaagaggtcgccgcgcagctgcatatttccgaagaaacggtgaaggtgcatatccgcaatatgctgcgcaagctggatgtccgctcgcgcgtcgccgccacggtgatgtatctggaacacaaaagccagtaa

SEQ ID NO: 443874 - DNA, 279 bp, Serratia marcescens
atggaattaaacccggtattcgcccgccgcttgtatttatgctggctgattagccacagcgaacgtcccaatgttcccaaactgatggaactgaccggctggccgcgccgcacgctgcaggatgtgctgaaagccttgcccgggctgggcgtggagctgcagtttgtgcagcagggcgtacgcaataacgatggttattatcagctggaaagctgggggccgttgaataaaagctgggtccatcagcaccatcagaccctgcttgacgctatcgcctga

SEQ ID NO: 443875 - DNA, 432 bp, Serratia marcescens
atggaaatcgtcaccgatcaactacgctatcgcgttgactggacgcgtctggcggccctgctggaagccgccgggctgggcaaacgcgacccgcagctgaccgagcagatctaccacaacaacgcgttttgctactggggctacctggacggcgagctgatcgccaccgcccacgccatcagcgaccgcatttcggtggcctatctggccgacgtggcgattcacccggattttcagggccgcggctacggccggcagctgatggatcgcatcatggaagacctggcgccgctcggtaaaatatttatctacgccgttcccgataagctggctttctataaaaaatacggcttccacgatctgaccaccggcatggtgtttgccgaaggcgcggcgctcagccggctgcaggataatggctatgtgcgctaa

SEQ ID NO: 443876 - DNA, 675 bp, Serratia marcescens
atgatcaccccggaaatgctaaccggacgttcaaccgaacatctggtgccgctggtcggcaaccatcgcctgcagccgcaggcggcgcaggcctttctcgccatgcagcaggccgccgcgcaggcaggttttgacctgcagcccgccagcaccttccgcgatttcgaccggcagttggcgatctggaatggcaaattctgcggcgagcggccagtattagacaaagagagccgcccgatggacgtcgggccgctgtcggcggaagagcgctgcaccgcgattctgcgctggtcggcgctgccgggcgccagccgccaccactggggcagcgatttggatatctacgatcccacgctgctgccggcaggccagaaactgcaactggagccgtgggagtatgaggaaggcggctacttcgcgccgctcaaccggtggctgacggcgcatatggccgagttcggcttttatcgcccgtttaccgaagacggcgacggcgtggcggttgaaccctggcacctgagctaccgcccgctggcgcagcaggcggaacatctgctgacgccggcgctgctgctggcggcctggcaggataaggacgtggccggtagcgaatggctggcacagcatttgccggcgattttttcgcgttttatacgcgctgaaggaaaggtgtaa

SEQ ID NO: 443877 - DNA, 2004 bp, Serratia marcescens
atgcaacagcgtatgcagcggcagggcatccgccggctgttggtattaagcggcgatgccgactggtgtcgccagcaggcacaacggctgatggccaccatgcccggcgactggccgtggtgcggcggggaggcgccgcacggcacacaggcgctgaaccacggcgaagtgcgtactatgctggggcaggagcggctgcatgcggtatttgacgccggcgacgggctggacgtcgaggcgctggcccaactggccggcgtactgcgcgccggcagttggctgctgttgctgacgccgccgtggcaaagctggccgcagcgcgcggatgccgacagcctgcgctggagcgacagcccgcagcccatcgccacgccgaattttatcacgcacttacagcagcgactgacggcggacgccgaagtgagcatctggcggcagggccagccgttgcaactggcgccgctgccggcaaggccggactggcaggcgccgaacggcgaacccaccgctgaacagcaggctttgctgacgcggctgctggcgagcgagcgcggcatctgggtgctgaccgcgccgcgtggccggggtaaatcgacgctggcgggcatgctggtgcagcgttcggcgcagagctgttggatcaccggccccagccgtgcggccaccgaggtcgccagccagtgggcgcagggaaacgcgcagttctgggcgccggacgcgctgctggcgcactgtcggcagccgggaagctcagttgccgactggctgctggttgacgaggcggcggcgatccccgcgccgctgttgcaacagctgattgcctatttccctcgggttctgctgaccaccacggtgcagggctatgaaggcaccggccgaggttttctgctgaaattttgcgcctcgctgccgcagtggcagggtctgagtctgcaacagccgatgcgctgggcggccggtgacgcgctggagcggattattgatgacgcactgctgtttaacgaactgccgccctggcagacggccggccagacgatcggctatcgcccgctgacgcagccgcagctgtgtggcgatgacgcgctgctgcagcgcttttacgccttgctcaccagcgcccattaccgcacctcgccgcttgatctgcggcggctgatggatgcgccgggtatgcagtttgccgccgccgtgcaggcggacggcgaagtggcgggcgcgctgtggctgacggaagagggcgggttgcccgcggcgctggctcacgaggtgtgggccggacggcggcgtccgcgcggcagtctggtggcgcagtcgctggcggcgcacggcggccagtggtgggcgccgaccctgcggtcgcgccgtattacccgcgtggcggtgctgccggcgctgcgccggcagggcattgcccgccggctgattgagcagcagcgccggcaggcgcaggggctggattacctgtccgtcagctttggctacaccgagccgctgtggcgcttctggcagagctgcggctttgagttggcgcgcatcggcagccggccggaggccagcagcggctgctacagcgtgatggcgctgttgccgctcagcgagcagggcgaaatgctgtgccaggcggcgcgtaagcacctggcgcgcgactggcgctggctgcagcagcgcattgcgctgacgctggcgatccccggcgacgatggcgatccgcagctcaatgaagacgactggcgcgagctggcgggctttgcctttgcccaccgaccgctggaggccagcctcggcgcgctgcagcgtctgctgctgcacagcacgttgccgttgccggcgctgcgcgcgcacttacagcagcagctgtccgtggagcagtgcgtgacgcagtgccgtgtgaacggccagaaggcgttgctgcgccagtggcggcaggaagcggctcaggcgttggcgcagatggatgaacagcactgtcgccgctggcgtgagtggagcgccgcccggccataa

SEQ ID NO: 443878 - DNA, 1470 bp, Serratia marcescens
atgaccacccggttgaccaaacaagcgatcgccctgctgctgctcggcacgctcaacgcgagcgccatagcccccgccatggcggccaatcaggaccagttgccggatatgggcaccaccgccggcggcacgctgagcatcggtcaggaaatggcgatgggcgacttttacgtccgtcagctgcgcgccagcgcgccgctggtcaatgacccgctgttaagcacctacatcaaccagttgggcaaccggctggtggccaacgcctattcggtgcgtacgccgttccatttcttcctggtgcgcaacgacgaaatcaacgccttcgccttcttcggcggcaacgtggtgctgcacacggcgctattccgtgaaaccgacaatgagagccagctcgcctcggtgctggcgcacgaaatttcgcacgtcacgcagcgccacctggcgcgcgcgatggaagaccaacagcgcaacgccccgctgacctgggtcggcgcgctgggctccattttgctggcgatggccaacccgaccatgggcatggcggcgctgagcggcaccatggccggcacccagcaggggatgatcagctttacccaatccaacgagcaggaagccgaccgcatcggcattcaggtgctgcagcgcgccggtttcgatccggaagcgatgcctaacttcctgcagaaactggccgatcagtcgcgctatgcctctaaaccgccggaaatgctgctgacgcacccgctgccggacagccgcctttccgacgcccgcaaccgcgccaaccagatggcgcggcgcattacccagtccactcaggactactatatggccaaggtgcgcgcactcggcatgtacagttccaccggctacggcctgacggaggacgtgctcggcgcctacgaaaaaggcaatgtccgccagcagaccgccgccaagtacggccgcgccatcctgttctacgaagcgaaaaagtacgatgccgcacgccggctgatccagccgctgctggacaaagagcgcgacaacgtgtggttcctggatctgatgaccgatatcgatctggggcaaaagcgcgccgcccaggcgattacccgtctgcaggccgccaacgcggcgcagagcaacaatccggtgctgcagcttaacctggctaacgcctatgtcgaaggcaaccagccggcgcaggcgtcgaaaattctcaaccgctataccttcgcccaccccgacgatcccaacggctgggatctgctggcgcaggccagcgcggcgcaggggctgcgagatgaagagctgtccgcccgcgccgaaagtctggcgctgggcgggcgtctcgatcaggctatcggcctgctgagcaacgccagcgccctgcaaaaactcggcagcctgaaacaggcgcgctatgatgcgcgcatcgatcaactccgtcagctgcagcaacgtttccgtcaataccagcgcagctga

SEQ ID NO: 443879 - DNA, 354 bp, Serratia marcescens
atgaaaaacgtcaccatttaccacaacccgcgctgctccaaaagccgtgaaacgctggccctgctggagcagcacggcgtccagcccgacgtggtgctgtatctggagaccccgccctcggtcacgcagttaaccacgctgctgcaacagctggggttcagctccgcccgcgagctgatgcgtaagaaggaagatctctacaaatcgcttaatctggcggatgacagcctgagcgaacagcaactgctgcaggcaatggtggaaaacccgaaactgatcgaacgtccgatcgtggttaaaggcaagcaggcgcgcatcggccggccgccggagcaggtgctggacattctgtaa

SEQ ID NO: 443880 - DNA, 519 bp, Serratia marcescens
atgaaatcatggaataaaattttactggcttcactgatcggtttggcgctggcgggctgtgatgacgcctccaaggttgacaacaacctggataaagccaaggacagcgcagaacagatgaaagacgccgcggacaaaaaggccgagcagttgaccgacagcgccaaagccaaggcacaagagctcaaacaggccgcagcagagcaggccgatcagctgaaagatcaggcctcctcgctgaaaaacgacgccggcaaacaggccgaagccatcactaacgatgcccaggccaaggcggaagccattaaacagcaagcagaccagcagagtcagcacctggttgaacaggcgaaaacgatcaaaaatgacgccatcagcggcgcgaaccagctcaccgaagaggcgaaggcgaaaacctcggaaattcagcagagcatcgataataaacagcaagaggcgcaaaaacaggccgaagctgccgacgcaccggcggaacagccacagcccgcaaatcagtaa

SEQ ID NO: 443881 - DNA, 573 bp, Serratia marcescens
atgcagctatttaataaatccaagaaaaatcccacagagaagtccggtaaaaaaacggacgacgccaagcccctgcacaatgatatgaaagagccggtcaagacggcccccgcgccgccgccattagcggaactactggaaagcagcaaaccggttaaggccatcaaggacacctttgtctcacagggcacccagctgaccggcaccattgaaggccagggcaacattattgtcgaaggcgtgattgaaggcagcctgacctgctcccaccaggtgcgcatcgaaccgaccggccatgtgaaaggtgaaatccacgcccagcatattatgatcaacggctccgtcgaaggcagctgtcacgccgacagcctgaccatccagccgaaaggccatatgcgcggcgatatttttaccgacgagttttctattgagaaaggcggcgtgtttgtcgggcagtcccagctgatgccgcaaacggccgccggcgccggcaaggtcacggcgctgaaaacggcgcgccccgcccctgccgatgcggccccgcagctgcaggaaccgcagcaggtcaaatag

SEQ ID NO: 443882 - DNA, 1650 bp, Serratia marcescens
atgagatcctggctaaagtcgggttccccttgggtatggctgaccgccggatcggtcagcgtcagcctgttggcgctgctcggcattttgctgctgctggcggggcagggcatgcgctatttttggcccagcccggtgtatcagtttgagctgaatcaggcggcggccgggccggtaacgctgatcggcgaactgtatcagcagcagacgatttcgcgccggcagttacaggaagcgggcgtgacgccaccgggtgaggcggagcaggtcacccgctatctgatcaaggtcggtaaccgcgaaagtgaggggcaggatttccgtacgctgctggccagcgatattcgccgtcagagcacgccgcgcgacctgatggtgctggagcgcaacagcaacggcaccgcctatggttttctggccggcctgctggaggacggccagccgctgaccggccgcgatcttagccaggcgctgcagcagcgcctgccgcaaattgcggcgctgtcgcgccaggcgcatgatattcagattcatgagatggcgcggattaatgagcagtttgccgcgctcaacctgcgtgagaaaaagctccggcgtgacgacaggtttgatgcccgcgcccaggcgcagatgaaagccgagcggctggaactgcagcgtcagtatcgtcaattggcggatcggctggacgggctgaaccgggatcgccagcgcgacgcgctgctgctgcgggatatgcgcggccaggtgcataccattcccctgagccagatacgcgatgcctggtaccccaatgcgatgacattcggccagaaaatggcgcactggggcgagcaggtgaagaagtttctgagcgacagtccgcgcgaggccaataccgaaggcggcgtcttcccggcgattttcggcaccgtgctgatggtggtgctgatgtcgatcgtggtgatgccgttcggggtgattgccgccgtttatctgcatgagtatgccggcaagaacctgctgacgcggctgattcgcatcgcggtggtcaatctggccggggtgccttctatcgtctacggcgtatttggcctgggcttttttgtctatctgatcggcggcagcatcgatcggttgttttatgccgagtccctgcccaacccgaccttcggcacgcccggcgtgctgtgggccgcgctgacgctggcgctgctgacgctgccggtggtgatcgtgtcgaccgaagaggggctgtcgcggatacctgtttcgctgcgtcaggggtcgctggcgctgggcgccagccgggcggagaccttatggcgcattgtgttgccgatggcggcgccggccatgatgaccggcctgattttggcgattgcacgggcggcgggtgagaccgcgccgctgatgctggtcggcgtggtgaagtcggcgccggtgttgccggtggacgatatttttccgtatttacatctggaacgtaagtttatgcacctgagcttccagatttacgatatggcgttccaaagtcccagcgtcgaagcggccaggccgctggtgttcaccaccgctttcctgctggtggcgatcgtcgtcgggctgaatctggcagcgatgggcatccgtcattcgctcagggagcgttaccgggtatgggagcagtaa

SEQ ID NO: 443883 - DNA, 2106 bp, Serratia marcescens
atggtgaccgtcagcggcctgctggtgctgatgatgctgatgttaatcttcgtctacctgctgtttgccgtgctgccactgtttaaatcggcgtccatcgagacgtcaccggcgctgacgctgaaccacgcgtcgccggccatggcgctcgggatggatgttcagcaacgggtgggctatcgcatcgaccgtcggggagaagggcagttttaccgtctgacggcgcggcaggggcaggcggccggcacgctgctgaccagccagcggctgctgccggcgccgacgctgttggcccgggcggtgggcgcgcgcgacctgtttgcgctggcgcaggccgacgggcgctttatgattgcccaggccgattttgccgcggcgccgcaggaaaaaccgcgctggactctgccgctgggcgagcggccacgggctctgctgccccatggcggcgcgctgacacagctggcgctggcgccggcgcgcgaggccggtgagtatctggtggcggcggtgaccgaacggcgtcagctgttgtttgcccgcgttgccgcacagcagccggcggcggtaagtcgcgtcgcgctggatgctgacgtccagcaactggtgctggcgccggatggccgccagctctatctgctgagcggcaaccgactggcgcgttaccagatcgacgggacacagctgcggctgcaggagacgcaaacgctcggagaacagacgccttaccgtctgacggcgctgccgggcggcagcgcgctgatcgtgcatgccgccgacggcacgctgcaggagtggttcgacgtggagaaaaaccagcgctggcgcctgaccgcggcgcagcagttcgcgccgcagccggctgcggacgctacggtgattgccgaaccgttccgccgggtgttcgccgccgtacagccggacggtgcgtttgcgctctacgccagcattcagtcccgacctttgctgagcgcccggctggccgccggcgtgcagcaggcggcgtttgcgccgcgcggcgacggtctgttgctggagaccgcacagggctggcagcgctatcgcctgaataatgactaccctgacgtaacctggcgctcgctgtggcagaagatctggtatgagaactatccgcagccggcgctggtctggcagtctacctccggggaggacagctatcaggccaagttcagcctggtgccggtgattttcggcaccctgaaagccgccgtctatgcgatgctgttcgcgattccgctggcgctgggcggcgctgtctatacggcctgttttatgtcgccggcgctgcggcggctggtgaaaccggcgatcgaagtgatgggggcattgccgacggtagtcatcgggctggtggcgggcatctggctggcgccggtgatcgagcgccatttgctggtgatactggcgttgccgctgctgttggccggcgcggtgataggatgcggcctggcgcagcagcgctggtggccgggccggctgcgtcccggcgccgatttactgctgctgttgccggtgatggcgctgaccgtctggctggcgatgatcctcggcccctggctggagacgctgctgttcggccagccgatgcacgtctggctgggcgatgactttgatcagcgtaatacgctggtggtcggcgtggcgatgggttttgcgctggtgccgattattttctctctggcggaggatgcgctgttcagcgtgccgacgtcgctcactcagggatcgctggcgctgggcgccacggcttggcagacggtggtgagggtaacgttgcccgccgccagcgccggcattttctcggcgctgatgatcggtttcggacgggcggtaggggaaaccatgatcgtgctgatggctaccggcaatacgccgattatcgacggcagtctgttccaggggctgcgcgcgctggcggcgaatatcgccattgaaatgccggaggcggtgttcgccagcagccactaccgggtgctgttcctgaccgcgctggtgctgtttgtgtttacctttattttcaacacgctggctgaggcgattcgccagcggttgcgcgagcgctatagccagaatcaggaggcgccatga

SEQ ID NO: 443884 - DNA, 2232 bp, Serratia marcescens
atggttaaattgaaactctggaatgatttacgccaccgttggtggggccagcccttaatctggagcctggtgtttatccctctggccggctggctgtctccgcgcattatgttgccggaggggaaggtgtacctggtctatctgccgctggcggtgtgcatttcgctattgatggtgtatgactggatggcgattcccggcattgccattgctatcatggtccgctacagcgcccggctggggccggaaatcggcattatcatgacgctgctgtatctgttctgcctcggcgtctgctggttgggctaccgctgccagacgcagcgcagctggtgcgcccgcattaacgtgctgggatttacgccaccgcgcctgatctggctgctgacgtttccgccgctgctgtttatcctcagcctgcagctgatgaccggtatgggacttttgccggacgagatgggcatggtgttcggcagagccaatctgatgcatacgctggtgaatttccatgcgttgctgatcgccggcctctcttccacgccgctgttctattttgtactgcgcatgctgaataacccgcgctttatgcggacgctgcggcgccgtttccggctggaagtcgcgccgggcgtcaaaaccggcgagccgcagctctggctgttgctgctggccggcatggtgtttgcgctgtgttaccccaccggcgtcgggcacaaggagttttgggtcgactacagcctgacgctgttgctgccgctgatgctgtacggcgccatgcgcttcggttatcacctgaactgcatcgcctggtcgatcgcgctgctggcgctgttcttcaactatcgcagctatgtgcgggtggacgggcgcctgcacgatctggccgtggtctcctcgatgatgctggtgttcaccctcagcgtattcctgctgtcggcgattaactcccgccagctggtgctgttcgccaaaatgcgacgcgcctcgctgcaggatccgatggtcggcctgcccaacctgcgcgccctgaagcgggacttagcgcaggcgccgcgctcgacactgtgctttttacgcattgccgaactggatctgctgagccgccattacggcatgcagctgcgtatccgttttaaacagcacctggccagtactcttcgtaaagtgatggcggcggacgaagaggtctatcagctgccgggctacgatctggtgctgcggcttaacggctatgacgccgaagccaaagtggcggaggtgcacgccacgctggagaacttccgcctggtctggaacgggttgccgatccatccgccgctgggtgtcagctactgcggcatcgccggagaagtggagcacctgcatctgctgctgggggagctgagttcgctggctgaactttcactgaccagcggcgagccggagagtatccgcagcgatcatcaggacgtgcagaatgagctgaagcacaaggtgcgtttgctgcaccgggtgcagcgggcgctggatggcgacgggtttatcctgatggcgcagccgatatccggggtgcgcggcgacagctaccatgaaattctgctgcgcctgcccgatgataaaggcggtacgctgccgccgagcgagtttttgccggtggtgcatgagtttggtctggcgtatcagctggacctgtgggtgctgaacaacacgctgaagtttatggatagccaccgcaatacgctgccgagcgcgcgttttgcggtgaacatctcgccgccgacgctgtgccgcccgacgctgagccgcgatgtacgccaggcgctgcagcagtatgacattgagccgtaccagctgattctggaaatcaccgaatcacacctgatgcaggatatccactatgcggctaccaccctgcgggagctgcgcgaactgggctgccgcatcgcgattgacgatttcggcaccggctatgccagctacaatcgtctgcggatgctggaggtggatacgctgaaaatcgacggcagctttgtgcgcgatatgctgaatgacccggtggatcaccagattatcgcctctatctgcaaggtggcgttaatgaagcggctacatatcgtggcggaatatgtcgaaagcgaagagcagcagatggcgctgcgggcgttgggggtcgattatatgcaaggctaccatatcggccggccggtgccgctgacgtcgctggtgacaccggcgcaggagccgccggcgtaa

SEQ ID NO: 443885 - DNA, 192 bp, Serratia marcescens
atgcgtaaaagaaccaccggacaaatgaccaaaatagtgttgctggtaagctttatcattttgataggccggcttctgtataccactctcgccgccattccccatcatcaggaaaaaaatgtttccgcccaggaacagcacatcagtcaaccactcaatccgccacgggacaacgcctctgaaacgcagtga

SEQ ID NO: 443886 - DNA, 1434 bp, Serratia marcescens
atgtctgccgcaacacataatgtcaaaaaggtggctgaacaccgtcagcacatcctgtccctgttactgaacaacaaagcgctggtcgacggcatcctcggccggccggacgaagagcagcagctcagccgccaggcgctgatggaccagaccgccgaagttcgcgcgctggtggaagagatgcacgccgccgacctcgccgacctgctggaagcgctgccgcaggatgaacgcctggcgctgtggcggctggtggatccgccgcgccgcggccaaacgctggtggaagtcgctgaaccggtgtgggacagcctgatcgaagagatgagcgataaagacctgctcaaggcgatcaaaacgctggatatcgatgaacaggcctatctggcgcagttcctgccgcgtaacctgatgggccgcctgctgacctcgctggagccggggcagcgcgcacaggtgcgcgagatgatgcactacggcaaagagaccgtcggctggatgatggacttcgagctggtcacggtgcggcccgatgttacgctgggcgcggtgcaccgctttttgcgccagcgcaaaaccattccggacgccaccgataaaatctttgtcaccgatcgtaagaacactctgctcggcgaactgccgctgacggcggtgctgctgaacgacccgcaaacacaggtcgccagcgtgatggacagcgaacccaccagcttccagccggaagataaggccgaagcggcggccggcgcgtttgaacgttatgacctgatcagcgccccggtgatcgacgcgcagggcaaactgatggggcgtctgaccatcgaagagatcgtcgacgtggtgaatgaagagagcgaaagcaacctgcgccgcatggggggcttaagcccggaagaggacgtattcgcgccggtcagcaaggcggtaaaaacccgctgggcctggctggctatcaacctgtgcaccgcctttatcgcctcgcgggtgattggcctgttcgagcacaccatttcgcagctggtggcgctggccgcgctgatgccgatcgtcgccggcatcggcggcaataccggcaaccagactatcaccatgatcgtccgcgcgctggcgctgcaccagattgaagagggcaatatttcccgtctgctgctcagagagctgggcgttgcgatcatcaacggcctggtgtggggcggcattatgggcatggtcacctatttgctgtacgacgactgggcgctgggcggcgtgatgacgctggccatgatcctcaacctgctggtcgctgcgttgatgggcgtagtgatcccgatggtaatgctgaagatgggccgcgacccggcggtcggctccagcgtgctgatcaccgccctgaccgataccggcggctttttcatcttcctcggcctggccagcctgttcctgctttga

SEQ ID NO: 443887 - DNA, 1449 bp, Serratia marcescens
atgagtgaacaccaggcgttatatgccgcgctgcgcgcgcgggatcgcaaatttgacggccgtttctttgtcggcgtgtcgtcgaccggcatctactgccggccggtgtgcagcgcccgcacgccgaaaagcgagaactgcagcttctaccccagcgccgccgccgccgaactggcgggctttcgcccctgcctgaagtgccggccggaactggcaccgggcctggcgctgatcgacctgggcaaccgctatgcgcaggttgcggtgcagctgattgagcagggctacctgtctgaacacagctgtgaggcgctggcggcgcggctggggatttccgatcgccatctgcggcgcatcttcgccgagcagttcggcgcttcgcccatcgattatgcgcagtcgcaccggctgctgcaggccaagcgcctgctggcggataccgatatgccgctcagcgaggtggcgttcgccgcggggtttggcagcctgcggcgctttaatgaactgtttaaacagcgctaccgcctgagtccgtcggcgctgcgtgaaagcagcggccggcagacacgcgccgccgacagcgggctggtgtttcatctgggctatcgcccgccgtacgactggccgcgcatgctgaattttttacaggcgcgtgcggtcagcggcgtggagtgcgtgcaggacgggcgttattaccgctccatcgcggtgacgctcggcggagagtcgtatcagggctgggtcagcgtgcagccggaaacggcgcgcgatcgggtgcgggtggagattgcgccgtcgctgagccgggtgacgaccgacgtgctgcggcgcgtgcgccagctgttcgatctggatgcggcgccggacgtcatcgccgccgcgctggggccgctggtgaccgaccccggcctgcgcctgcccggctgtgtcaacggcttcgaacaggcgacgcgcgcggtgctggggcaactggtcagcgtgaagatggccgccgtgtttgccggacggatggcggagcgttggggaacaccgctggcgcagccgcacgccggcattactcatgtgtttccgctggccgggcagatagccgcgctgcagccggagatgctgaggccgctcggtattcagctcaagcgcggcgcggcgctgatcgcgttggcgcgcgcgctggaagcaggacggctggcgctggataatgtgctggatattgagcagggcatcaaggcgctgaccgcgctgccgggcatcggcgactggacggcgagctatattgcgatgcgcgcctggtcatggccggacgtatttctgagcggcgattacctgattaaacagcgctttcccggcatgacgccgcgccagattgagcgctatgccgaacgctggcggccgtggcgctcttacgccactttgcatctgtggcatcacgacggctggcagcctgagcgatag

SEQ ID NO: 443888 - DNA, 1353 bp, Serratia marcescens
atgtttataggattcgactacggaacggccaactgttccgttgcggtgatgcgggaaaacggcccggagctgctggcgttggaaaacaatgaaccgtatctgccgtcgatgctgtgcgcgccgagccgcgaagcggtcagcgaatgtctgcaccgccactggcaggtgccgaccggcagcgaggaaaaccagcagctgctgcggcgcgccgtcagctacaaccgcgaagaggatattccggtcaacgccgacagcctgcactttggtctgcaggcgctggcgcactatgttgaagacccggaagaggtgtacttcgtccgctcgccgaaatcattcctcggcgccaacgggctgaaggcgcagcaaatcgcgctgtttgaagacctggtctgcgcgatgatgttccatatcaagcgccaggcggaaggcgtgctgcagcagcagatcgagcagacggtgatcggccggccgatcaacttccagggcaccggcggcgaagaggccaacagccaggcgcagggcattctgctgcgcgccgcccagcgcgccggatttaagcagatcgaattccagtttgagccggtggccgccgggctggatttcgaagccacgctgcaggaagagaaaaccgtgctggtggtcgatatcggcggcggcaccaccgactgctcggtgctgttgatggggccgcagtggcgcgacagcgccgatcgccagcagagcctgatcggccacagcggctgccgcgtcggcggtaacgacctcgatatcatgctggcattcaagcaactgatgccgctgttcggcatgggcggtgaaaccgcaaaaggcatcgccctgccggcgctgccgtactggaacgcggtcgccaccaacgacgtgccggcgcagaatgagttttacagcagcgccaatgccagactgctgaacgatctgatccgcgacgcggcggagccggaaaaagtgcgtcggctgctgcaggtgtatcggcaacgtctgagctaccggctggtgcgcgcggcggaagagagtaaaatcgccctctccggcgaggaaaccacccgcgtaccgctggcgtttgtccagccggaactggcagaactcatcagtcagggacagctggcggatgccatttcccagccgctgcagcgcatccaggagcaggtcaccgccgcgctggccaccagccagacgcagccggacgtgatctacctgaccggcggcagcgcccgttcgccgctgctgcgcgcggcgctgcaacagcagctgcccggcattccgatcgtcggcggcaatgacttcggctcggtcaccgccgggctggcgcgctgggcgcagacgctgttccgttaa

SEQ ID NO: 443889 - DNA, 561 bp, Serratia marcescens
atgcctatcgccacgctgaataccgaacgtttacgcctgcgcgcctggcaagacagcgatctggccgctttcgccgcgctgaacgccgatccgcaggtgatgcgttacttccccgccccgctgtccgccgccgccagcgaaacgcaggccgccgcgatccgccagtttatgcagcagcacggctggggattatgggccgtcgaactgccgggccatgttccctttatcggttttgtcggcctggcccaggtcggcgacgatctgccgctgtcgccctgcgtggagatcggctggcggctggccgccgcccactggggccacggctacgccagcgaggccgcacgggcagcgctgaaccatgcgttttcacagctgcaactgccggaagtggtgtcgtttaccgccgtcgtcaaccatccctcacgccgggtgatggaacgcatcggcatgcgctgcgctgacgagtattttgaccatccgcgcctgccgccgggccaccgcctgcgccgccatgtggtgtaccggctgaaccggcagcagtggcgggagcaggctgactga

SEQ ID NO: 443890 - DNA, 957 bp, Serratia marcescens
atgagcaagcgtgaattgggacgtagcggaatcagggtgccgaaactgacgttcggcggcaatgtgttcggctggacggcggatcgggcgacgtctttcagcctgctggacgcgctggtggacaaccaactgaattttatcgataccgccgatgtgtattcctactgggcgccgggcaatcagggcggcgagtcggaaacggtgatctgcgaatggctgaaacagagcggcaagcgcgatcgggtgattatcgccaccaaagtggggaaaatgaacgatgcagccggcaaaccgcagctgtcggccggctatatccgccaggcggtggagaattcgctgcgccgtctgcagacggactatatcgatttataccaatctcatgacgacgaccgcgacaccccgctggcggaaaccctggcgacctttgacgcgttgatcaaagagggcaaggtacgggcgatcggcgcgtccaactatcaggccgatcggctggaagaggcgctgcgggtcagcgagcagcacgggctggcgcgctatgagaccctgcagccggaatataacctctatgcccgacaaggctatgaacaggcgctggaaggggttgccgtcaggcacgggctgggggtgatcaacttctgggcgctggccagcggttttcttaccggcaagtaccgcagcgccgatgatatcggcaagagtcagcgtggcgacaccatcgtggcgcgctatttgaacgcgcgcggtttacgcattctggaggcgctggatagcgtggcgcagcggcatgcgacgacgccgactcaggtctcgctggcctggctgatggcgcggccgagcattacctcgccgattgccagcgccacctcgctggcccagttggatgagctggtcggcgctacgcaactgtcgctgagcgcagaagatattcgccagctggatcgggccagcgaggaataa

SEQ ID NO: 443891 - DNA, 1242 bp, Serratia marcescens
atgaatgcaaaacctcaacgccgccccttgatcctgcgccttgtcgttctcgcgctgttggttatcgccgccgtgttgatttggcgacattttttcgccgccgcacccgtcgaaccgctgccgtccgcccgccaggcggcgggcaaacaggcgaataatggcggacggcgcaagatgccgatgtcgccggtacaggcggcaaccgccatgcagcagaccgtgccgcgttatctgtccgggctgggcaccgccagcgcggcgaataccgtcaccgtcaccagccgggtcgacgggcagctgatggccattcactttaccgaagggcaacaggtcaaggccggcgatctgctggcggagattgacccgcgtccgttccaggtgcagctgacgcaggccgaaggccagctggcgaaagaccaggcgacgctggccaacgccagacaggatttggcgcgctatcagcaactggtgaaaaccaatctgatctctcgccaggatctggatgcgcagcgggcgctggtgcgccagaccgaaggagcgatcaaggccgatcagggcgcggtggacagcgccaaactgcaaatcacctacagccgcatcaccgcgccgattgacggccgcgtcgggctgaagcaggtcgacgtcggcaactacatcaccagcggcagcagcacgccgctggtggtgatcacccaaacccggccgatcgacgtggtgtttaccctgccggaaggcaatatcgccgatctgcttaaggcgcagaaggccggtgcggtggcggtcgaagcctgggaccgcaccaattcgcagcggctggcgaccggcagcctgctgagcctggataaccagatagataccgccaccggcaccatcaagctcaaagcgcgctttagcaatcaggatgatgagctgttccccaaccagttcgtcaacgcgcgcctgaaagtggataccctgcacaacgcggtggtgatcccgacggcggcgctgcagatggacaacgagggcaacttcgtctggacgctgggggatgacaataccgtcagtaaacaccgcgtcaccaccggcgtgcaggacagccaacaggtggtgatcagcgccggcctgagcgccggtgaccgggtggttaccgacggcatcgaccgtctgaccgacggcattcaggtcgaggtgctgacgccgcaggaaacgccggcagccgccacgccgcgccgccagccgcaagtgcaggggaaatcctga

SEQ ID NO: 443892 - DNA, 1392 bp, Serratia marcescens
atgaaaataggcattaccggcaagctgtttctggccatcttcgccacctgtatgctggtgctgatcaccatgcactggggcgtgcgcctcagctttgaacgcggttttatcgactacatcaagcacagcaacgagcagcgtatcgccatgctgagcgatgcgctggaagatcagtacagccgccacggcaactgggcgtttctgcgcaacaacgatcgggtggtgtatcagattatgcgttcgtttgagcagagcagcgacagcagccataacctgccgccgaagggctggcgtacacagttctgggtggtcgacagccggttccggcgtctggtgggccactccggcccgttccccaaagagggcacccggcagccgatccgctataacaaccagatcgtcggctgggtgatcgccacgccgccggagcggctgacgcgcaacgccgatatcaacttcgaccgccagcaaaaacgcaccagttggctgattgccgcactgtcggcgctgctggccgccgccgccaccctgctgatgtcgcgcggcctgctggcgccggtcaaacgtctggtggccggcacccaccggctggcggccggcgacttcagcgcccgcgtcgcggtcagcagccaggatgagctgggacggctggcgcaggactttaaccagctcgccacctcactggaaaaaaatgaacgcatgcgccgggcgtttatggccgacgtctcccatgagctgcgcaccccgctggcggtgctgcgcggcgaactggaggcgctgcaggacggcgtgcgccagccgacgccggattcgctcggctcactgcaggcggaagtcgccacgctgaccaagctggtggatgatttgcaccagctgtcgctgtccgacctcggcgcgctggcctatcgcaagtcgcaggtagactgcgtccatctgctgcaggtgtcggtcgccgccttccgcgagcgcttccacgccaaggggctgaacatcgtcacccgcctgccggagcgcgcgccgctgttcggcgacccggatcgtctccaccagctgtttaacaatctgctggaaaacagcctgcgctataccgacgccggcggcacgctggagatcggcgccgaggtgaagcccggcagcctgctgctgtactggcaggacagcgctcccggcgtgcatgacgaccagttgccgcgcatccttgagcgtttctaccgcaccgaaggctcgcgcaaccgcgccagcggcggctccgggcttgggctgtcaatctgccagaatatcgccgaagcccacggcgggcgtatttacgcgcagcactcacctttgggcggggtgcgcattgcgctagaattcccctatcccagctccccagtaaagaacaaggcatcctga

SEQ ID NO: 443893 - DNA, 345 bp, Serratia marcescens
atggcaaacggccactatgaactaaaaaaatccggcagcaacggacagtttcacttcacgttaaaagccagcaacggcgagatcattctttccagcgaaatgtataccagcaaggcgtcggcggaaaacggcatcgcctcggtgcagaccaactccctgcacgaagcgcagtatgaaagcaaagtcagcagcagcggcaagccctactttgtgctgaaggccaaaaaccaccaggtaatcggcaccagccagatgtacagctcagacagcgccgcgaaaaacggcatccagtcggtgatcaaaaacggcccgaccaccgatgtgcgcgacctcagcgccggctaa

SEQ ID NO: 443894 - DNA, 900 bp, Serratia marcescens
atgggtcaacacgcgccaacattacttatcattaacggtaaaggcgccggcgatgagctggtgcgcgctgcggtgcaaaagctgcgggcggccggcgacattctgcacgtgcgcgttacctgggagggcggcgatgccgcccgctacgtagaagaagcgcggcagctcggcgtcggcacgctgatcgccggcggcggcgacggcaccatcaacgaagtggccgccgcgctggcgctgataccggccgagcagcgcccggtgctgggcatcctgccgctcggcaccgccaacgactttgccaccgcctgtaatattccgctggtgccggaacaggcgctgaacctggcgattaaaggccgtgcagtgccgatcgacctggcctgcgtcaacggtgaacgctactttatcaatatggccaccggcggcttcggcacgcgtatcaccaccgaaacgccggaaaagctcaaggcggcgctgggcggcgtctcctactttattcacggcctgctgcgcatggagagcctgaaggccgaccgctgtgaaatccgcgggccggatttcgcctggcgcggcgaagcgctggtgatcggcatcggtaacggcaagcaggccggcggcggccagcaactgtgcccggatgcgctgatcaacgacggcctgctgcagctgcggttgctgatcgccggcgaactgctgccagccctggtcgccagcctgtttaatgaagacgacaacaagaatatcgtcagcgccgcgctgccctggctggagatcgacgcgccgcacgagatgacgtttaacctcgacggcgaaccgctgaagggcaaacatttccgcattgaggtgctgccgaacgccattttgtgccgcctgccgcctaactgtcagctgctcggttaa

SEQ ID NO: 443895 - DNA, 1017 bp, Serratia marcescens
atgaaaagcgtagtgattgaacagccgggccagctgacgatagcccaacgcccgctgccggaacccgccgccgacgaagtgcgggtcaaggtcaaactcgccggcatctgcggttccgacgtgcatatctaccacggccataacccgttcgcccgctatccgcgggtgatcggccacgagttctgcggcgtgattgacgccgtcggcgcacacgtcgacgccgcccggctcggcgagcgcgtggccgtcgacccggtggtcagctgcggccactgctacccttgctcggtcggccggccgaacgtctgccaccagctgcaggtgatcggcgtccaccgcgacggcggcttcagcgattttagctgcgtgccggccgccaacgcctaccgcatccccgatgcgctcagcgatcggcaggcggcaatggtggagccgttcaccatcgccgccaatatcaccgcccacctgcaaccgaccgcacgcgacgtggcgctgatctacggcgcggggccgatggggctgacggcgatccaggtgctgaaaggcgtgtacggcgtacgtcaggtgatcgtcgccgaccgtatcgccgcgcggctggaaatggcgttcgccaacggcgccgatgaggtggtcaataaccagcagacgtcgctgccggaagcgctggcgcagcgcgatatccgcccgacgctgattatcgacgccgcctgccaccccgatattctgccgcaggccattcagctggcatcgccggcggcgcgcatcggcatcatgggcttttccgccgagccgtgtgtgatcaaccaacagagcatcaccagtaaagagctgtcgattttctcctcacgcctcaacagcgcccgcttcccgcaggtgattgactggatggccgagggactgatcgcaccggaacggctgattacccacagcgtggcggcggacgacgttgaagcggcgctgcatctgtttgaacacgatcgccagacctgctgcaaggtactgctgcagttcggctga

SEQ ID NO: 443896 - DNA, 1290 bp, Serratia marcescens
atggttaagaacttacgctggaccctcgtattcctgctgttcctggtctacatgatcaactatctcgatcgggtggcgctgtcgatcaccgtgccgatgatcgaacaggatctgctgctcaacgccgaacaattcggcatcatcttcggcagcttcttcttcggctacgcgatcttcaactttatcggcggcctggcggtggaccggttcggtccgacgctggtgatggggctggcggtggggctgtggtcgatcttctgcggcatgaccgcgctcgccagcggcttttactccatgctgatcctgcgcgtactgttcggcatggcggaaggcccgatctgcgcctccgccaacaaaatgatcaacggctggttcccgaagaaacaggcggccaccgccatggggctgctcagcgccggctcgccgcttggcggcgcggtggcggggccgatcgtcggctatctggcgctggcgttcggctggcgaccggcctttatgattatctgttcggtcggcatcgtctggatgctggtctggttctttatcgcggcggacaacccggagaaaagcaagcgcgtcagcgaggaagagcgggcgctggtcaatgcgcagaaggccgaaggccaccacccggaagaggcgctcagcggcagcgcgcacgggctgggctactacctgaaacagccgatcattctggcgaccgccttcgccttcttctgttacaactacatcctgttcttcttcctcagctggttccccgcctatctggtacaggcgcacaacctgaacatcaaagagatgagcctgacgacggtgatcccgtggatcgtcggttttgtcggcctggcgctcggcggctatatttccgataagatcttcaacatcaccggcaaactgctgctatcgcgcaagattgtgctggtggtcagcctgctggccgccgccgcgtgcgtagcgctggcgggcaccgtcagcagcgtgatgccggcggtgctgctgatgtcggtatccatcttcttcctgtatatcaccggcgcgatctactgggcgattattcaggacgtggtgcataaatcccgcgtcggcggcgccagcggctttattcacctggtcggcagcgtatccggtattgtcggcccggtggttaccggctacatcgtgcagcataccggcaagttcgacagcgcctttatcctggccggcggcatcgccgcgctcggcgcgctgctggtactgctggttgtgcgtgcgccgcgtccgctggcgcagccgcaaaccttaaaaccctaa

SEQ ID NO: 443897 - DNA, 687 bp, Serratia marcescens
atgtctgaaaattacagccttaccaacaccttgccggtgaatcagcaaatctaccgctttttacggcaggatatcgtcgactgcaccattgcgccggggacgctgctgtcggaaaaggagatttccagccgtttcagcgtgtcgcgccagccggtgcgtgaggcctttatcaaactggccgaggcggggctggtgcagatactgccgcagcgcggcaccttcgtgatgaaaatttccgccaaacgcgtcgcggacggccgctttatccgtcaggcggtggagtgcgccatcgtccgccgggccgccaccggcattaccccgccgcagctggcgctgctggagcataacctgcagcgtcaggcgctggcggccaacggccagcaaatacgggaattcctgttgctggacgatgagttccaccgcctgctgacgcagatcgccaactgtccgctggcctgggaaaccatcgaaaccatcaaggccaccatggatcgggtacgttttctcagcctgagcgaagtctcgccgccggaaacgctgatccaacagcactaccgcattttcgacgcgctgaaggcgcacgacccggacgccgccgagcgggccgttcacgaccatctgcaggagatgatttactccatcacgccgatcgccctgcaaaacagcagctggttcgaggtcgaataa

SEQ ID NO: 443898 - DNA, 459 bp, Serratia marcescens
atgacaggaatgcataaacgtcgttatatgctgctgggcgcgttgctggccgtcagcgccggcagctttgcccagcaggtggtgaccacggcggatctggttcagcagccgggttatcagagcagctggcagcagatgatgaaaggtcaggcccggctgccgggctgggcgcgtaagggcagcggcacttcgacgccggcggagacgatcggctggcaggggcagcagtatcaggttggcaatatctgcaaacctcacgattgcggcaacaactttttgatcgtcgctttcaaggcggacaagtcgcaggcctggggcgtgcgggttgaggtggaagaccggccggaagcggtggcgcaccccaaaaagtacgccaaatatcagtggctcggcaagccggacagcaatatgcgggcgctgctgcgtcagcagtttgaaaacagcccggactggaagtaa

SEQ ID NO: 443899 - DNA, 789 bp, Serratia marcescens
atgatcgctcgacctgatgaattgcccggcgcaacggccgcggccagcttacagctgcttaaacaacattccccgctgattcactgcctgaccaacgacgtggtgcaaacgctgacggccaacgttttgctggcgctgggcgcttcgccggcgatggtgatcgaaccgtccgaagcggcgcagttcagccgcctggccgatggcgtgctgatcaatatcggcacgctgaccgccgcccgcgcggaatcgatgctggcggcggtggaggcggccaatcaggccgcgacaccgtgggtgctggacccggtggcggtcggcggactgacctttcgtaccgagtttgccaaccggctgctgacgctgcagccggcggccattcgcggcaacgcgtcggaaattatggcgctgagcgggctgcaggcctcggggcgcggcgttgacagcacggcagattctctggccgcgctgccggcggcgcagcagctggcgcagcgcagcggcgcgattgtcgcggtcaccggcgccactgactacattaccgacgggcagcgtagctgggcggtcggcggcggcgatccgctgatgacgcgggtggtgggcaccggctgtgctttatcggcggtggtggcggcgttttgcagcctgccgggcgagcggctggaccacgtcgccgccgcctgccgggtgatggcgcactgcggcgcggcggccagcaaacaggccggcggccccggcagctttacccctgcatttctcgacgcgctgtaccactggcagggagaagaataa

SEQ ID NO: 443900 - DNA, 255 bp, Serratia marcescens
atgagagaattatctaacgttgaagttgaaacagtttccggcggcattttcggtggcattatcggcaatatcatcaacgctggcgttgataccctgaccggcatcgcgggcaacatcgtcggcaatatcgccaactctatcggcaacaccattggcctgggcatgggcttcctggataagctcgtcaatgctttccgtccaagccgaccaaatcagccagcgccagatgccccaagcgaagccgctcgccgctaa

SEQ ID NO: 443901 - DNA, 201 bp, Serratia marcescens
atgcaaaaattagcgcaaggcgaagcaatgaatattattggtggcgcttggggatgtaaagtaagccacagcttatctccgtcatcctcagggctggcttgctaccggaccgtgggctgcgttgacaagtttggcaacgtgacctcctccagcaagcccgttgagctgaatgagtgcgccgctgccattcccacgccgtaa

SEQ ID NO: 443902 - DNA, 207 bp, Serratia marcescens
atgagagaattatctaacgttgaagtcagcgaagtatcaggcggtatcttcggtggtatcttgggtggtgttgttggttctatcacccagggcgccgaatccatcctcggcagctttaccaacgcagccagaggcgtaggcaagatcttcaccgacggcgtatttaaccttgtccgtggtttctgggaaggtcgttacaccaagtaa

SEQ ID NO: 443903 - DNA, 426 bp, Serratia marcescens
atgcaaatacggctataccaagaatccgatcgcccctttctgcgccgcttgtatttggccgcgcgtaaaaccgcctttcactggcgggacaccgccaattaccaaccgagagatttcgatcgcgctacgctgggggaagagatctgggtggctgaagaaaacggcataccgctgggttttgtttccattcaccgggccgaagattttatccataacctgtatgtcgaccccgctcaacaaacgcgcggcgtcggcagcaccctgctcaaacaggcagaatccaccttccgcaccatcggcgcgttaaaatgtctggtcaggaacgaaccggctctgatgttttatcagcggcacggctggcgcattatcagccaggggggagaaggcgacgacgcctattacctgctgcacagcgccgccagataa

SEQ ID NO: 443904 - DNA, 426 bp, Serratia marcescens
atggcgaatatttataactggctgctcgatcattccggtatcggagtggctgatatttaccgctcggcggcgttctatcaggcgctgctggcgccgctgaacgtcggcgtggtgatgcgcatttcacgccgttttgagccggcgcaggcgggcgacgctgatttggccggcgtggcgttcggtattgattacccggtgttttggctcgatatttttcatccgcacagtcagcggcagcacgttgcctttcgcgccgtgagccgtgaacaggtgcgggcattttatcgggccggtctggcggcgggcggtgtcgataacggcgcgccaggtctgcggacggatgatttttcatcaggatattacgcggcgtttgtgttggatccggatggtaataatattgaagcggtgctgcgagaagggcgttaa

SEQ ID NO: 443905 - DNA, 2133 bp, Serratia marcescens
atggtcgggttaaatcctgcgctgcttggcgcggcggtaagaggcatcagtcagagtttgcaccaccagcgccatggctttgccgccctgtcccagatggcgggacgcgcgcacgaccagttgctgagtgcgcactccccggcgctgatgcggcaatttacccaaccaagtccgttgcgccacgcattttcggccaaactcaacgacgccacgcacaagttccgccccggcgaactgccggagatgtttctctccgccatcaaacagggtaataacgcgctgcgcgcactgcaccatacggtaaccagcggcctgcaggaggcctacgcccatagcgccaccttccgcgcggcgtttaatcacgcctaccgtgacgaggtcagattcggtggccatgctcctcactggcagctcgatccgctggcggcatcgagtacgccggcgcatcagccatccgccaagacgctggggttgaagctgctgctcgaggtgttaaacggcaaaccgcccggctataccaccgaacaggggcagcagccgttaagtcaacggcgcgccctgctccatgcgctgctcgaagggctgaccggattgccacagcatgaaagcctgcatggcaaaccccacccgcgcgggccgctgattgaactgctgaatattgtggtggatgaggttgtgcgtcagctcggtacacaagatcccgcctgcgtcagtcaccctacaccggccggagaaactgagccgcagcggccgacagatgccaaggcaacgccgccatcttcgcaaaggaacacgcctccggcagcgcatgtcgatacacctacggcgacagtcaaagcgccagcaccttcggcggcgcacgcgccatcaccaccgcagcaagccgagataacggcaaaccatgccacgctccggcgtccgaccggtacggctcccgcttcacgctcggaaatcgccgaagataacgacccgatagaagagttggaacggccggatccgacagtggccgccacccgggaggcatttggccgcaagctgtttgacggattgatgaaggaaggcagcgccgcctgcccgcacgacgccgccagcgcgaaaagaatgggccagacctttcagcgcaacatggggccactgttcaacaatgtgacgggtcaggaaaaaagcgccgcagagctgctgcacaaactccatgcggaagataaaaaaaccgcggcttttcgattcgatccgacattcccgggcaatatgctggccgccatgcaggaaaaacgcggcgatgcgaaggcggcctgccgtttctatctggtgatggcacaggcggcgggtttcaaggcgcagacgcatgtcttttccgtcgccggcaacctcagcgtagcggtggccaaccggcctggcgaacatcatccgctgatcgaacactcagtgttaaagatcagcgacgagaacggcaacagcagctatttcgatccgttgctgggccgtgcggttaatccttttcgcagcgacagcatggaaaactatctgaataccgccggtctcgccggcgatgaaaccgcctatatccgcgagcgccacccacaggaaaccgccgtgtatggcagaggcattatggatgcgctgatgagggcgggcatcaacaccttccctgaaccggggctggaaacgaaacggcacgaggcaggccagcacatccagcgggcatttgccccgctattcaaacatacccatagcaaagaaagcaccctgagcctgctgcagaagctggcggacgaaaataagcgcagccagacaataaaattcaatccgacggaaagccagcgcgatatctatgacatcgcgctcgaacaacaggccgacgcagattccatcaacaaactgtttcaggcgctggcgaaaagcgccggccaccatcaggttgagctgcataccattgatacgccgctgtccatcgccatgggcgacagcccggagattcccggcgtaaagcctaacgccaggttcgaactgaaaaaccataccgtgctgaaattcagcgatccgcagggcaacacgttgtttttcgacccggtactggcacgcagggtcaaccccgacgatacccgtagtctggagggctatctgcgggtataa

SEQ ID NO: 443906 - DNA, 747 bp, Serratia marcescens
atgacggattttgacaccgccacgctgctgctgagcggcgtggtttttctgctggccgggctggtgaaaggcgtaaccggcatggggctgccgaccgtggcgatggggctgctgggcgcgctgatctccccggtggcagcggcaggcatgctgctgctgccctcattggttaccaatatctttcagttggtcggcggcgccaacacggcggcgctgctgcgccggctgtggccgatgttgctgatggtatcggttgccacacttggtaccagcggctggatagcggcgggcgacagcagccgcacgcagctggcgttgggcgtggcgctgattatctacgggctgtggaccctgtcagggcgcatttacgccgtctccacccgggctgaaaaatatggttccccgcttatcgggctggtcaccggcatgctgaccggcggaaccggggtttttgtgatgccggcggtgccctggctgcaggcactggggttggaaaaggatgagctggtacaggcgttgggcatctcttttacttgctcgaccctggcgctggcggcggggctatggtggcacggcgcctttcaggtcggatcgttaaacatgtcggcgttggcggtgctgcctgcattagcaggattgtttgtcgggcagaagctgcgccgcgtgatctcaccgctgctgtttcgtcgctgttttctgctctgcctgattgttctgggcgtagagatggcgctgcgtgcgatctga

SEQ ID NO: 443907 - DNA, 705 bp, Serratia marcescens
atgcgtggattaacaaggccgttaacgatttttacgagcaaaaaatcttttgatgaccgttttgctgatgatatgcaatttggtgatatgaatgaattgaccttaaaaaaacattatgctttagatcaggtgtcaacacacgttgactggagtacctataaatcaccttattttcattcggcaacgagaaatattccaccaaggagtaaagaaaaggtggtttcaatgctgtttgatgaattgagaacgtcatcaaggtttttttcatttgtgggggcatttgtcgcattgcttgttgctatttttctggtctggatggtcgttaggccggtgagtattgttagagttgatggtggtgctgtttatgttcataacctgccattaaccactgaaggtaaaatttcttggtggaatgaaaacaagaggctgttaagggataaatattccattattagaaatccaagtcattttaccattgttattatgaattttggtggctatgtatcacctccaacgggtagtaatgatggcagtatcgatgattatcactgttttaatgatataaagaatgataataaatgtatttataatgatatatcaatggttgttagtggaagtctggataataaagtttttattagcgttgatggaaaaacatatgtccagttacctaatggtaaagtagcactattgagtaagtcttaa

SEQ ID NO: 443908 - DNA, 351 bp, Serratia marcescens
atgaaagatctgatttctcgttgcccgatagaagaagtgatgcaggttctcagcggccgctggccgacgttgctgatctactacctgcaggacggcgtcaaacgttttaaccagctgcgccgcgataatccgacgatctcacacaagatgctgacgctggagctgcgcaagctggaggaggccggcatcgtgcagcgcacggagtttgagggttatccgcggcgcgtcgactatgcgctgacgccggcaggagaaaggctggtgccgctgattgatgcgctgggggagtggtgggtggagacggatagccagggtaaagaaaccttggatggctctttctccatggtgtag

SEQ ID NO: 443909 - DNA, 708 bp, Serratia marcescens
atggaacctattttgctatacggcttcccggcgggaagctccatggggctcgttgccgcacttgaatggctggggcagccgtacaagctgtgccgcgtcgatatgttaggcgagatgcgcacccccgcttataaacgcatcaaccctcgggtggaaacgcccgtgctgatcaccgaccggggggaggtgctgacggaaaacctggcaatcgccgcgtggctggaagcgcgggacacaacgcgccggatcagcgccgacccgctgtcgcgcaacgccgaccgcatgcaccagctgatggcgtttatcaacaccggctttaccggcgcttttaccccactctgggtggcgatggagatggcatcacccaatccggcaatgaaagaagcgttgcagacatgggggcgcgaagccgtgatccaacgccacgatcggctcgaagagatgatcggcgagacgccttttctgatcgctgaccggcccacgctggcggacgcgattttgatcggcgtcgcccgttggctcgacgttcatcaggtagctgaaaccgcgcgctggccgaagctggccgcactgagaaagcgccttgaagccgatccggcggttatttacgcaacggcgctggaaaacggcgagacgcagcgcggcaacggcgcctgccgcggccatattatgctgtctgaagtaatcgaacggtttggttcagcgtaa

SEQ ID NO: 443910 - DNA, 753 bp, Serratia marcescens
atgacaaacgataaagtattattggtgacgggttcaggacgcggtattggcgcagcgacagtattactggcggcagaacgcggctattcgatctgtttgaactatttaaacgatgaaaaatccgcatttaacgttcgcgatcaaattttaagccggggtgggaaatgcatcgccattcgcgccgatgtcgccgatgagcagcaggtcatcaagatgtttgacgatatcgatcgccagctgggcaccattacccacctggtcaataatgtcggcatcctgaagcaaaaaatggcgatgattgatatggatggcgagcgtttccggcaagtgctgctgaccaatgtcatgagccacttttattgctcacgcgaggcgatcaaacgcatgtcgctttcccgcggggggcgcggaggtgccatcgtcaacgtctcatccggcgcagcgaaaagcggctccccgttcgaatacgtcgattatgccgcgtcgaaaggcgccgttgacacctttaccaccggcctgtcgaaagaggtcgccgctgacggcatccgggtcaactgcgttcgcccgggcggtatttacaccgatatccatgccgacggcggcgaggcgttgcgggtggatcggattgccaaaaactttccgatgcaacgaggcggcacgcctgaagaagttgcctatgccattctttggctgctgagcgatgaagcgtcgtttgtgaccggcagttttaccgacctgtgcggcggggtatag

SEQ ID NO: 443911 - DNA, 1344 bp, Serratia marcescens
atgagtaataatgctctaaaaggtaatgcccttatcgggaaaaaacgctggacgataatattacccgccgtttttattatgtatacaatttcttttttcgatcgggtcaatataggcatggcgctgccccatattacggcggaaatgaggctcagtgccgttgaggccggctggcttggcggcgcatttgcctggggctatgtggctacgcaattcaccgcaggctggctggccctgcgctttggctccagaagaatcatcggcatcagcctgtttctgttcggtacctgcgccatgctgaccgggctaacgcgcaacttcagcgaactggttgcgatccgctttttcctcgggttggccgaaggccctattcaggctgcgacggcgatgtttctggcgcaatggtttatgacgtcggagcgcgggcgtgcttttggcatctggaacctaagcctgggcgccggggcgtttcttgccgggccgatttcgggctggatcctggcgcatcataactggcgaatgatgatggttatcgagggcgcgccagcttggattttctgcatcatctggttttatctggtgccgaagagtattcaggccgcgcgctggctgagcaccgaagacagggaacagatacaacaggagcttgcgacagagcagtcgaactacataaaggaaaaatcggacccctggtggacaatcctgaaaataccggcgctgtggctgatgctcatcggctattcgctacacagcatgctggcgtatggcttcacgctctggctgccgacggctctcaaaggttacggcatgctgagcgaattcaccgtcggcttaatcagcggcatgccgttcctgatgaccatggtcggtatttggtacatcaccagacgttcagataagtacaaccaagagcgaaggctgcatgcggccatccctaccgtcttgtgcggtattgccctgtcggcggcagcctttgtcccgctttctttttactggatgcagattgccctgttcatgttcgtcggcctgacgatgaagatgctggtgccgctggtgtatgtccggctgacagagattctgccgacaaagaaagcggttcctgccgtggcatttgtcggcgcatgcagcaattttatcgggcagtttggcgggccgctggtcgccggatacctgaagcatctgggcggcggcaacgatatgacgctggcctggggcgttctcggtctgttctctatcattggcggcgtgctgtttgcactggcggtggggcgtgaagagcgcatctgggacatcaaaccggcattcaggcaggcttcacgccggcctatgcctgccagagaatag

SEQ ID NO: 443912 - DNA, 1164 bp, Serratia marcescens
atgcgtattctagacgttgtagaaatgaccaagcccatcgcttcccccatccgcaacgcgtatatcgatttcagcaaaatgacgaccagcctggttgccgtcgtgactgacgttgaggtggacggacgccgtgtggtggggtacggctttaactctaacggccgctacggtcagggtggcctgatccgcgagcgtttccgcaaccgtattctggaggccgagcctgaaagcctgctgaacgcacagggcgataacctggatccgcataaaatctgggacgttatgatgagcaatgaaaaaccgggcgggcacggtgaacgctcagttgcggtcgggacgctggatatggccatctgggatgccaccgcaaaaatcgccaaccaaccgctatttcgcctgctggcagagagaaagggcgtagcggccaatccacgcgtcttcgtttacgcggctggcggttactactacccgggcaaagacctgagcgccttgcgtcaggagatgcgcggctatctgaaccgcggctataacgtagttaaaatgaaaattggcggggcgtctctggaagaggatcgtcgccgcattgaagctgttctcgatgaaataggcgctgaagcgcgtcttgccgttgacgccaacggccgcttcaatctggaaaccggtattgcctacgccaaaatgctgcgtgaatacccgctgttctggtatgaagaagtgggcgatccgctggattattccctgcaggcggcgctggcagagttctatcctggcccgatggcgaccggtgaaaacctcttttctcatcaggatgcgcgtaacctgctgcgctatggcggcatgcgtccggatcgcgactacctgcagtttgactgtgcgctctcttatggtctggttgaatacctgcgcacgctggacgtactggagcagtttggctggtcaccgtcacgctgcatccctcacggcggtcaccagatgtctctgaacatcgcggcaggtctcggcctgggcggtaacgaaagttatccggatctgttccagccctatggcggcttcccagactcggtgacggtcgaagatggtcacattatcatgccggaactgccgggcattggcttcgaaggtaaatctgatctcattaaacaaatgcgtgcgctggctgaataa

SEQ ID NO: 443913 - DNA, 927 bp, Serratia marcescens
atgcaaaatcggcatcacctggagctaacatggcttgaagactgtgttgcgctggctcagtcactcaatttttcccgcgcggcggcttcccgatatgtgacacagccggcattcagccggcggattatctcgctggaagagtggctggggactccgctttttgaaagaaaccgacgcggcgtcagcctgacgcgcgccggggagatctttgtcgctcagattccggagctgattcgcgcgctctataccctgcgcagtgaagccatcgaagcggcgggtgatgccaaaccggacgttattttctccgcgacgcactcactgtcgttctccttttttccggcgctgatgcgtaacaacgagaaaattgcccgcttcggctcattccgcctgttatcagatacgctcagcgcctgtgagcggatgattgacaaaggcgacgcgcagtttctgctgtgttactaccaccctcacatgcatatcaacctcgatcagaccaaatacctcagcgtccgactcgggcatgaaacattacagccctattcaaagtgcgatcccgtcaatcgtcagccgctctggcaggctgaggacggaaaaaaatttccctttctctcgttttccgcagaatccggtctgggcaggatcctctccaacacctcgcaggtgaaccgcgccagacgtggcatggataccgccttcaccgccgatctggcggcaacgttattagctatggtcaaggccggagacggtattgcctggctgccggaaagcctggcggcaccggacgtcgcagccggcacgatcgccgtcgcggcaccacagaagagcgcattatggctcccgattgacatcaggctgttccgacccgccgcccgaatgtccagagcggtggaggagttatgggcgatcttcgtggacgaacagatttag

SEQ ID NO: 443914 - DNA, 873 bp, Serratia marcescens
atggaacagatctctatcccgctatctgcggttgaaacgataggtgcaacgctgtgggaagtcgcgcaggcaaaagccgtcgttatcctccacccggcgacggccgtggtgcagacgttttactatgattttgcccgctacctgaatgaacgcggttttaacgttatgacctacgattaccggggaaccggccgctcgcgtggcaacctccgcgagtgtaaggtttctatggcggactggatggaagaggatgtcggccgcgttaccgactgggcgacatcgcgctttcccggcatgccgctgctggccgtcggacacagcgtcggcggccacgccatcgtcttatcctccgcaacgcgcgcgttacaggcggcggtgcttatcgcctcgcacgccggcgtgacccgcaccatacaggccacggcggaaaaaatccgcgtctggtgcgtgttgcgcctgctggctccggtgctatgccgcctgtttggctatatgcccgcccggcgattgggcatcggagaagatcttcccggccccgcgatgctgcaatggagctactggagcagcctgcccggttatttttatgacgacccggcgatgaatgccggccagcgcgccgcgcgggtggatatcccgttgctggtgctggggtttgatgacgatccctgggctaatccgggggcgataacgcggctgattaccccgcttaaacatgccattattgagaggcgcagtttcaaacctgccgacgccggcgttgccgctatcggccatatggggttcttccgccagcgctgcgccaaaacgctgtggcctgttgtcggtgactggctgtcagagaacatcaccttacccggaagcgaacatgagtaa

SEQ ID NO: 443915 - DNA, 438 bp, Serratia marcescens
atgagtaaaacacaaccgccgcgcttcgttttcctgctcggccacgcacacagggcgcttcagcgctggatcgaggccaggccggaggcatgggaagatatcagttccgcccaggtcgggctgctgtttttcctgcgctccgccggcatggcaaccgttggcgaggcgtcaacggcattgcgggtggcgcctgcggccatcacccgtttatccaaacgcatgcaggcaacgggattgatcgaccgtatggttgacgagcaggattcacggaaaatgcgcctgacgctgacagacgccggggaagccgccggcctgcaggcgcacgccgcgctgcaacagttgaatacgctgttatccgcacagtttagcgaggccgaactgatggtagtagcgcgctggttaaagcaggtcagcacgttggaccccaagcctgattga

SEQ ID NO: 443916 - DNA, 780 bp, Serratia marcescens
atgaaactgactcaaatccgcaatgccacgctggtgctggaatacgccggtaaaaaattcctgattgacccgatgctcgcggaaaaggatgcctgggacggctttgccggaagcgcgcgctcgcatctgcgcaatccgatggtagccttgcccgtcgccattgaagaactgctggacgttgatgcggtgattatcacccatacccataccgaccactgggatgaggcggcgcagcagttagtgccgaaagacatactgatttatacccagaacgagagcgatgccgccctgatccgttcccaggggttcctcaacgtccgggcgcttgaaagcgaaaaccgcttcgttgacgggctgacgattttcaccaccgacggccaacacggtagcaatgatctgtatgccgatagcgttatggctgatttgctgggtgacgcatgcggcctggtatttacccatcacgatgaaaaaacgctttatattgccggcgataccatttgggtaaaaccgtatgtcagaagcctgcagcgcttccaaccggatgttgtggtgctgaataccggggatgccgttatcaatgactacggttcgatcattatgggtaaagaggatacgctgcgcacgctgcagatactgcctgaaacaaccgtcgtggcttcccatatggagtccattaaccactgcctgctgacccgcgcggagttacgcgaatatacgcttgaacacggtattgaagataaggtgctgattccggccgatggcgaaaccctggcgttctaa

SEQ ID NO: 443917 - DNA, 969 bp, Serratia marcescens
atgtctgcgctgaaagtagcggtgattgtcaccaatgggttcagtccgtttcatttttcggtgccctgtattctgtttggcacggcgatgccggaaccggatctctttcaggtagatatctgcgcggaaacgccaggtgtcgtcctatcggatattggcctgtccatcaatgtggaacatggactggagcgactcgacagcgcggatattgttatcgtgcccttctggcacgatccggatgaaaagccctcgcagttactgctggataaactggtcagcacctggcagcgtggcgctgaagtggtcggcctgtgtcttggcacttacgtgctggcctacagcggcttgcttgatcggcaccgcgcggcaacgcattgggaatatgaaagcgacttcacgcagcgcttcccggaggttcatctggacagcaactcgctgtacaccaccgatgaacgtctgattacctctgccggtacggcggccggtatcgattgctgcctcaatattgtccgtgaccattacggcaccgccattgccaaccgggtcgccagaagaatggtggtccctccataccgggagggcgggcaggcccagtttattgaacgccccattccggtaaacacccgcgacggcaaaatcaacgagcttatcgattatctgcggcgtaacctggctaagcagcacgatctcgactcgctggcccgctttgtcaatatgagcaggcgcacgctgacgcgccactttgtgaaagccaccggcatcccgctgggcgagtggctcaatgccgaacgcctgcaacgaagccaggaactgctggaaacgaccaataacagcattgaaagcgtggcggatgaggcagggtttcagtcccccgtgtctttcaggcaaagtttcaagacccggtttggcgtcagccccagtgaatggcgccgggcctttcgcggccccgctgccattgatgccggttga

SEQ ID NO: 443918 - DNA, 447 bp, Serratia marcescens
atgccgccccgtaaaccgatgaacgatgaaccctgcccggtagcgcgcggcgtcgatctgattggcgaccgctggtcgctgctgatcgttcgcgatgcctttgatggcatgcgccgcttcggggattttcagcgcagcctggggatggcgcgcaatattcttgccgaccggttacgtaagctggttgaggccggcgtactcgagatgcagggcgcgtcagatggttcggcgtatcaggaatatgtgctgacggacaggggggagagcctgtttcccgtggtggtggcgctacggcaatggggagaacggcacctgttcgcgcagggtgaacggcattcgctgctcattgataagcgtagcggcgaaccggtgccttttatggccccgacagcgcaggacggcagcgtgctggcggcaagcgaggccgaggtgcgcaagataaagtaa

SEQ ID NO: 443919 - DNA, 1239 bp, Serratia marcescens
atgaagacttctctggcatcgccgttaccctcccccccaaacgatatgcaggctcagccggtaaagatgcccggcagcctggtgtggctgttcgccgtcgccagcgggctgagcgtggcgaacgtctattacgcgcaacctttgcttgatgcgctggcgctggacttcggcatcagccatgcggccgtcggcggcgtgatcaccgccacgcagctcggctgcgccctggccctgctgttgctggtaccgctgggcgaccggctggatcgccgccgccttatcacgctacagctgtttgctctcgcggccgcgcttgtcgcggtggggttggcgcgctccgcgcccgccctgctgacgggcatgctcgccgtaggcctgctgggtaccgcgatgacgcaagggttgatcgcctatgccgcaagcgccgctgcaccgcatgagcaagggcgcgtcgtgggggcggcgcaaagcggcgtgtttatcggcctgctgctggcacgggtgtttgccggaggcatcagcgatctggcgggctggcgcggcgtctacctgtgcgccgccgtgctgatgctggcgatcgcgctgccgctttggcgaaggctgccatgccttccggccacgcagcccaagatgcgctacctaagcctgatcgtctcaatgctgacgctgctgcgggaggaaaaagtactgcaagtgcgcggcatgctggcgctgctgatgtttgccgcgttcaatatcttctggagcgcgctggtattgccgttgagcgcgccgccttacggcttctcgcacaccgccatcggcgcttttggcctggtcggcgcgattggcgcgctggctgccgtgcgagccggccactgggccgaccggggatatgcccaacgcaccagcgcggcggcgctggcggcactgctgctggcctggtggccgctgtcgctgatggcctggtcgctgggcgcactgatgatcggcatcgtactgcttgatttggggggacaggcgctgcacgtcaccaatcagagcatgattttccgcgcgcgtcctgaggcccagagccggctggtcggcctttacatgttgttctacgcgctcggcagcggcctgggcgccatcagcaccacggcgacctacgcctacgccggctggcggggcgtgtgcctgctcggcgctgcggtcagcctgctggcgctggtattctggtggctaacacgacattacgggacgaaagccaccgcataa

SEQ ID NO: 443920 - DNA, 891 bp, Serratia marcescens
atgagccatctcgaccatctgcgcacctttatcgaggcctaccggttacagtcgttctcgcgggcggccgagtccctgggcatgacgcagcctgcggcatcgctgcacattcaggcgctggaagcctttgtcggtaagccgctgtttgtacggcgcgcacgcggcgttaccgcaacggaagcggccgatgagctggcgcgggcgatcggcccgatgattgatgggttggaaaccaggatggcctcctaccgcagcggcggcgaactggggggaacggtgcatattgccgggccgtctgatttcatctattccagaatcgcggcgggactggccccgctgttgggacaagggtttcgtatccgggttcataccggcaaccgggaacgtatctacgcactgttaaataatgccacggccgatctggcgattaccgcctcgatgccggatgagcgttcacatggctttgcccggctgctgacagagcgctttctgctggtgtcggcgccagagatggctgaacagctggggccgcaccttactgcagaacagtttgccggcctcccgctgattgcgtttgacgaggatctgcctctgattcggcctgtctggaccgcgctgtttcaattggcgccaaccctgcaggcggcgttaaccattcccgatctgcgcatcattcaggatctggtgattaaagggcagggctggagcgtgctgcctgactatcagtgcgttgatgcgctggcatcgggaacgttggtgtccctcaccccggctgaagatgcgccgaccaacaatctgtatctggtgtggaataaggcatcaatgcgtaatccgcgcatcgtgcacgtacgtgattttatcctcggcctgtttggcgggggcaatgactga

SEQ ID NO: 443921 - DNA, 1200 bp, Serratia marcescens
atgccgctcatcgtctatatttttacgctcagcgcctttgcgctgggcctggctgaattcgttcctatcggcctgactgacgttattgcccaaaacctgaatgtcagcgtcgaacacgtcggccgcgcagtgacctggtatgccctgggcgcaacctttgccgcaccggtgctgaccgccttaacggccaactggtcccgcaagcggaccatgctgacgacgatgctggtcttcaccattggcagtctggccgcggcgcttgccaccagcatctcgatgatgctgattgcgcgctttattgccgggctcggacacggtctgttcctcgcggtcgcctccagcacggcagcgcgcctcgtcggcgcaaagaaagccggcagcgccgtcgcggtggtattcggcggcttcacgatagccatggcgatcggcgtccccatcagtacttatctgggcggtataaatacctggcgaccggtactcggcgcgattgccgcattcggcgccttgggttttctgggcctgctgctggggatgaaggagccacccagaaatggggaacatgcaggtagtgagtccgttgcgcaggccctgaaggctatcttccacccgaccctgttgctggctgccttggtcaccgtcctgggctatgccggttcattcacggcctacacctttatcgcgccgctgctgaccgacgtgacgcaggttagcgccgccaccgtcagcctgtttatgctggcctacggcgtgttggcggccatcggcaacgtcatcggcggcaaaataaccgaccggatgggcgtcaaccgcgccagcgtgattgttatctccgccattgccctggtcgtgctgggaatgtggctctttgcctcctcggccgtagccatgggcatactggttgccttgctgggcctgtttagcttcgcttccgtaccggccctgcaggcccgccttatcactatcgctgaacggcatgcgccgcacgcccacggcgtcgctgcaggtctgaacatcgcgggcttcaactctggcatcgccctgggctcagtgctgggcggcgtgacgatcggtaccgtcggcatcggctatacgggcgtcaccggcgccatcgtctcgacgctgggtctggcgctgctgctggccctgatcgctcgcagtcgcgccgctgactctcggaccgttgcggagataagaggctga

SEQ ID NO: 443922 - DNA, 972 bp, Serratia marcescens
atgtctgagcagcaaatttttagcgaaagttttttgatcccttctgatacccacggtattgaattgaacgttatcagaaaatgtctggataaaaaccagacctatgatgaatcaaaaaccttattgatggtacacggcgcaacgtattcgtccggcagtctgtatgatacgccggttgcgggcgcctcttttatggatcatctggcctacgcggggtttgatgtgtacgccgtagatgtgcgggggtacggtggatcgacccgcccacaggcgatgacacagccgacacgctctggcctgccgctgggtcgtacggagaccgcggtacgtgatttcacctgcgcagcgaactttctgctgaacacaagacaactgaaacaacttaatatttttggtatgtcctggggaggcactatcgctgcaacctatacaacgaaaaataacgaaaaagtgcgccgtctcggcctgcttgcgcctcaatggctcagccataaaccggttcccattgattccggggaggcgttgggagcctggcgtatcgttaatatgcatgcggcgaagcagcactggctgagcggggcgcctgccgaaaaacgtgatagcctgatccccgcaggaacctttgacgcctgggtcgagcgtaccttacctgatgaacctgacgcagaattacgtgcgcatgcctcatttaaatcaggcaatggccctattcaggatatacgggaatattggacagcaaataagccttactacgatccgaaagatatcgacgtccccgtcattctgattcacggtgaatgggatattgatgtgcccattgatttagcacaagactggttcctgagagcaaccggttcaccagaaaaaagatgggttgaaattggtgaagcgacgcacatgctgatattggaaaaaaatcggttgtcggcaatacacgccctaacggattttatttctgcgccccgtttgtga

SEQ ID NO: 443923 - DNA, 903 bp, Serratia marcescens
atgaaggtgagtaaagttatgtctgttattactacgcataaaatcggccgtgcacggataagcaaaatcccggagctggcgttggaaaacataccgggatcgtttctctatccgcaatggcaggacgagatcgcgcaagacgctgcaaaggcattgcctgacgactttttctccgatgggtttacctctctggcgcaaagtacccatagctggttattgcaggtcgacgggctaaccttgctgattgatacggcgtccggtaatgggaaatcacgacctcacaacccgctgttccatcaactggatgtgccgtatctcgcccggcttcgtgaggccggcgtggagccggagcaggtagattatgtctttaatacccacctgcatgtcgatcatgttggctggaataccgtgctgcgtgaaggacgctgggtacctacctttcctaacgcacgctatctcttttcgcagaaagagagtgtgttttatgcagatcctcaaaacgtacggcagccgagcgaattcgtttatgaagacagcgtcgccccggttatcgctgccggtgcggatatgcgtataaacagcgatgacgattttccattggcaggcttccggctccattccacgccaggacacagctatgaccacctgtcgttgagttttacgtcagaaggtgaaacggcctttttctggggagatgttatgcatcatccgctacaaatagcgctccctcagtggaattcggtgttttgtgagtttcccgaacggtctcggcattcgcgccgccaagcgctggaattcgccgtagagacgggcgcaaccgtattcaccacccatttccccggtgcctcggcagggaaaatcgaagcaaatgctgaaggcaaattacagtggttatcgttatag

SEQ ID NO: 443924 - DNA, 885 bp, Serratia marcescens
atgatgcgctcttttgtccgggtggtggattccggctcttttgtcagcgctgccgggcggctcaatatccccaaatccaccatcaccaggcatatccaggcactggagcatgagctgggcgtgaagctgcttaaccgtacttcgcgtacgttaaacctgaccgagcaggggcggatttactatcaggggacgttacggttgctggaaagcctcgacattctggatagcaacgtgcagatgtcagcaatgcaaccacgggggaaaatacgcgtagagataccgaacgccctggcctattgcctggtgataccggcgttgcccgattttctggcccgctatcccgatatccagatcgaggtcagcgtcggcaaccgaacggtcaatctgatcgaacagaatattgattgtgtcatacggattggtgagctgtataacgactcgctgattgcccgctctttaggggaactggcgcaggtcacctgcgccagccgccaatatattgagcgcaccggactgccggtgcatcctgccgacctggctctggggcatacgctggtgcagattgtttcgccccgcaccggacaaatggtggttaatgagctttatcgtgacggtcagacagaaagagtcagcgcgcagtggcagtttgcggtgaatgattccatgggcgcgcgtacagccgcgcttaatggcctgggcgtagtgacgacataccggtttctggtggaggaatatctgtcaaacgggcaaatggtcgagctgttccctgactggcacaacacgccgataccgatacatatcgcctggccggaaaatcgtcagttgccctctaaagtgcgtatttttattgagtgggccagaagcgtgtttaacgcaggcgagtga

SEQ ID NO: 443925 - DNA, 915 bp, Serratia marcescens
atggatcgtatccaggcaatgcatgtttttgtccgtgtggcggaagccgggagctttattctcgcggcggaaaccctttccctaccggcttcaacggtaagcagcacgattaaaaatcttgaaaaacatctgcaggtgcgcctgctgaacagaacaacgcggcgggtcagcctgacgagcgaaggcgcacagtatctggcgcaatgtcgggaaatactcgcgctgattgatcatacggagtccagcctgacggattcggcaaaacggccgcagggacgtttacgggttgatatgcccggaggcatcgcccatttcatcgttatgccgaatctgaaagacttttacagacgctacccggatatctacctgatgataggcgtcaacgatcggcaggtcgatctcgttcaggagggggtggattgcgtcattcggacaggagagctgaatgactccacgctcgttgcgcgcccgctcggccggtttcgctgggtgacgtgtgcctctccggcctatctcagagagcacggtactccgcagacgcctggagagttgtctcagcatcgggccatccattatttttcaggccatacccggcgcccgggggaaatgtgttttgccagcggcagtgaaaaagtgtcggttccggtcagtggcgctgttgccgttaatgagaccgggctttacatcaaaatgtgtcttgaaggatttgggctggcgcaacttgccgaacgcgtggtttcggaacatttgcaggaaggtcggctgatagaagttctggtggactggcagtctgcggccgtaccggtgaccttactttatccgcatcagcgttttctctccccggccgtgcgcgcatttgctgactggataaccgagcttgtccgcgacggccattcggcaattgagggcggatag

SEQ ID NO: 443926 - DNA, 1398 bp, Serratia marcescens
atgactgattatacccgaaatatagtgcagaccgctgactcgcaggccccccggacgctgatccgcggagccacggttctcagcatggacgacgatgtaggtaatttggttagcggcgatattcttatcgaaggcagcgccatcacggccataaatgaaaacattgatgccggcgatgccgtcgttatcgacgcccccggcatgattgccatgccgggaatggtcgatacccatcgccactcatgggaggggcagctacgccggcttaacccgaatgccgcaacgcttgaagactactgcaacgcaacgcactactcttttgccaaatactatcgcccggcagacatgtatatcggcaacctgcttaccgctctgggctgcatcgatgccggcatcaccaccgttattgataattcgcacaacagccgcaccgccgcacactccgatgctgccgtcgaggcgttgcttgacgccggtattcggtccgtacacgcttccggcgcgcccgtatccggggagtgggacaaggcccactggcccggcaatctggagcgcctgcaggaaaagtattttaaaaacgaggataacagcctggtctcgctggccgtgatggcacagctggaacctgaactgtgggcggaagcccgacgactgggcctgccgattatcaccgagtttttcggcggagatatggcggatgaactggaagaactgcaccagaaaggactgctgggacccgataacatctttaaccactgcaccgcgctaccggacgccggatggaaaatcctgcgtgaggccggcgtacgggtaaacgtatgcccgcgctcagatgcgcactatggcatcgaggacggcatgttcgccatgcagtcagcattacgtcacggcatcagcccggggctgagcgtggataacgaaacgtcctacagcggcgacatgtttatggagatgcgggtggcattctacctgcagcgcgttatgggcatgctacagcagcagtgctgcggaaacaaacaccatccggtgaccctacaggctcataacctgttgaaagccgccaccgcagacggtgctgcctgtgcaggtttgcagcacaaaatcggcagcctgacgcccggaaaacaggcggacctgatccttatccgcgctgaagacataaatctttacccgtcaggtaacgcattcggcaccgtggtgcacgcggccgaacgcagcaatattgatacggtcatgattggcgggcgcgtcgttaaacgcgacggcaaagtcttggacgtggacagcaaacgactccgtgcggcgatcgacgagtcccgccagcatctgtttgctgccgcaggctaccagcctgacatttttgctgaggccttcctgccgctcgaatcggcccgatag

SEQ ID NO: 443927 - DNA, 474 bp, Serratia marcescens
atgagtgcagtctattatctgctggccatcggcgcgggactgggcattactttgcagaccacgctgaacggtcagttggctaaaggcatcggcggggattctgtcgctgcggcgctgttttcttttaccgccggcgcgctgtgccttggcctctttgcattgatgcggggcgggatagccgcttcgttgacagcgattcctgcccagccctggtggagcctgctgggcggcctgcttggcgccagtgcgctgctgagttatgtcatacttgcccccagagtcgggctgtcagctctgctggggctccccatcgccgggcagattacctcgtcgctggccatcgatcattttggactgatggggtccgttgaacgcccggtttctcttatcaagctgtgcgggtcagtgattatgctggctggcctggccatcgccctgttcggtgaccgatggtcagcgcttttctccggctga

SEQ ID NO: 443928 - DNA, 864 bp, Serratia marcescens
atgtttaaaaccataaccggcaccacgagtcttctaggcgagtgtccagtctggtgcgaaaaaacgaatcgcctgttttggaccgacatccagggctgcgaattgtgtgctcttaacctcgaaagcggtgatattcaccgcaggccactaccggagccgctggggtcatttgcccttacggcagataaagacacgctgctgatggggctggcatcctgtctgggatactatagcctgactaccggtcatttcaccaaaatgacagacacgcccggcgtagcaggaacccggatcaatgacggccgctgcgaccgtatgggcaactttgttttcagcacgatgtccgcaggagagccagtgcaacctgtaggcaggtttcaccgagtcaacgcgacaacgcttgagacagaaacgctggctcttcctgacgtggcgatcccaaacagtatctgtttcagtccggacggcgctaccatgtactacgcggattccctgcaaggctgcattttctgctgcgattacccttcactggaaaatcagcgggtgttcacaaaaatcaacggtccaggcgcaccagatggctcttgcattgatgctgaaggttttctctggaatgcggaatggggcggtcgccgagtggtgcgttacacggatgacggaaacattgactgcgtgatcgaatcaccctgtgttcagaccacttgcccggtgttcgcggggcccaactatgcaacgctttactgcacaagcgcccaaacagggctggataaaccggcagtcagtgatggtgcgctgataaaaaccgcagcagttatttctgcgggaatgcctgaagtcaggtttgccgggttaatggcacgatga

SEQ ID NO: 443929 - DNA, 1380 bp, Serratia marcescens
atgaaaactgtaaataaaatccctttagctatggcggctatcgccgcgctgtgcccggtttccgtactggcgcaggaattcactcaggaacagattgacgccatcgttgctaaagcggtcgataaagcgctggctgaacggcaggtgaaaattgacgctgcagccgataaaaagattgatgtccttaccaacccacaaaccaccgcgtcctcaccggatttggcgattccattcggcctcaagttcagcggctacgcccgttatggcgcccacttccagagcggcgatcagaaatatgtcggcgtcgacggttcctataacggcgcctcggcgatcggccgtctgggtaacgaaagcaacggcggcgaattccagatcagcaaagctttcaaaagcgcccaaggggcgatctgggaccttaacgtgatgttcgaccactggagcgacgaagtgaacctgaaaaaagcctacgtcggcgtcactaacgtcctcgaatcaaacccgaatgcctatatctgggctggccgcgacttccaccaacgtccgcagcagggaatcaacgactacttctggatgaaccacgacggccagggggccggggtgaagaactttgatattggcggcgtactgtttgacgtggcggcggtgtcgcaggtggaatcctgcagcccggaagtgatggccgatgagacgaacccgtcacgcatcacctgcacgggcagctccgataccggcgacaacggccactacgcgctgaccaccaaaacccacggcatcaaggccgggccgatcgacgttgaagtgtacgccaactacggctttgactcgaaagcggtggatagcgacgagcggctcgatgcctggcagggcggactggtgctgagccacaccaacgacagcggggtgaacaagctcatcctgcgctactccgacaacgcggataacagcgtctacaacaaaaccgacgacctgaccacggtctacgccagcttcgagggcagccataaattcacccagcaggcgcagatcgaatatctgctggccttccatgattacgacaacggcaaggacaacaccgacaaccgtaaaaactacggcgccatcgtgcggccgatgtatttctggaacgatgtgcactccacctggctggaagctggctaccagcgcgtggattatgatcggggcggtgataacaagggctggaagctgacgctgtcgcagaacatcgccatcggcatggggccggagttccgtccgatgctgcgcttctacgtgaccggtggccaggtggataaccagcataccgccaacgtcgagggcaccagcaatgagcggctggattcgctgaatatcggcggcatgtttgaagcgtggttctaa

SEQ ID NO: 443930 - DNA, 1680 bp, Serratia marcescens
atgtcactgattcaaaaccctatcttacctggattcaatgcagacccaagtattatccgtgtagaggacacttactatatcgcaaactctacctttgagtggtttcccggcgtgcgtttacatgagtcaaaagacctggagcactggaatcttctcccgagtccattgtcaacaaccgcgcttttagatatgaaagggaatccgtcatcaggggggatttgggctccggctctctcttatgccgatggaaaattctggttggtttatacggatgtgaaagtcaccgagggtgcttttaaagacatgaccaactacctgaccaccgcaaccgatattcgtggcccatggaccgatcccatcaaacttaatggcgtcggctttgatgcttcacttttccatgacgatgatggccgtaaatatttagtacaacaaacctgggaccatcgcgagtaccgtcacccttttaatggcattacgttgaccgagtttgatgccaacacgctgaaactcaaaccagaaacggcgcgcaccatttatcgcggcactgccgttgcacttgtcgaagggccgcatctctacaaactgaacggatattattatctttttgccgcccaagggggaaccgtatttacccatcaggaagttgttgctcgttcaaaaaatctggacgccgacagttttgccaccgcgccaggggaggtgttcttaaccaacgtagatacgccagacagctacatccaaaaacaggggcacggcagtttggtatcaaccccgaaaggcgaatggtattacgcctcgctctgtgcgcgtccctggaatcatgccggtgagtctgtctatgatccccgtggttggtcaacgcttggcagggaaacgtctatccaaaaagttttttgggatgaagatggctggccacgtattgaaggcggccacggaggaaaaacgtttgtcgaagggccaagcgacgctatttacactcaaagtgcaccagatcatagtcagcaagatgagtttaatacggcgacactcgatcccaactggaatacgctccgtgtcccgttcacggaaaaaatgggtaccacaggcgatggcaaactgacgttaattgggcagggctctttagcgaatactcatgatctatcgcttattgcccggcgctggcaggcattttattttgatgcgcaggttaaagttaaattcaaaccatctaattatcagcaaatggcgggcttgacgaattactataacgatcgtcactggagctttatttttattacctggaatgaaattaacgggccagttatcgaagtcggggagaataatcgtggtaaatacacctcatacttgaaagataatgcgatcaagattccaacagatagcgaatatgtctggttccgcaccaaggtgagaaaggaaagttatacgtatgagtatagttttgatgggattaacttcacggagattccggtcaaactagatgccgcaattctttcagacgactatgtactgcaaagttatggcgggttctttaccggggcgttcgttggccttgcggtcgtagactactccggctatgccgccagcgcggaattttataacttcgaatatcaggaatttggtgatttattaatggcggatgatacgtatagctgggaggccagtgagtcacgctttaattaa

SEQ ID NO: 443931 - DNA, 1455 bp, Serratia marcescens
atgagtggaaacataatgcaaagtcggcacgatgagtaccataaactaacgcgtggagaacgcattggttatggactgggtgactttgcccaaaaccttgtttttgggacaataggcggttttcttgctcttcacatgttgacggtaaatgcaatcagcactgcagcggcagggtttatatttctttttgtcaggattattaatgtattttgggatcccatggtgggaacgtttgttgacaaaaggagttcaaaggccgggaaatatcgaccttggcttttaagggcaggcattccactcgttattctctccgctttgctttttgcgcctattcccgaagtgagtggttccgttccttttgcctttgtcgtctaccttgcactggatctgctttattcggttgttaatatcccttatggctctcttaatgcctcactaacaagggatccaggctctattgataaactgaccagtacgcgaatgatgctggccaacagcgccaatcttcttgtctataccttgtttccaatgtttgtacaaatggccgctcccaaagatcgcagcatcaaggataccggatttttcggacttgagcttgaactggggaactataccgatccatcagccagctacgcgtggtttggcgtttactccgtttatatgattgtcggggcggttgcgctttttctctgttataaattaactaaagaacgtgttgttgctacagcggaacagtctgccaatgtaaaagcgacggatttattcctcgaactcaaaaataatcggccgcttgtcattcttggcattttctttatgttggcttttacatttatgtttttcatgaacacggttaatggttttttcaatcagtttgttgtcggccattcagaatggatgggggccgttggcctcgtagcctcgattccgggtattttattcccggttttttggccgagactaaagaaagtatttggcaaaaaagggttcttccatctttttctcggcatgtttattgtcggtgagtttttgacatacatctggtcactcgatggtatgcacgatgcgctctggcttgcttatatcgctacatttattaaacagtggggtttaacgtcagctaccggtttcatgtgggcgcttgtccctgaggttatcgcttatggtgaattgaaatcaggtaagcgaaatgccgcaattattaatgccattatggggctgtttttcaagattggttttactctcggcggcgccgttccgctttggctgctggccgcttatggttttaacgaaacaggcgcacaacaggatgccaatgcgatcgccggaataaatatgaccgcgatttggatccccatcgcgttagcctttgtgtcgatgattatcattcagctatatcccatctcagataaaaacatcacggatatcaaccgtcggcttgatgaaatacggatatag

SEQ ID NO: 443932 - DNA, 294 bp, Serratia marcescens
atgatcagaaagacagcaaagaagtctttattcgattacaaaatttttttgttttcagtcctgaaaatcatcgttttcgaggtaatagatgacggcaccaaggatctcatcctctgtcgcttgctgattgtggtttctcttgttgatgacaatatccttgaagattggcgcttcaaggaaagtaccgtaactctcttcaaaatccatttcttcgtcttcgttttcagcaatgtaataactaccgttgactatatcctcttcagaggaaaggctgaatcgccacggataatctag

SEQ ID NO: 443933 - DNA, 522 bp, Serratia marcescens
atgaaggcactgattctctattcaagtcgcgatgggcagactcacgcaatcgcttcttatattgcgaacaaactgcaagaggcgatgtgctgtgatgtggtcgatctgcttcaggcggaaaacgtcgatctcaggcagtatcaacgcatcatgatcggcgcctcgattcgctacgggcatttccatcctgggttggataagtttgtaaaacgtcatgctgaacgcctgaaccaaatgccgagcgcctttttctcagtcaacctgacggcgcgcaagccagacaagcgttcaccccaaactaatccttatacccgtaagttcctgctgtcttcgccatggcaaccgacacagtgtgcggtctttgccggcgcgctgcgttatccgcgttatcgctggttcgaccgtattatgattcagttcattatgcgtatgaccgggggagaaacggatagcagtaaagaagtggagtacacggattggcgtgaggtcgagcgctttgcccaggaatttcgccagttttag

SEQ ID NO: 443934 - DNA, 615 bp, Serratia marcescens
atggaagcatacccggttcctgccgacgctatcagcgtcagtgaggagataaagaaaagccgctttattacgctgttggcaccgacttgcggtgtggaagcggctaaagcttttattcagcgggtcagagaagagcatccaacggcccggcaccactgctgggcttttgtcgccggcgcgccgggggattcgcagcagttggggttttccgacgacggcgagccttccggcacggcagggaaaccgatcctggcccagctgatgggcagcggcgtgggggagataaccgcagtggtggtacgctactacggtgggattaaattaggcaccggtggcctgggcaaggcctatggcagcggggtacagcaggcgttaaagctgctgccgttggtcagcaaagtgccgcagttggaatatactttgcaatgcgactatgcgcagctggcgttggttgagaacctgctacagcaaatggaagggcggattctgcacggcgaatacggtgcggatgtcgtgttgcatctggccttgccggcaacggaaaccgagacctttgggaataaattacgtgatctgagtcgcggtaatttgcaattaacccccatttcgcaataa

SEQ ID NO: 443935 - DNA, 1332 bp, Serratia marcescens
atggaaacgctggcttctttgtataacgaacatctgaatgaactgcaaaaccgcgcacgcgatgtgttggcgcgcaataaactggacgcgctgctgattcattccggcgagttgttgcgggtctttcaggatgaccaccactatccgttcaaggtcaacgcgcattttaaagcgtgggtgccggtgacgtcggtgccgaactgctggttatggattgatggcgttaacaaaccgaagctgtggttctattcgccggtggattattggcacagcgtcgagcctctgccgaacagcttctggacgcaatccgtcgatctgatgccgctggccaatgccggcgatattggtcagcttctgccggcacagcgcgagcgcgtcggctatctcggctatgcccagcagcgggcgcgggagttgggcattgcggaagataatatcaatccgcaggcggtgctgaactaccttgatttccatcgttcgatcaaaaccggttacgaacaggcctgcatgcgcgccgcgcagaaaacggcggtgacgggccataaggcggcgcgtgaagcttttctgtccggcatgagcgagtttgatatcaaccaggcttatctgactgcgaccggccaccgcgacactgacgtgccttacggcaatatcgtggcgctgaatgaacacgccgccgtgctgcactacaccacgctcgatcatcagccgccgtccgacatgcgcagcttcctgatcgatgccggtgcggaatataacggttatgcagcggacttgacgcgcacctatgcggcggacggcgatagcgatttcgccgccctgattaaagacctcaatgctgaacagctggcgctgatcggcacgctgaagcccggcgtgcgttataccgattaccacgtgcagatgcatcagcgtttggccagcctgctgaagaaacaccgcctggtgaatgacatcagcgaagaggcgatggttgaacaagggctgacctgcccgttcctgccgcatggtctgggccacccgttggggttgcaggtgcatgacgccgccggctttatgcaggatgaaaacggcacccatctggcggcgccggccaaatatccgttcctgcgctgtacgcgggtgctgcagccgggcatggtattgaccattgagccggggctgtattttattgagtctctgttggcgccgtggcgcagcggcgagttcgccaaacactttgcctgggagcgcattgatatgatgaaggcttacggcggcatccgtattgaagacaacgtggtgattcatgaaaaacgggtggaaaacatgacgcgcgatcttaatttggcgtga

SEQ ID NO: 443936 - DNA, 726 bp, Serratia marcescens
atggaactatttctactgagcaacggtaagctttccggggaagcggagttgctgggctacgccaaagaacaactgctggagatggttgcccgtcgtcatctcacctcagcgctgctgattccttacgcgctgatccgcagtgattatgatgagcgcgcgcaggagctgacgcagacgctgggcattcccgtcgccagcattcaccactcgtcatcgccggcggcggcggttgaacaggctgaatgcattctggtcagcggcggcaacagctggctgctgaatcagctgctgcatgaaaatggactgatcgtccctattcagcgcgcagtgcgtgagcgcaatgtgccgtacgtcggctggagcgccggctgtaatgtggcgacgccaagcattcgcaccaccaatgatatgccggtacgcaacagcgtcgtattgccgtcgttagggttgttcccgctgcagattaatccgcactatatcgatgcgcatatcagtggtcatatgggggagacgcgcgatgaacgcctggctgaattctgtgcggtcaatccgagcgaatccgtagtcgcgctgcgagagggcagtttgctgcacgtccgtgataatacactgcgttatgtcagcgcccgcagccagggctacaagctgttccgccataacacggcgacgcaggaatttcaggatacgctggcgctgcaggcgctggtgccgttcgattgccactga

SEQ ID NO: 443937 - DNA, 489 bp, Serratia marcescens
atggaatcttggtatttactctattgtaaacgcggccagctcttgcgggcacaggaacacttggaacgacaggcggtgggctgcttcagcccggttatcgcgctggaaaagattgtgcgcggcaagcgcaccacggtgaacgaaccgctgtttcccaactacctgtttgtggcgttcgatcctgagcggatccacaccacaaccatcagcgcaacccgcggcgtcagccattttgtccgcttcggttcgctgccaacgatcattccacagacggttatcgaagaactgcgcacccataccagcgacacctatgtcgacccggaaacgccgcagccgggcgataccgtgctgattaccgacggtgtgttcgagggcctgcaggctatctataccgagccagacggcgaggcgcgctccatgctgctgctcaacctgattaacaaacaggtgacgcaaagcctggataaccgccagttcgaaaagatgtaa

SEQ ID NO: 443938 - DNA, 783 bp, Serratia marcescens
atgtttgatatcggtgttaacctgaccagttcacaatttgccaaagatgctgctcaggtggttgaacgcgcccgggaagccggcgtcacggggatgctgattaccggcaccgacctgccggaaagtgaagcggccagcgcgctggcgcagcattaccgcggcttctgttggtccactgcgggcgtgcatccgcatcaggccagcggctggaacgacgatgtcgctcagcagataggcgcattggccgccagggaggaagtggtggctattggtgagtgcgggctggattttaaccgcaatttctctacgccgcaggaacaagaggcggcctttagcgcgcagctggcgctggcggcggagttggcgatgccggtgtttttacactgccgtgatgcgcacgcacgttttgtcgcattgctggagccttggctggataagctgccggccgccgttgtgcactgtttcaccggcaatgaagaggaactggcaggctgcctgtcgctgggcttatccgtcggcattaccggctgggtgtgcgatgagcgtcgcggcctggcgctgcgcgcgctgttgccgaaaattcccgttgaccggttgctgctggaaaccgacgcgccgtatttgttaccgcgggatttgcagcccaaacctgcctcgcgtcgtaatgaaccctgttttctgccccatatcgtccgtcaggtggcaacctggcgtcaggaagatgcgcaatggctggcgcaggaaaccgatcgtaacgcccgccggttattccggttggcatga

SEQ ID NO: 443939 - DNA, 519 bp, Serratia marcescens
gtgtttgacattgggtttagtgagctgctgctggtactggtgattggtctggttgtgctggggccggaacggttgccggttgcggtaagaacggttgcgggctggatccgtgctctgcgttctctggcggcatcggtgcaaaatgaactctctcaggagctgaagctgcaggaactgcaggacagcctgaagaaagcggaaagtgccggtctgcaaaatctgacgccggagctgaaggcgtcgatggacgagctgaaagaagcggccgactcgctgaagcgttcgtatcagcctggtgctgatgctgaagccaacactatccataatccacggactgacgagcctgaggcggcgcatgacgacgtcattaccgcagaggcggcgaacagcgccgcgccggccgccattgcgaaagctgtgccgccggaagcgccagcgacctcgtctgcggccaaggctcccgtcacgtctgctgcggaccacaccccggcatcccactcatctaatggcgatcgttaa

SEQ ID NO: 443940 - DNA, 264 bp, Serratia marcescens
atgggcggtattagtatttggcaattgttgatcattgcggtgatcgtggtgctgctgtttggtaccaataagctccgtacgctgggctccgatctcggcgcatcgatcaagggcttcaaaaaggcgattggcgacgacaacaacacctcgccaaccaacacgacggaaaaaaccagccacgatgctgactttgcggccaagcctatcgcggataagcagccggaagtgaaaactgaagagtcgaagaacaaagagcaggtataa

SEQ ID NO: 443941 - DNA, 609 bp, Serratia marcescens
atgctgttaaccccgctgctgaccggcgtgttggaaacgtcgctcaatagcctgctgttccgcgatcgcagcatgaaggccgcgcgtcagcgtttggccggcaaggtgctgcggattgaactgcaggagttttctgcgccgctggtgctgattttcagcgaacagcgggtcgatgtgctggggcaatccgaagatgcagccgactgcacggtgcagacgcgtattccggtgctgctgaaattgcgtgaccgtcagcagctgtcgccgttgatgcgcagcggcgagctggttgtcgaaggcgatattcaggtggtgcaacagctggtcgggctgctggatttggcggagtgggatccggcagagtggctggcgccctacatcggcgatattgccgcacagggtattacgcaggtgatgggcaaaggcgcttgtctgctgaagtccggtctgcagagccagcagcgctacgtggcggaaacgctgaccgaagagtggcgcgttgcgccggggccgctggaagtggtgtggttcaacgaagaagtggacgccgcaacccgcagtctggaagccttattggcccgcatggacaagttggagggtaagcgatga

SEQ ID NO: 443942 - DNA, 1536 bp, Serratia marcescens
gtggataccagcttggtgtacggtattggcggcgtggtcatcggcatgctgctggggtggttgatcgccaacctgaggcagcagcagaaccaggcgcatcacgaaacggaactgcgtttgctggagcagtcgctgcagcaggcgcagcaggagattgcggcgcgccaggaggcggcgcagcggcaggagcagcagctgcggcaaaacgatttggacctgcgtaatctgcacgggcagttcgccgcagcgcgggagaagctacaacagcttgaacactggcgtggcgagtgcgagcagctcaaccaggagctgcgcgcccagcgcgaggtcaacagcatgcaggaggctgaattgcgcgaggtgacgattcgcctggaagaaacgcgcatggcggccgaagagaaacagcggctgctgatcaacagcgagcagcggctgaccacccagtttgagaatctggccaaccgcatcttcgaacacagcggccgcaaggtggatgaacagaaccggcagagtctggatcggctgctgctgccgctgcgcgaacagttggacggcttccgtcgtcaggtacaggacagctttggccaggaagcgcgggagcgccacaccctgactcacgagatacgtaatctgcagcagctgaatgcgcagatggcgcgtgaggcgatcaatctgaccaaagcgctgaaaggcgataacaaaactcagggcaactggggcgaggtggtgctcagccgggtactcgaggcctccggcctgcgggaagggcatgagtatgaaacacaggtgaacgtgcggctggaccatcagagccgtatgcagcctgatgtgatcgtacgtctcccgcaggggaaagacgtggtgatcgacgccaaaatgtcgctggtggcctatgagcgatatttcaacagcgaagatgaggcggagcgcgaagccgcgctgagtgagcatatcgcctccctgcgcggacatatccggctgctgggacggaaggattaccagcaactgccggggctgcgctcgctggactacgttctgatgtttattccggtggagccggcgttcttgctggctattgaccgcgagcctgagcttatcagcgaagcgctgaagcacaatatcatgctggtcagcccgacaacgctgctggtggcgttacgtaccatcaccaacctgtggcgctatgagcaccagagccagaacgcccagcgcattgccgaccgcgcggcgcggctgtacgacaaaatgcgcctgttcgttgatgatatgtcggcgttggggcaaagtctggataaagcgcagggcagctatcggcaggcgatgaacaaactcagcgaaggccgtggtaatcttatcggtcagaccgaaggcttccgcgccttgggggttgaggtgaagcggccgataaacccgcagctggcgcagcaggccagcgagcaggatcggcaaggcgcacaggcaaccgatgacgccgccggtgcgctgccaggggcagaggcaaaagatgctaccgaccagacgtcgcagggatga

SEQ ID NO: 443943 - DNA, 783 bp, Serratia marcescens
atgaccgcccaaattctgctccacccctcgcttgcgcccctggatggcggcatcaactttcgtgatttaggcggcaacagcgctgccgacggacggcgcatcaagcgcggcctgctgtttcgttccggctcgctggaacgcctgacggaaaacgactgtacgttcctggcgggcgtcccggtgcgttcggtgctggactaccgcgataccgatgaggtgcaggccaagccggatattttatggcagggggcgcagtaccaccatttccctgccaacccgctgagcaatgaagtgaacgccaacctggaaaaactcaccagcgagacgctggcgacgtttgatgcgcgtgcttttatgctggagctgtatcgtcgtctgccgtttggtaatgcggcctatcagcagctgacgagcctgctcggcaacccggcggaaggggccattgtgcagcactgtgcggtcggcaaagaccgtaccgggatcggctctgcgttggtactgttcgcgctgggagcggatgaagcgacggtggtggaagattacctgctgacggaagccacgctggccgccttccgcgaacagatgttggatcagctgtcggtacgtctgaatgagtctgcgctggcgcagtttgcctatgtgctgagcgcccgtgaagagtttctgatgacggcgctgggctgtatccgcgaacagtacggcagcaccgaccgctggctggaggcggagtatggcctgggcgccagccagcgtgccgctctgcaggcgcactatctggagtga

SEQ ID NO: 443944 - DNA, 837 bp, Serratia marcescens
atgaaaaccgaacacgcaatgacactagaaccggtacagggaagcttcgcccctgccgccgagccgttggccgatacgacaatttacaccgacgatcagggcattcacgccggggaaaccaccattccctcgcagggcgataatctgccggcctatattgccaagccggctaaccatcagggccctttcccggtggtcctggtggtgcaggaaattttcggcgtccatcagcatattcaggatctctgccgccggctggcgaaagagggctacctggtcattgccccggagctgtacttccgccagggtgatgctaccgactacagcgagattggcgaactgctgcaaaaactggtcagcaaagtgccggacaatcaggtgctggccgatctggaccacgtcgcccactgggcgacccggcacggcggcgacgccagtaaactggccatcaccggtttctgctggggcgggcgcatcacctggctgtatgccgcgcacaacccgcagctcaaggctgcggtggcctggtacggcaaactggtgggcgagaagacgctgaattcgcccaagcatccggttgatattgccagccatctgtcgaccccggtgctggggctgtacggcgggcaggacagcggtatttcactggagagtgtggaaagcatgcgccaggcgatccgcgccgccaacgccgatgcggagatcgtagtctaccccgaagccggtcacgcctttaacgcggattaccgcccgagctataacgccgaagccgcgcaggacggctggcagcgcatgctgaactggtttgtacagcacggcgtggtcggggtgaagtaa

SEQ ID NO: 443945 - DNA, 1002 bp, Serratia marcescens
ttgattaacggcaggctgcgctatgtcgtagcgatcgtactgctgttggcattgctggcggtgctgatgctggtcggtatcgctatcggtgcgacccgtttacctgatggacagctgatggcggtattagggctgggcgatcgaccggcgtcgccgatgatcgcccggatcgtgtttgagctgcgtgtgccgcgggtgttgctggcggcgctcaccggcgcggggctggcgctggttggcgcgttgctgcagaccgccacgcgcaatgagctggcggacccgtttttatttggcctttcgtccggcgcgtcggccggggccgttgcggtgattacgcgtctgggcgaccgtctggggaactggacattacccattgcagcctttatcggcggcctggtgtccgccattgccgtcatgctgctgttgcgtttgcaacagcataaaggcgcggagcgtattgtgatcagcggcctggcgatctcttttttgttcggcgcgctgacgaattacctggtgttcaccggcgatcagcgtgcggcaagcgcgattctgttttggtcattgggcggtctggggctggcaagctggcaaaatctttggctggcggccgccgccaacctgctgctgataagctttatctgcttacgctggcggtcactggacgctttgcttggcggggaacagaccgccgtttcgctgggagtccagctgacgcggttacgcagtgaggtatttctttgctgcgcgctggcgacgtctgcattggtggcgctaaccggggtgattggcttcgtcggcctgatggtgccgcacttggcgcggccgctgtgcggcgtgcgtcatttgccattgttgccgctgagcgccgttatcggcgcactgttgctgaccgccggcgatgtgctcagccgcaccctgatggcgccgcaggagctgccgattggcgtgattaccgccgggttaggcggcgtgtttgtgctgatgattctgtttaaacgctaa

SEQ ID NO: 443946 - DNA, 954 bp, Serratia marcescens
atgagcagggcagtattgcatgcgttattgctgctggcgtggccggcgttgggtgcggcgtttccggtgacggtcgacagctgcggcgaaccgctgaccttcaacgctgcgccgcagcgggcggtaatcaacgatttaaacatggccgagatggcatttgcgctggggctgcagccgcatatcgtcgggctgaccggcatatccggctggtatcaggtcgatgccgaattcaaacgtcagcagggaacgattcccgagctggcggacaagtatccgtcactggaaacgctgttggcagccaatccggatttcttcttcgccggctggaactatggcatgaaagtcggcggcgaggttacgccgcagtcgctggcgaaatatggcattaaaaccctggtgttgagcgaaagctgcatctggactcagcggtcacggccgcgcgccagtatggcgctgctgtatgacgatatgctgaaactggggaaaatcttcggtcgtgaaacgcaggctgtccagttggttaatctgtggcgacagcggctggaaacgctgcgtcaacgtatcggccagcggccggcgcccaaggtctttgtctatgactctggtgaggataaacctttcaccagcgggaaatatgccatgccgaccgcgctgattgaggccgccggcggcaaaaacgtgatggataccttggcggccagttgggcgaccacgtcgtgggaagaagtggcgcgacagcagccggatgtgattgtgctgctggattatcaacatgggggaggcgcggcgcacttgcagcagtttcttgccgcgcatccgttaatgaaacacaccccggcagtgcgtcatcagcgttatctgcgcctgaagtatgccgagttgacgcccgggccggccaatatcgcggcgatagagaaactggcgcgcgtgctgtatccggaggtctttgattga

SEQ ID NO: 443947 - DNA, 744 bp, Serratia marcescens
ttgtccatcggcggtaaaccgctgctgtccgatatcagtctgagcctgcggcagggagagcggctggcgatcatcggccctaacggcagcggcaaaagcacgctgctgcgtattctgaccggcgagctgcagccgacgtccggtgacgtgcggtttaccggccgcgccctgtctcagcttagtcgcatgcagcgcgcccgcgcgattgcgcttctggcgcaaaatgacagcgctcatccgcaccttaccgtcgatgaatacgtctctttggggcgcttgccctatcagggagaggggagcatgcggcaacaccggcagattgtcgaacaggcgctgctggaaacccgcatgcaggcgctgaggcagcgccgctttgcccggctttccggcggcgagcgacagcgggcggcgctggcgcgcgttttcgctcaaacgccgcagctgttactgctggatgagccgaccaatcatcttgacccgctggcgcgtgccagcctgttgtcatgggtgaaacgcaaggggattacggtgattgcagtgctgcatgatttaccgctggttgcaccgtttgccgaccgggtagcggtgattgaacgcggtcgtctggtgcgctgcgatgtgccggagcgcgcgctggccgccgactgtatccgcgcggtattcgggttggacagctttgttatcccgcatccgcaaaccggccagccattacatatttttgaagcgccgccatgcgcagggtga

SEQ ID NO: 443948 - DNA, 1119 bp, Serratia marcescens
atgataaggaattcatgtttagcggcagtaccgttgttattcctttctggtgcggctgaggcgataacgctgtatgaagaaaagggcaccacgctggatttttccggttcaattcgcctgatgttcgaaaatgcgaagaaaaccgacgcggggcaaaacagcacgcatatcaaggatgagagttcgcgttttggtattggcatttcacaccaaatcgacagcgacctgcgcggtttcggttatttagagtttggcaacgatacccagtcggcggagaacaaattcaaactgggcaaccgccaggcgtatgtcggtctggcgcggcgcagtcttggcgatatcgccattggtcgcgtcctgtcgccgttcgataaggtggcgcgttcagactatacctacgaatatggcggcgtattggattttggcgataggtatattggccgttccaccggcagctccgatgacggtaaaaatgactttatcggccgcgtgtccaattctgtgcgcatgatgtccgccgagtttgccggtttcagcgccggcgcaacctacaccctgcaaaacggcgatgaggttaacgatatcaataacgcctacacgctggcggcctttttccgtcaggcgaacctgcggctggccgcaggatacggtatggcggaaggcaacggcgaacgcgcgaagaaaccccagaattatatggacagcaaggagcgggtgaaggcgatcaaagaagagatctggggcatcggcgcagagtataccctggcggatctcgatctctctctggcggttgactacgggcggttgcgcatcaaaaacgacaaccagcgctcgggagatgcgtataaaaaagtcaacgggacgccgaaggctgaactgctggggctgggagcaaactgggactggggccggggtaatctctacggcggctattaccggaaggcgggcaaccatgatgccaataactggcgggagcagcgttatgtgataggcgcagattatgaactgacgaaaaaggtcgtcacctgggtcgagctggcccatgaagatcaacgcgccgaccggtacgaaaaagtgaccgacagactgctggggctggggctgcgcatctatttctaa

SEQ ID NO: 443949 - DNA, 1137 bp, Serratia marcescens
atgaaactaccggagatcatgtttgctctgtcaggcggcgtctggcgtctgcagcgctgctggccgtcgctggacgatagtctgccgccggcggtgaagtgcatcatcgtggaggcgacgccgatgcacggcgatcgcagccgtcgtcatgcagcgctgctgagtgtcaatccgctcctgccggaggaggcgcagtggctgcgacttcatccctatggtcaggatgcggcgttgccggcgctgacggggcatttacagcacgcgctgcgggacgaccccagcgccgtggtcgtggcgcaccgcaggggaaagcgggcggtgatccgttccgtccacggctttatcaaggtgctgcggccggggaaagcgccggcgctggtgcatcgtcaggcgtgcgccgcacgctattacggcggacacgccgtgttggcggcgctgttgcagcatgacgatgcggcgttaaccaccgccccgctggcgggccggacgctggccgaactgggaaatgacccgtcgctggatgacggtgggctggccggttgctggttcgccttcggcagcatgatgcgccgctgtcaacgtgaactccctgccgactggtgtggtttgcctcagcatcgccttgaggatgagtggcgcatcgttgatgactggctgatgcgcatgatgctgtctgggcaggtgccgccggagcgcgtgctggttctgcaccagcgcagtcagcagctttgcggcgcgctggccggtgagggcgtcgtaccgctgtctctgctgcatcgtgatttgcacgacaaacaggtgttgttcacgccggacgggccggcgctgctggattttgacacgctggcgctgggcgatgcggcgctggatctgggcaacgtattggcacatctgcggttgcgggcctatcagcatgcctggtgcagcggactggagccctcgctcagttttactcgttttcgtctggcgcgacaggccttgctgaacggttgggcgccggatgaggcgtcgatggcgcgtgcgaacttatttaccgaactgagctggatccgcctgactggcgtttatcagtggcggcctgcctggcaaaaaatggctaagcatatggtgcaggctgacgaccatcaggggctgtaa

SEQ ID NO: 443950 - DNA, 1098 bp, Serratia marcescens
atgattaatctggcggatccgcaggctatccggcgtgcgttgagcgatcaggcgttaacccagatggccgggcagcccatcggctgccattacctgcgcgtcaagcccggcacttcggtgtggggagagatctcgggcgacttcggcgacggcctcggcagaggctggctctatgcccacgccgatccactgaaggcgaataaattcaggcagcgcgctgagcggtacggcctgccgctgctcgcactgggatccggagcgatcatgggcagcatggcgctcgatccggcgctgcaccgcggctggcgggtattgcgtcgccggctgtctggcgaggcgacgacaggctggtcgctgctgaaatatcgaccggggcggcggatggtgttgcgggtggaagagcggcatggcggttcttcgttggtcagagtgctggcccgctgcacgccggcttatgcagcggtggtgaggctggttcatcaggcagggttgggggcggcgttgcaacggatggacacacggcatcatatcgtcagcctgcagtggctggaaggtgaaaccgccgggagcgtgccggccgagaggctggaggagtccttgtttgctgtggcccggctgcatgcgctgcacgccgacggcctggatctgccacattatgacgcaagctggttcgcgcagacgctggcgcaggctgaacgcacgctgtgctggctgctgccggcgctgcaccatcaggtgcggcggttgacggaacgcttatcggcggccgttgcggactcgctgaaccggccgccggggttggtgcacggcgatttttccgccgaccagattgtgtggcacgcccggcgaccgccgcgtttgatcgatgtcgatcgcgccggctacgggcagccggtgatggacatcggctcgctgttggcggttgagatgctgcagggcaacttacgcagcctgcctgcgctgccttaccctgcgctgtcggcgtgggtggcgtatgcgctgcttcagcgggcggccgaaccgtatcgttatggcgatgagaactggcagggtgcactgcaggcacgcattcaacaggcgtgggcggtgctggaatga

SEQ ID NO: 443951 - DNA, 1830 bp, Serratia marcescens
atgacgtcagcgacagggcctgaggcgtacgcattcgcgtcgtcgctcggacggatggtgcgccatatgctgccttacctgcgccagcagaagaagcttgccgccggcggcgtactggcgatgttgacggaggtagtgctgcgcgttgccgagccgtggccggtgaaatatgtgattgacgcgctgtcggtttcgctgggcgctcgtctggacggcgatatggcgccggcgacgctgtggctgctgcttgtctgcggcggctgtgcgctggcgctggcgatgttgcgcgcgatggcgagctttctgaccacgctggcctttgcgctgaccggcagccgcatcgccacccggctgcgcgccgatctgtatcagcacgtgcagcgtctgagcgtacagtatcaccgcactacgccgcagggcgatctggtgcaacggctggtggcggatatcggccgtctgcaggaggtggcggtcaccgccggcctgccgctgatgggcaacatgctgaccctggtggccatgagcggcgtgatgctgtggctcaacccgccgctggccctgtgtgtcttgggctgtgctgcggcgtttgtgctcgccacccgctattccgccccgaaaatcaccgccgcagcgcggaaaacccgtaagcaggagggggcgctggcttcgctggcgcatgaaacgctgggggcgattgcggtggtgcaggcttatggcctggagtcggcgttcagccaacgttttgccggcgctaatcaaaaatcgctgactgaaggcgtgcgggcgcggcggctggccgcggcactggagcgcgccaccgatgtgctggtggcccttgccgtaggggcggtgttgtttttcggcgggctgcaggtgctgcgcagcgagatgacgccaggcgatttggtgctgtttctgacgtacatgaaaaccaccatgaaaccgttgcgcgacgtggcgaaatatagcggcaggatcgcgcgtgccgccgcctcgggcgagcgggtgatgcaggtgctgcggcagcagcccgcaatcagcgacgctgccgatgcgcggccctgttccgaaccggtgcgcggcgaactgcattttgaccatgtctggtcagactacggcggtgcgccggtgttgaagggcgttgagctgcatattcgggccggcgagcatgtcgcgctggtcggcgcatccggagccgggaagtccactctggcggcgctggtgatgcgtctgcaggatcctgcccggggtgaggtgcgtcttgacgggcggccgttgcgcggcctgatgctggcttctctgcgtgcgcaggtggcggtggtgcatcaggagccggtgctgttcgccatgagtattcgcgacaacatccgcatgggcaatttggccgcagacgatgcggccattgtcgccgccgcccggcaggccgacgccctggcctttattcaggcgctgccggccggttttgatacggtgctcggggagcgcggcgagacgctgtccggcggccagcgtcagcgtattgccattgcccgggcgctgttgcgcgatgcggcggtggtggtgctggatgaggtgacgtccgggctggacagccgggcggcgcaggcggtgctcaatagccttgaccgcttgattcgcgccagaaccacgctggtgatcacccatgactttgacgtcgcgatgcgctgtgagcgcatcatctggctggaggacggcagggtggttgagtccggacagcgggacgccttgctggcggccgatggtcgttttgctcgctggggggcagagcgcgcccgcagccactcgcagcacggaggggaaataggatga

SEQ ID NO: 443952 - DNA, 1149 bp, Serratia marcescens
atgaggattgcctatgtgtgtgcggatcccggcattgcgctgttcggcaccaaaggagccagcgttcatgtgcaggaggtcatccgcgccctgcgccgcgccgggcatcaggttaatgcgttatgcctgcggcgcggcgatgcggtacctgctgacctggcggatctgccggttgaggtgttcccgctgccgccgggggcgcagacgccccgcgaacgcgaggaggcggtgtggcgagccggccgccggatggcggaggcaattgccgttcagcgtccggaacgggtgattgaacgttattcattattcagcgccgacgtgatgctgacggccagcgagcttggcatcccctgcgcgctggaggtgaatgcgccgctgctggaggagcagcgtaaatatcgcagcctgatctattacgaccgggcgctggcgacactgcaggcggcggcgcgggcggccagcgtagtggtggcggtttcttccgccgttgccgactgggtgctgcatcatgcgccggccgccagggtgttgatattgcccaacggcgtcaataccgaacgtatcgttccgccgccgcggcgcgatgcggcaaacccgctgaccatcggctttgtcggcacgttgaagccttggcacggggtggaggtgctgctgcaggccgccgcgcaggcgggacggcctgcatggcggctatgcatcgtcggcgacggcccgcaggccgagagtctccgtagcctggccgccaggctggcgctgcaggttgactttaccggcgcggtgacgccggagtctattccagcactgttgcagcggatggacattgcggtcgcgccctataccgccgaggcggaaccctatttctccccgctcaaggtgtttgaatatgccgccgccgggctgccgatcgtggcgggcgcgcacgggcaactgacggatattctgctgcacggtgaaacggcgctgatgtttaccccgggcgacagccaggcgctcacgcgccacctgctggcattggcggatgacccggcgttgcgcgaacggttggggcaggcggcgcgccgctgggcgctgggtcaaagctggcagcgggtgacggcgcgtatgctgcaggcgatggcggccggcgtgacgccagggggacggcgatga

SEQ ID NO: 443953 - DNA, 1239 bp, Serratia marcescens
atgcaacggacaccgcgcacaggatatgtgctgaaaacctatcccaagctgtctgaaacctttatctcaacggagattctggcgcgtgaagcggcgggagaaacgctggacatcttttccctgcgcacgcctgatgaggcgttgattcatgatgcggtgcggcgagtcaaggcgccggtgtgttatccgatacggccgcaaacggcggatgcgttatgggcactgctgcgccaggcgcagcagcagctacctgtgctgaattcattgctgcccgttttattcagccagccaatggaggtggcggcgcaggcctgcgcaattgcatgccaggtgcgggcgcacaaaatcgaccatctgcatgcgcatttcgccacggtgtccgccgatacggcggcgctggcggcgcgtttggcgggggtgccgttctcggtaaccgcccatgctaaagacctgttccatcagtcggtatctcacacacatttgcggcagctgttttcccaggcgcaccatgtggtcgctatcagtgattacaacgcccgctggttggaaacgcgtctgagcgccgcggatccgcacggcggttttcggatccggcgtatctacaacgggctggatctaaaaacctttactttccaggcgcccagcgctctgccggatgcgtcgccacgttttatcgccgtagggcgtctggtgccgaaaaaaggctttgcgaccctgattgacgccgccggactgctgcgcgatcggggtgtcggctttcaagtggacattatcggcagcggcgtggagcaggctcggctgcaggcgcagattatgcgcctcggtctggcgcagcaggtggtgctgcgcggcgcgttgccgcaggagcaggtgatcccgctgttgcggcaggcgacggcgtttgccgcgccctgcgtggtggcggaagacggcaatgcggacggactgccgacggtgctgctggaggcgatggcgctgggtattccctgcatcgcgacggatgtgaccggcattcccgaggcgatccgccatgaggaaaccggtttgcaggtgcggcagcatgatgcagaggcactggcggaggcgatgctgcggctggctcgggatcgggcgttgagttgccgcctggccgatgccggccgcagtctgatcgaacgcaacttcgacgccgccgtgcaggcgcagctgctggcgcaggcgcaggcggagccgccgcccgccggggggacgcaccgatga

SEQ ID NO: 443954 - DNA, 1221 bp, Serratia marcescens
atggaatgcggtaaacctattagaattgtgctgtattcgcatgatgctgtcggtctgggacacttacggcgaaacctggcgctttcatacagcctgagccgcggtttgtacgggcctgtgaccggattattgatctcaggcaaccaccatgcaggccgtctgagtcggccggataattgggatcttctggtgctgcccggttatgaaaaactcggcggtaattaccgctcacgtcaattagttatgccgctggcggaattggcggcgctgcgcgcaaaaattatcgcttccgcactggaggcgtttgagccggatattttaattgttgataaacatcctgcaggtttacagggtgagctgttgccggcattaaagacgctgacgacaacccggctggtgcttggcctgcgggatatattggacgcgccagaaaccgcgctggcccaatggtatgccagcggcagtcatcaggcggtcagagaatattatcatcggatctggatttatagcgatccgcgcattcattccccgtttgattccggcgagttgcccgaagagttacgcgcgataagcgatttcaccggttatctcgccaaagggcggcgtacgctgggcgaacctgacgccgcgatgaaaaatcagtggggacggcagttcctgacctttgtcggcgcagggtcggacggttttcccgtcgctcaggccgccgtcagagccagggtgccggcggggtatcagcatcttgtctgcaccggccctgatatgccggcagaagacgttgcagccctgcgcctgatggtctcttcgccggccatcagcgtgacatcgtttatcgaacatgcggccacccgtatcgcctacgctgccggtctgctgaccatggggggatacaacacgctgtgcgaagcgttggcgaccgacacgccgacgctggtggtgccgcgtcgttcgccgcgcctggagcagcaaatccgggctcaggtgctggcagagtgcggcctgatcgatatgtgcccgattgaccggatcacgccggcgttcgtcggtgactggctggagcggtgcagcggacggcgcgttgtacggagcaggatagatctggatggcctgcagcatgtgccggctctggccagctcattattaaccaccaaggaaggaactgctgatgcaacggacaccgcgcacaggatatgtgctgaaaacctatcccaagctgtctga

SEQ ID NO: 443955 - DNA, 861 bp, Serratia marcescens
gtgctactgctggttattactaccattttatgggcattctcttttagcctgattggcgaatatctcgcgggtcaggtggacagttggttttcggtgctgattcgtatcggcctggcggccgtggtattcctgccgtttctgcgctggcgcaacatcaaggggcgggtgatcctgctgtatatgttggtgggagcctgccagctgggcatcatgtacctgttcagcttccgcgcctttttgtatctgacggtgccggagtttctgctgtttaccgtgctgacgccgctgtacatcacgctgatctacgatttgctcagccgccggcgcctgcgttggggttatatgttcagcgctctgctggcggtgctgggggcggcgattatccgctatcaccagctgagcgaacacttctggctggggctgctgctggtgcaggcagccaatatcagcttcgccatcggcattgtcggctataagcgcctgatggaagtgcatccgctgccgcagcataccgcgttttcctggttctatctgggggcgctggtggtggccgttgcggcctggttgctgtgggggaacccgcaacagttgccgaccaccggtctgcagtggggcattctggtctggctgggcgtggtggcgtcggggctgggctattttatgtggaactacggcgcgacgcaggtggatgccggtaccctcggcattatgaacaatatgcatgtgccggccgggctgttggttaacctggctatctggcagcagcagccgcactggccgagctttattatcggcggcgcggtgatttgcgcctcgctgtgggtacaccggcgctgggtggcggtgaaagaagcactttaa

SEQ ID NO: 443956 - DNA, 330 bp, Serratia marcescens
atgatgaaaggcaaattctggagcatggtgttcctgatgctggcgtctgcctcagcggcggcggaaaacggcgtcacgacgctgagcgggcagcagcagtttctcaatcagcgcgcgcagcaacagcagcagcaacgtatgctgaacaatcagcaattggatcagcgccgcctgcagcagcagcggcaatttgacaacaatcagcagcgcttgcggcaaatgacgccgaacggcagccaaacgctgccaaacggcaatcagccccgcaacccgttcgatcgcaccacgccggcggtgcccgtcgcgccgcggccggccggcgcgcgttaa

SEQ ID NO: 443957 - DNA, 738 bp, Serratia marcescens
atgacccaagcctggccttatcctcatatcgtcgcccatcgcggcggcggctctctggcgccggaaaatactctggcggcgatcgacgtcggcgcacgccacggccatacaatgattgagttcgacgccaagctggcgcaggacggacagatcttcctgctgcacgacgacacgctggacagaaccagcaacggctggggcgtggccggcgagctgccgtgggacaagctggcgcagctggatgccggcaactggtacagcgcggcgtttaagggagagcggctgccgctgctggccgaggtagctcagcgttgccggcagcacggcatgatggccaacattgaaattaaacccacccgcggcgcggacgaggaaaccggccgggcggtggcgcaggcggcgcgcctgctgtggcaggggcagaccgatccgctgctctcttctttctctgtggcggcgttggcggcggcgcaggcggcggtgccggagctgccgcgcggcctgctgctggaacgctggcgggatgactggcgtgcgctgaccgaacagttgggctgcgtgtcgctgcatattgcgcatcaggcattgaccgccgagcgggtgcaggcgctgaagcaggccggcctgcggattctggcgtataccgtcaaccgcccggagcgggcgcgacagctgttggattggggcgtagattgcatctgcaccgatcgtatcgatctgatcggcgcagatttttaa

SEQ ID NO: 443958 - DNA, 1074 bp, Serratia marcescens
atggcaggtttaaaactacaggcagtcaccaagtcttatgacggcaaaaataccgtcatccagccgttcgatctggacgtcgccgacggcgagttcattgtgctggtggggccgtcgggctgcggcaagtcgacgctgctgcgcatggtggccgggctggagcgtatctccagcggcgatatttacattgaccatcagcgggtcagcgagctggagccgaaagatcgcggcatcgccatggtgttccagaactatgcgctgtatccgcatatgagcgtgtacgacaatatggcctacgggctgaaaatccgcggcttcggtaaacagcatattcagcagcgggtgaacgatgcggcgcgtattctggagctggggccgttgctgcagcgcaaaccgcgcgagctgtccggcgggcagcgccagcgggtggcgatggggcgcgccatcgtacgcgagccggcggtgtttctgtttgatgagccgctgtccaatctggatgccaaactgcgggttcagatgcgtctggagctgcagcagctgcaccggcggctaaaaaccaccagtttgtatgtaacccacgatcaggtggaggcgatgacgctggcgcagcgggtgatcgtgatgaataaaggcgtggcggagcagatcggcacgccgacgcaggtgtatcagcgtccggcgtcgctgtttgtcgccagctttatcggttcgccgacgatgaatctgttgcccggcgttatcagcgttgacggcggcagcctgcagctggaggacggcttcagcctgccattgccgcaggcgcgccctgcgtggagcggccgccggctgacgctggggattcggccggagcatatcgtgctggcgcaggatgcacgcggcgcgattccgttgaccctgcagacgctggagctgttgggggccgataatctggctcacgggcagtggggcggcgcggggataatcgtgcgtctggcgcatcagcacttgccgacgccgggcagcacgttatatttacagctgccagcgcaggcgctgcacttttttgatactcaaagcggattacggatggaatga

SEQ ID NO: 443959 - DNA, 846 bp, Serratia marcescens
atgattgagaaccgacgcgggttggatattttctgccatgtgatgctgattatcggcgtgctgctgatcctgtttccgctgtatgtggcgtttgtcgccgccacgctggacgaccggcaggtgtttcaggtgccgatgagcctgatccccggcgatcatttgtgggagaacctcagtcgcatctggcgggatgggatcggcaatgttaaagcaccgttcgggctgctgctgctcaatagcctggtgatggcgctggcgatcaccattggcaaaatctcggtctcgatgctgtcggcctatgcgatcgtctatttccgcttcccgctgcgcagcctgtttttctggctgatctttctgacgctgatgctgccggtggaagtgcgtattttccccacggtgcaggtgatcgccgatctgaagctgctggacagctataccggcctgacgctgccgctgatggcgtcggccaccgccactttcctgttccgccagttctttatgacgctgccggatgaactgctggaggcggcgcgcatcgacggcgccgggccgctgcgctttttctgggatatcgtgctgccgctgtcgaaaaccaacctggcagcgctgttcgtgatcacctttatctacggctggaatcagtatctgtggccgttgctgatcgtcagcgatgccgatatgggtaccgcagtggcggggattaaaagcatgatctccacctccggcgcgccaacgcagtggaatcaggtgatggcggcgatgattctgaccttaatcccaccggtggcggtggttcttctgatgcagcgctggtttgtgcgcggtctggtagacagtgagaaataa

SEQ ID NO: 443960 - DNA, 1326 bp, Serratia marcescens
atgatcaccatgaaaaaagcggcgctgtgcgtggcgctgacgctgacgctgacgctggcggccggcgcgcaggcgcaggcggcgaccgaaattccgttctggcactcgatggaagggcagcttggtaaagaagtggattcgttggccgagcgttttaaccagacgcacagcgacgtcaagatcgtgccggtttacaaaggcaactacgaacagagcctggcggcgggcattgccgcctaccgttccggcaaggcgccggcgatcctgcaggtgtatgaggtgggcaccgccaccatgatggcgagcaaggcgattaagccggtgtatcaggtgtttaaagaggcgggtatcagcgttgatgagtcggcgttcgtgccgacggtagctggttattacaccgacagtcagagcggtcatctgctgtcgcagccgttcaacagctccaccccggtgctgtactacaacaaggatgcgtttaaacaggcggggctggatccgcagcagccgccgaaaacctggcagcagctggcggaatacagcagcaagctgcgtgcggccggcatgaagtgcggctacgccagcggctggcagggctggatccagctggaaaacttcagcgcctggcacggcgtgccgttcgccagtgagaacaacggttttggcggcgccagcgccaaactgctgttcaaccagccgctgcaggtcaaacatatccaactgctggaagcgatgaacaagaagggggatttcacctacttcggccgtaaagatgaatccaccgagaagttctacggcggcgactgcgccattaccaccgcttcctccggttcgctggcggatatcaaacactacgccaaattcaattatggcgtcggcatgatgccgtatgacgccgacagcaaaaatgcgccgcaaaacgccattatcggcggcgccagtctgtgggtgatgaatggcaaagacgccgccacctataaaggcgtggccgaattcctgcagtatctggcacagccggcgatcgccgccgaatggcaccagaaaactggctatctgccgatcactaccgcagcctacgaactgaccaggcagcaagggttttatgacaaaaacccgggcgccgatgtggcgacgcgtcagatgttgaacaagccgccgttgccgttcaccaaaggcctgcgtctgggcaatatgctgcagatccgcagcgtggtggatgaggagctggaaagcgtgtggaccggtaagaaaacgccgcagcaggcgttagacgccgcggtgcagcgcggcgatgcgcagctgcgccggtttgaggcgtctacccgctaa

SEQ ID NO: 443961 - DNA, 1188 bp, Serratia marcescens
atgaacgctgaaggacttctcgcccaacgtattatcaatgttaaaagctctgccattcgtgaattactcaaacaaagcaaaatgccgggcgtcatctcactggcgggcggcattccttccgatgcgctgttcgacttcgaggggttgagcatcgccacccggcaggcgatcgatgaacagccgaaaagcgcgttccagtatggcctgacggagggcagcccgctgctgcgcgaacgaatctgcacgctgtgtgccgaacgtggggtgcaggcgcggccggaagatgtgatggtcaccgccggctcgcagcaggcgctggatctggtgatgcgcaccgtggtgaacccgggtgacgtgtttgtggtggaaagcccgacctatctggcggcgctgcagacgctggaactggcggaagccacggtgatgtcggtctcctccgacagcgacggcatggtggtggacgaactggccgagctgctgaaaacgcagcgcatcaaaggggtatacgtggtgccgactttcggcaacccgagcggcctgacgctgagcgccgcgcgccgtgaacagctggtccggctggcggcggagcataacttcctgattattgaagatgacccctacggcgaactgcgctttaccgaagagcgcaacgccacgctgtatcaggtggcgcaacggctgctggggcataccgataacgtgatttacacctcaaccttctcgaaaatcctggcgccgggcctgcgtctgggctgggcgatcctgccgccgctgctgctgcagaaggtggcgattatcaagcaggcggcggatctgcacgccagtgcgctgtcgcagagcatcgtcgaatgttatctgggcctcggccgcctgccggcgcagatcgacaccatccgtcgtgcttaccagcaaaaaggtgagctcctggccgaactggtgcgcagcgaactgggtgaggttatcgacttcgatatgccgaaaggcggcatgttcctgtgggcgcgtttccgtcagccgttcaacgccaccgaatggctgaacgcgacgctggccaacggtgtggtgtttgtgccgggggaatatttcttcgctaaccgtccggatcgttctacgttccgtctgtcgttcgccaccgccagcgaacaggagatgcaggaagcggtggcgcgtctgcgccgttcgctgtaa

SEQ ID NO: 443962 - DNA, 771 bp, Serratia marcescens
atgagcgcgcaacctttgctgacggtcgaaggactgtcgatgcgttttggcggactgctggcggtgaataacgtcggcctgacgctcaatcagggagagattgtctcgctgattggcccgaacggcgcgggcaaaaccaccatttttaactgcctgaccggcttctaccgcccgaccagcggcacggttcgcctgcgtgagcgtcagttggcggggctgtccggccaggcgatcgcccggctgggcgtggtgcgcacctttcagcacgtgcgcctgttccgagaaatgacggtggtggaaaacctgctggtggcgcagcaccagcatttacgcagcggggtgttcgccgggctgctgaaaacgccggcctttcgccgcgccgaagccgacgcgcgtgagcgggcggcggtgtggctggagcgcgtcggcctgctggagatggccaaccgctcggcgggcaatctggcctacggccaacagcggcggctggagatcgcccgctgcatggtgacgcgccctgaactgctgatgctggatgaaccggcggcggggctgaacccgaaggagaccgccgagctggatcggctgattgtcgaactgcgcaatcagcatcaggtctcggtgctgctgattgagcatgatatgaagctggtgatggggatttccgaccggatctatgtggtgaatcagggcgcgccgttggcgcaggggacaccggagcaaattcgccataacccggatgtgatccgggcatacctgggggaagcgtaa

SEQ ID NO: 443963 - DNA, 927 bp, Serratia marcescens
atgtctgagcagtttctctatttcctgcagcaaatgttcaacggggtgacgctgggcagcacctatgccctgatcgccatcggttacaccatggtgtacggcattatcggcatgattaacttcgcccacggcgaagtgtatatgatcggcagctatgtctcgtttatcgtcatcgccgcgctgatgatgttcggcatcgacgccggctggctgctgatcggcgcggcgtttttggtgtcgatcgtgatcgccagcgcgtacggttggagcatcgagcgggtggcctataagccggtgcgttactccaaacggctgatcgcgctgatctccgccatcggcatgtcgatcttcctgcaaaactacgtcagcctgacgcagggctcgcgcgatctggcgctgccgagcctggtgaccggccgttgggtgctgggggaaagcaacggcttcgccgctaccgtcagcaccatgcagctcaccatctgggtggtcaccttcctggcgatgctggcgctgacgctgtttatccgctattcacgcatggggcgtgcctgtcgcgcctgtgcggaagatttaaaaatggccagcctgctgggcatcaacaccgatcgggtgatctcgctgaccttcgtgatcggcgcggtgatggcggcggtggccggcgtgttgctggggcagttctatggcgtgattaatccgtatatcggctttatggccgggatgaaggcctttaccgccgccgtgttgggcggcatcggcagcattccgggggcgatgatcggcggtctggtgctgggggtggctgaagcgctgacctcggcctacctgagcgccgaatataaagacgtggtgtcattcgccctgctgatcgtggtgctgttggtgatgccgaccgggattctgggccgtccggaggttgagaaggtatga

SEQ ID NO: 443964 - DNA, 393 bp, Serratia marcescens
atgaaactcactatcgaacggttaaccgcgctgtccgcacaggacctgatcgatcttggaaaaatctggccgcaccagacagcggggcagtggcaatcctggttaaccggcgaacgggcgctgtttggcgcacgctttaacgaacgcctgttaggcgcggtaaaggtctcgctggatggcgacacggcgcagctgcacgacctgctggtgcgtgaagtcacccgccgtcgcggcgtcggcctctatctggtgcaggatatgcagcgtcagctgccgcaggctgcccattggcagctctccaccgccgatctcgccgcccgtgaacgcggtgaggtggaaaactttatgcgcgcctgcggcttcagcgtgcacggcgaaatctggcaaaaatga

SEQ ID NO: 443965 - DNA, 1224 bp, Serratia marcescens
atgaaacgctgggcggctgcgctgttgctggttctgctggctttcggcgcctggttagccgggcgccatcaggcgctgtcggcgccgccggtctgggatcagcaggtttatctgtggcaacgggtctggagtacgcagcacgccccggcgctggccgccagccgcgatcttttttccagcttacgtatcctcgctctgcaactgcatccgcgcgaagggttgcgggtgatgccggtcgataccgcgctgctgaagcaggacggccgcccgctgtggctggtggcgcgtctggacggttcgcagccgcgctgggatgaggagcggttatattcccggctgctgcagctagtgcagcaataccgcgccgccgggctgtccgtggtcggtatcgagatcgatcacgacgccgccaccgcccgcctgccgcagtaccgcgatgcgctccggcgtctgcgccgacagctgccggcagacgtacagctgagcatcaccgcactgccggcctggctcgactcgccgcagctgccggccctgctgcggcaggttgacagctcggtgttgcaattacacgccgtactctccccgcagcaggggctgtttgacagccggctggcgctgcgctggacgcagcgttacgcccaggtgaccaataaacccttccgcattgctctgccggcctacggcatggggttggtcggcgttgatgcgcagggcgcgcaggtggagagcgaggcctcactgcgcgtggcgggcagcctgcgcgagctgacggtcgcgccgcagcacatcgccgactttctgcagcggctgtctgcacatccgcaaccgcatctgcggggcgtggtctggtttcgcctgccgctggccggcgaccgccgcgcctggtcgatgaataccctgcgcagggtgatccgtcagcagcctttacacagccgctggcaggtaaaaatgcgcccgcaaccacagcaaaacggcctgtatgatctgataattgccaatgatgggccagccgatgcgccgctgcccacggcggttacgctggcggccggcgactgtctggccgccgacgcggttggccgttaccggctggactcaacggccacgcagctgcgttttatccgcaccggggatgagttggtgcgcgccgggcaatcacgcccgctaggttggctgcgctgccaacatctgacgccaggaggcattcgtgttcgtgttacaccttaa

SEQ ID NO: 443966 - DNA, 2070 bp, Serratia marcescens
gtgttcgtgttacaccttaattttcgcaccgcccggccgctgacgctgagcatcgccatcgccgccacgctgggcgcgccgttggcgcaggcctgcggcccggattttcccaaccgtctgctgctcgaccgcaacggcacgctgctgtcgatgccagaaggcaatttcacctttgaaaccagccgcctgacgccgatcgacccgcaactgccgcgctggcaggcaccgccgccgccaggcccgatgaaaccgatgccgctgtcgccggaaaccgtcgccattaaacagatgcgcgctgccaaaaccgtggaagaagccgacgccgtcaacggccaggtactgtccgccgccgcacgccagtacacgctgggcgccgtcgcctttgccgcccgcgatccgcgcgctgcggactactttcagctggtgctggccctgccggatagcgagcagggagcatgggggctgcgcgcgcgctactccctcggccggctgctgatgaacgactacgggacgccggaagacgccgatacctccgccacacctcctcgtccggacccggcgcagctgcgtcaggcgctggccgcctttcagcaggttatcgaccgcgtgaaaagcggcagcgacgatccggaccaactggcgctcagcagcctcgggcagcaggcgcgcatccatttctggctgggtgatatcggccgcgccgcacacctctatgcgcagcaggcggcgcagggtgatgcgcaaggtgggcggtcgctgcaatatgtcgccagctatctggtcgatccgcagcacttcgaacagctgaaaaagatcgtggccgatccgctggtacagcagttggtgaccgtcgagctgttcgcccgcagcggcaacctgcaggcacaggataatgacagttcgcccccacgttcgcagcagattacccaacgtttgctgacgctgctggacgccgagacaaaaagcggcttcaacggcagcgaccgcctggcggcgctggcctaccgatccggtaactacccgctcgccgccagtctgctgcgccatgccggtgactccggccttgcctggtggctgcgcgccaaaatggcgctgcgcgacggcaagctgcaggacgccactgccgcctacgccaaagcggcggccgccttcccggcggatgaaagctggggcgaacagcgcgggaacaattacgcgcaggaaaccattatcccggactgccgcatcgccggcgaacaggcaattctggcgctgaaccgcggcgattatctgcaggcgctgacgctgctgtaccgcagtaaggatctgtattgggcggatgtcgccgacgtggccgagcgggtgctgacggttgacgagctgaaagcgtttgtcgataagcaggtgccgccgcccagtcagccgctcaaaccggaggagccgaacgtgtataacggccaggtgctgacgcctgatatccacctgcgccagctgctggcccggcgtctgatgcgcgctgaacgctatcaggaagcgcagaactatttcgctgtgccaaattatcgcgccgccgcccagcaactggcgcagcagttcagccttgcgcagcaaggcagcaatagcaaactggcgcgagcgcaggcctactaccagactgcaacgctgctgcgtgaacaggggctagagctgaccggctatgaaatgacgccggactacggcatatatggcgccgggtactcttatctgggcgacgccttcgacacccgtgagttgacgcacaaaagctggatcaccacggcagaggccgcgcgcgccgccaaggcattgccgccgcaggacaaccgcttcctgcactaccgctggcaggcggtagcggcggcgcaaaaggctgcggacttattgccgccgaaaagccaggcgtacggcgcggtgctgtgcaacgccgccagttgggtgatcaagcgcgatgccaaaaccggccgcgcgctgtataaacgctacctcgccaacggcaagccggatgccgccctaaataagttcggctatcagtgcccggcgccggacttcaatgcgttaaccgccaagtcctga

SEQ ID NO: 443967 - DNA, 624 bp, Serratia marcescens
atggcaagactatcgtcacggcccgcgccccgcaaagcgcaggcggccgcggccggacaaatccgcattatcggcggccagtggcgcggacgtaaattaccggtgccgaacagcgccgggctgcggcctaccaccgatcgggtgcgtgagacgctgtttaactggctggcgccggtgattcagggcgcgcgctgtctggactgttttgccggcagcggcgcgctggggctggaagcgctgtcacgctatgccggcagcgccacgctgctggaattcgaacgcccggttgcccagcagctggaaaaaaatctggcgctgcttaacggcaacggccaggtgatcaataccaatgcgctgagctggctggccaacgccggcgcagcctatgacgtcgtattcctcgatccgccgttccgcaaggggctgctggcgcaaaccgtcaacctgctggagcagcaaggctggctggccgatgaggcctgggtatacgtggaggccgaggccgaaagcgccgcggccgacgtgccggccaactgggcgctgcaccgtgaaaaggtcgccggacaggtggcctatcgtctttatattcgttccgccaaagagaaaactgaaaatgctgattaa

SEQ ID NO: 443968 - DNA, 357 bp, Serratia marcescens
atgagtaaaccaccgctgatttttatcgccgtggtggcgctgattgccgtactggcaacgcagcgttacttcagccagcgtaagcaggaggcggcgaacgaccgcgagccggtgcgcgccacgcaggttgtggtgagcgacaaacgcgcctttgcggccagcaccaaccgctcgcgccagcgtgagcatatcgtcaatgaagcgatgcgctatgaggtgacctttcagccgcagcgcggtggtgaaaatattgtggtgcggctgaagcagccgcagtatgacccgataacgcccggtgcgcacggcaccctgaagatgcagggcacgcgctttatctcttttaccgcgcagcggtaa

SEQ ID NO: 443969 - DNA, 627 bp, Serratia marcescens
atgagttggccattccttgccgtattcttttccggttggttatacgttgacgccgcctatcgcggcccgagctggcaacgctgggtgttcaaacccgtcacgctgctgctattgctgctgctcgcctggcaggcgccggtgctcggcgccgccggttatctgatcgtctttggcctgctggcaaccctggcgggcgatgccttgctgcagttgccccgccagcagatactgtacgccctcggcgcattcttccttgctcatctgttgtatgccctcagcttcgccagccagatgaccttcagcctgttctggccactgccgctggcgctgctgattatcggcgtgctgctgctggcggcgctgtggacgcggatcgccgagcagcgctgggcggtcgttgcctacgtcggcatgacgctgctgatggtctggctggccggggaacaatatttcctgcgcagcaccgactacggtttctcgttgctgaccggcacctcgttactgctgctggcaagcattgtctggctggtgagccattatcgcaccaagtttcgcgccgccgacgctatcgtcgccttctgttattttgtcggccacttcctgatcgtgcgttcgctctatctgtaa

SEQ ID NO: 443970 - DNA, 315 bp, Serratia marcescens
atggccagcagtttggttcttccttccgcgcagtcgctggcgggtgagtggcaggtcgccaagggcgacacacagtgccgggttgcgttgcgggctgacaaacagccggctgccaacggttatcagctgcaggatgcgcagcagtgtctgcagacgctgctgagcgcgccggcggccggctggcgtcccgcaccggacggtatcgcgctgctgcaggccgacggcagcacgctggcgtttttttcacgtgacggcgatatttatcgccaccgcatcggcgatgaggacggcctgacgctgaaggcgctggactga

SEQ ID NO: 443971 - DNA, 1494 bp, Serratia marcescens
atgtttatctatttgatcgttaacgatcaaataatgcgtggaatcgaaccaatgcaatcgaagaaaaaagcgatagaagtgaatgaatccagcctggcggcgaccaaaactggttatgatgccgttaatgatttactgcattatcaccaacgcggtaatgggattcaagttaatggcaaggactcattttctactgaagaggccgggttatatattacccgcactaaccaaacctggaatggaaaaggcgtatttgataccccggtaaaactgactttctcatttcccgactatcagttcaattccgccaatgacggcggcgatcgcggcttaagcaagttcagcgctgaacagcagcagcaggccaaactgtcgttgcagtcctggtctgatgtggccaatatcacttttaccgaggtgtccggcacgcagaaagccaacattaccttcggcaactacagccaggatcagtacggccagaccgactatgacacccaggcctacgcctggctgccgggctccggcagcgtctctggtcaaagctggtacaacattaaccagtccaatattcagcatccggcctctgaagattacggccgtcagacctttacccatgaaatcggtcatgccttggggctgagccaccctggcgactacaatgccggccagggcaacccttcctatcgcgacgccagctatgcggaagacagccgcatgttcagcctgatgagctactggagcgaaagcaacaccggcggcgacaacggcggccattatgccgccggcccgctgctggatgacatttcggcgatccagcacctgtacggcgccaatatgagcacccgtaccggtgatacggtatacggctttaactccaacaccgatcgcaactttttcagcaccagcagcaacgcggaaaaagtgatcttctccgtgtgggatgccggcggtaacgatacctttgacttctccggctatagcgctgaccagcgcatcaacctgaacgagacgtcattctccgacgttggcgggctgaagggcaacgtgtcgattgcggccggcgtgaccattgagaacgccatcggcggctccggcaatgacgtgctggtcggcaatcaggccgacaacgtgctgaaaggtggtgcgggcaatgacgtgttgttcggcggcggcggtgccgatgagctgtggggcggcgccggcaatgacacctttgtgttctctgccgtcggtgactccaccccggatgcgccggactggatccgtgacttccagaagggtatcgataaaatcgatctgtcatactttaacaagggcggtgatgcgattcactttgtcgaccagttcagcggtgcggcgggtgaggctctgctgacttatgatgccgccaacaatgtcagcgatttggcggtggacttcggcgggcatagtacgccggatttcctggtgaaaatcgttgggcaggcggatgtagccaccgattttatcgtctag

SEQ ID NO: 443972 - DNA, 2316 bp, Serratia marcescens
atgcatactcataaagaacatcagcaccacgaacacaaccaccatgacggcggctgcggttgcaaccacagccacgccaaaacccaacacggctgcagcagtgaaaaaccggctgacgccgcaggccacgcctgcagcgacggccaccagcatcagcacggcgcaagctgctgcgacagcggcgacccggatgaggaaagcgacaggttagccgccgctcccccagccggcagccagcgttttagttggaaggtcaacggcatggactgcccaagctgcgccaaaaaaatcgagaatgccgtcaccgccgtacccggtgtcagcaacgcacgcgtactgtttgccaccgagaaattagtggtggatgcgcagagcgatatcagccaacgcgtgcaggaggccgtcgcacaggccggctttaccctgcttggcatcggcggccagccgcagacggcgccgggcaacgaatcacgttttgcaccctactatcctttgttgctgctgacggcactgatgattctcagttgggcgctcgaccgcatcaacccgcaatggggcagcatcgcctttatcgccaccacgctggtcgggctggcgccgatcgcgcgcaaagcgctgcgtttaatccgctccggtacgccgttcgccattgaaaccctgatgagcgtcgccgccatcggcgcgctgtttatcggcgctaccgccgaagccgccatggtactgctgctgtttatggtcggcgaactgctggaatcctatgccgccaaccgggcgcgacgcggcgtcaccgcgctgatggcgctggtgccggaagaggcggtgctgctgagcggcagccagcgccggcgcgtaccggtcagcagcctgcggccgggcgatgtgattgaaatcgcccccggcgcccggctgccggccgatgccgagctgatcgacccgttcgccagctttgacgaaagtgcactgaccggcgagtccgtaccggtggaacgccagcagggagaaaaagtggcggcgggcagcctgtcggtcgatcagtcggtgcagatgaaagtggtctccgagccgggcaagaatgccatcgaccgcatcctgcagctgattgaagaggcggaagaacgccgcgcgccgattgagcgcttccttgaccgcttcagccgctactacacgccggcaatcatgctgctgtcgctggccgtcattctgttgccgccgctgctgttttcccagccatgggaaacctggatttatcgtggcctgacgctgttactgatcggttgcccgtgcgcgctggtgatttcaacgccggcggccatcacctccggcctggcggcggccacccgccgcggctcattgattaaaggcggcgccgccctggaacaattgggacaggtgcaaaccatcgcgtttgataaaaccggcaccctgaccgaaggtaaaccgacagtcaccgacgtgctgccgatcggcgcgctgagcgaacagcaactgctgacgctggcggctgcggtcgaagccggttcacatcacccgttggcgcaggcgatcgttcgccgggccgaacaatatggcacaccgctgccgctggccgacagccgtcgcgcgctggccggcgtgggcatcgaggggcagcttgacggcaaaacggtgcgcatcagcgcgccggccaaactggcgccggggctgctggacattacctggcaaacgcgtctggaacagttggaaagcgaagggaaaaccgtggtagtggcgctggaggataatcagcccgtcggcctgttggccctgcgcgatacgctgcgtagcgacgcgcgacaggcgatcgccgagctcagccaaatgggcatcagcggcgtcatgctgaccggcgacaacccgcgcgcggcggccgccatcgcccgtgagctgggtatcgactaccgcgccgggctactgccggaagataaggtcacggcggtgacggaactgagccggcaacggccgacggcgatgctcggcgacggcatcaacgatgcgccggccatgaaagccgccagcatcggtattgccatgggcagcggcaccgacgtcgcactggagaccgccgatgcggcactgacgcacaaccgcctgctgggcatcgccgagatggtgcgcatctcacgcgccacccacgccaatatccggcaaaacatcaccattgcgctggggttgaaggcaatcttcctggtcaccagcctgttgggcttcaccgggctgtggctggcggtgctggccgactccggcgccaccgcgctggtgacgctgaatgcgatccggctgttaaaaatccgtcagtga

SEQ ID NO: 443973 - DNA, 1092 bp, Serratia marcescens
atgatgaaaccctttaactataaaaacgttattttcgttcccgttgctttgttttcagcggtaacatttgcgcaacaacccacttctgaagacaccgaacgcctgattgacaacgcccagcgccccgctttttcccaaggcgcattgccggcggccagccagcaggacgtcacaccgccaacccagccggtcacaccgcaattgcaatcacagtcacaacatcacatgctgcctttctggggcgatgaagcgcgcgcccgcggttacgacctgccggaaaccttcggtatcggcattaaccatatgaatatgcggcagaatattgaggtcagcagtatcgccttctccgggttgggttgggacaccttccagatgccgggcgacctgtttaatatcaaagccgaaaacagccgcgagaaaagtaaaaccgaaacgatgcgtctcgacgcctgggtgttaccgttcctgaacgtctacggcatcgtcggccatacccgtggcagctcccactcgatcgtctccgtcgatgccgatcccagccagtacaccaatctgatggacaggatcatcgcctcagcagtgcaccaaatgaacaaaagcggtcagctgaaagatctggatttcaatctggattttaaaggcactacctacggcgccggctttacgctggccggcggttacgaaaactggttcgcgacgctggacaccaactacacccgtaccgacttcaacattctcgacgggcaaatttcggcgctcaccgtgacgccgcgcgtcggctaccgtttccagatgccgggcatcagcggcaccagccacctgaacctgtgggtcggcagcatgtatcaggacgtgcagcaagagtttaaaggcagcctgggggatctgaatatgccggccgctctgcagccgctgatcgctatcgccaaccagcgcggtgaagggcgcttccgggtcaagcaacacctgcagtcaccgtggaacgtgctggtcggcgcgcaatatgagatcacccggaacttcaacgtgatgacggaaatcggctttagcgagcgcaacagtgcgatggtttccgctgaataccgcttctga

SEQ ID NO: 443974 - DNA, 1125 bp, Serratia marcescens
atgttacgctggcttccccttctgctgttgacggtgcaaacggcggcctgcgccgtgctgcccagccggcagcagattgacgacctgctgcgcccgctgggcgcagacaaccattttgaccaccgtaagaccatcgactggggcgtactgccggggccgttctatactccggaactgggtctgggcattggcaccgccgtggtcggcatgtatcgcccggacagcagcgacagcgtcagccaaaactctacgctggcgctcaagggctttttcagttcgaccggcgcgttcggcatgggctttgaaaactacagcttctttgccaacgaccagtggcgttttttcaccaccggcagcatgaaaaatatgcccacctattactggggcaccggctatcaggccggccggcatgatagcaacaaggagaaatatacccagcagtcgctgcaggtcgcgcctgtcgtgatgtaccgcattgccgatgctacctacctgggactcggctgggatttctcctcaacccacgccgacgattcggacaacggcgaccacagcctgtttctgtcggaagcggccgggccgtcttcgatcagttccggcgtcagcgcgcatttcagttacgatacgcgggactttgtcgccaacgccagccgtggacagtacttcaacctgacctacacccatttcgcccctgaactaggcagcgacagccggttcgaaacgctggaatcgcagtacaatctgtaccatagtctgagcgccaaaagcgtactggcactcgatctctacggccgttttgccagcggcgaagtgccatgggatcgcctgtcggagctgggcaacgataaccgtatgcgtggttactatcagggacgctaccgcgatcgcaacgccttcagcgggcagatcgaataccgccgcaagctcaactggcggcacggctatgtgctgtgggccggcaccggcaccatgagccgcgacgccggcgagctgggacgggactggctgccgaccgtcggtgccggctaccgttttgagtttaaaccgcggatgaacgtacgcctcgacttcggcgtcgggcgtcagagcagcgggttctattttcaggtgggagaagctttttaa

SEQ ID NO: 443975 - DNA, 1122 bp, Serratia marcescens
atgcgttatagtgcgctgatattcatcatgtttctgaatacggcacaggccgtcgcggcgacggaaaccactatcacagcgcagccgacccgcgccacgcgcatcgcctggccggtaacgcccccgctgtccgcgccggacgggctgcggccgtgctgcgccttcggcttcgatctcaaggttcaggcgctgggcattccggtgcccttttatcagttgggtaacgtggtggacgccaatcagcttggccatcaccgctataacgacagcgccttcggcgccgtcagcaatgtgctggggctgagcagcgagcgggacggtctgctgtacacccgccgcggcgggtttatcgatatcgcccacgtacgcgacaccgccgacaacaccctgtacctcttcagccagatcctgccacggctcggccaacgctggcagctctccctgggggaggagctggcgcagcggcggattcagctcaacgcctttacgccgccgacagacgcggcacagcgctatacgctggcggcctatctggcagggaaactggcgtaccagctggccgcctggcatgaaatcgcccagtggtacggttaccagtccgtacccggtttttccgaggagatctccgccttttcgccggaagatctctattccaacctgctgggcgcgcggctggcgatcgatgcaattttacagggcggcgcggtttcggtcggcagctataaccgggcgatggaaagcctgctgcctgcggcgcttaatcagcttggcgcggtatccgccacgcagacccggcggcagctggccgctatcgacggcgactggtgggacagccaccggcgggtgccggaaaaatttttggtattgaaacgcaactatgacaccggcgacaaccgcctgccgacgccggtgccgttcgaacgcaccgcgccgcagcgcctgatgctgccgcagcagcgctacggcattccgttggatgatatcggagagttacaactctggccgggcagttccccgcgtcatctgccgccgccgtcgccctactatacggcaaaagacttcagcgccctggcgctgcacgcccgggccgaagacgcccggcagatactggaaaagcgctga

SEQ ID NO: 443976 - DNA, 666 bp, Serratia marcescens
atgtacgcttttactccgcaacagcgcaccggcgcgttgctttggctgtcgctgttccacatcctcatcattacctccagcaactatctggtgcagctgccgattaccattttcggcttccacaccacctggggcgcttttacctttccgtttatttttctcgctaccgatctgaccgtgcgcattttcggcgcgccgctggccagaaagatcattctggcggtgatggtgccggcgctgtttatctcttacgtgatttccaccgtgacgtttcagggcgaatggcaggggctggcggcgctgggtcagttcaacctgtttgttgcgcgcatcgccgtcgccagctttatggcctatgtgctcggacagatcctcgatgtgcacgtgtttaaccgcctgcgccagcgcagcgcttggtgggtcgcgcccgccgccgcgatgttcctcggcaatatcagcgatacgctgtcgttcttctttatcgccttctaccagagcagcgatccgtttatggccgcccactgggtggaaatcgccctggtggattacagtttcaaggtgatgatctgcctgctgtttttcctgccgatgtacggcgtgctgctgaacatgctgctgaaatatctcgccagccgtcatcagaacggcgcgctgcagaccagttaa

SEQ ID NO: 443977 - DNA, 432 bp, Serratia marcescens
atgttaaccacccgccctgccacgctggcacaaatccagcagatctatcagcacatccccgagtttgccgccgcacacagcctgcaggatctgcagctgcgcatcggcgacgccgcgcattacgcgctgattgccgagctggacggtcagccggtcggtttcaagctgggttatcaaaccggtgacgataccttctacagctggctgggcggcgtgctgcccgccttccgccgctgcggcgtcgccggacggttgctggaagagcaggagcgctgggcgcgcatgcagggctttacccggctgacggtgaaaacgcgcaatcaattccgcgcgatgctgacgctgctggtcagccgccactatcagattattgcgctggaaaagaagggcgaagtggctgattatcggctattactggaaaaaattttatga

SEQ ID NO: 443978 - DNA, 564 bp, Serratia marcescens
atgcgtaaagtagcaaaattaatgggtatcagcctgctggtacttggcctggcagcctgcgacggcgacaccaaagacgcgcaggcgccggccggcgacgccgccagcagcagtgcggccgcacaacaggtgaatttgctggacggtaaactggcgtttaccctgccgaccggcatgtccgaccaaagcggcaagctgggcaatcaggccaacaatatgcacgtgtatgccgacagcaccggccagcgcgcggtgatcgtcattctgggcgataagaccgccgagagcctggaaacgctggcgcagcgtctggaaaccacgcagcgcgcacgcgacgccaacctgcaggtagtgaccaataaggccatcgaggtcgacggcgttccgctgcgccagctggacagcatcctcagcagcggcggcgagaaagcctactcatctatcctgatcggcacgctggacaaccacctgctgaccattcaggtgacgctgccggcggataatcagcagcaggcgcagaccgacgcctccgcgattatcaacacgctgaagctcaagcagtaa

SEQ ID NO: 443979 - DNA, 1272 bp, Serratia marcescens
atgcaatttgatgtcgtggtgatcggcggcggactggcgggcttgagctgcgcgttgcgtctgagcgagcagggccggcgctgcgcggtggtgagcaacgggcagagcgcgctctattttgcctccggttcgctggatctgctggcgcagttgccggacggcacgccggtggcggcgccgctcgacgtgctgcctgcgttggcgcagcaggcgccgcagcacccttacagcctgataggcgcgtcgcaggtggccgcgctggcgaacgaggcgcagcagctgctgcagcgctgcggcctggcgatgcagggcgacagccggatgaaccatctgcgcgttacgccgctgggcacgcggcgggcgacctggctcagtccgcaggcggtgccgaccacgccgctggacgcgccgctgccgtggcgcagcatcgcgctgctgggcatcgaaggttttctggatttccagccgcagttggcggccagctcgctgcagcgccagcagggcgttgacgttcgtgtcggctatctgcatctgccagcgctcgaccgtctgcgcaataaccccagcgaattccgcgcggtcaatatcgcccgggtgctggatatgccggaacaacacgccgcgctggcggaggaaatccggcggctggcggacgaggcggaggccgtattcctgccggcctgcctgggactggaggatgaccgtgcgctgcaggcgctgcaacagcggctgggcaagccggtaatgctgttgccgactctgccgccttcggtgttgggtatgcgcctgcaccaggcgctgcgtcagcgtctggtgcagctgggcggcgtgctgatgcccggcgatcgcgcgctgcgcgccgagtttgacggcgggcgggtgacggcgctgtatacccgtaaccacggcgatattccgctgcgggcgccgcagctggtgttggccggcggcagtttcttcagtaacggcctgagttcggatatcaacggcatccgcgagccggtcttcgggctggatgtttacgaccgcgccgagcgcgccgactggtgtcagcgcgacctgttcgcgccgcaaccctatctgcagttcggcgtgcgcaccgacgcgcaactgcgagccgtcaggcaggggcaggcgctggataacctgtacgccatcggcgcggtgaccggcggctacgatccgctgcagcagggatgcggtgccggcgtgtcgctgttgggggcgctgcatgtcgcccgacatattgttgaacagggaggggacgcatga

SEQ ID NO: 443980 - DNA, 1041 bp, Serratia marcescens
atgacggcgtttatactcagccccgatgagtggctcacgcgtgaaacccagtttgcggcctttgccaccgggccactgctggatttctggcgtcagcgccaggaaggcgagttcagcggcgttgacgatgtgccgatccgctacgtgcgctttagcgcgccgcagcaccagcgggtggtggtgataagccccggccgcatcgaaagctatgtgaaatatccggaagtcgcctacgatctgtttcagcgcggctacgacgtgatgattatcgaccaccgcgggcaggggcgatccgggcgcctgctggcggacagccatcgcggtcacgtggtgaactttgccgattacgtcgaagactttacgcgtttttatcagcaggcggtgctgccgctgggatatcgccagcattttgccctggcgcactcgatgggcggcgcgattctggcgcagttcctcgcccggcagccgcaggcgtttgccgccgccgcgctgtgcgcgccgatgttcggcatctttttaccgatgcctgactggatggcgcaccgtatcctgaactgggcggaaaagcggccgaatgtgcgcgattactacgcggtgggcaccggacaatggcggccgttgccgtatgtggtcaacgtactgacccacagccgtgaacgctaccggcgctcggtgcgttattatgccgactacccggagctgcaggtgggcgggccgacctaccactgggtgcgggaaagtattcaggccgggcaacaggcgattgccgaggcgaaagacatcaccacgccaatcttgttattgcaggccggtgaggaacgggtggttgataaccgttcgcaccaggctttttgtcaggcactgtcagacgcgggacacccttgtgaagggggcgaaccgcgggttatccagggcgcgcgccatgagatcctgtttgagcgggacgctatgcgcgccgaagcgttgaacgcaatcctgcgtttttatgcccaacacgctttcagcggcgctgatgccgccgacaactccattagaggttga

SEQ ID NO: 443981 - DNA, 879 bp, Serratia marcescens
atgcgtattctgtcaggggccgtaatggcaacgctgctggccccggcgctggttcaggccgaagaagcgaaacaacaagaaatacatgataaaccggcggttaacggcagcattatcgccaatatgctgcagtcccacgataacccgtttacgctctacccgtacgaacctaactacatactgtatagctacaccagcgatctcaataaagaggcgatcgacagctacagctgggcgaaccatgcgcgcaaagacgaagtgaaattccagctcagcctggcgtttccgctgtggcgcggcattgttggtgaaaactcggtgctcggcgcgtcctatactcagcgttcctggtggcagctctccaacagcggtcagtcctcgccgttccgtgaaaccaactatgagccgcagattttcctcggttgggcaacggattacacctttgccggctggacattgcgcgacatcgaggtggggcttaaccaccagtcgaacggccgttcggagccgacctcgcgcagctggaaccgcgcctacgcgcgcctgatggcgcagaacggcaactggcaggtcgatgtcaaaccctggctgcgtttctctgaaagtgccagcagcgacgacaacccggatatcaccaaatatatgggctactaccgcctgaaagtcggttatacctggggcgagagcgtcttcagcgtggacggccactacaactggaataccggcttcggcggagcggagctgggctggagctatccgatcaccaagcatgtccgcttctatacccaggtattcagcggctacggtgaatcgatgattgattacaacttccggcagacacgcgtcggcgttggtgtcatgctgaacgatattatgtaa

SEQ ID NO: 443982 - DNA, 471 bp, Serratia marcescens
atgtcgaccatgcctcttacaacggaagccgctcgccagaaaattggcgaaatctttgtttatcacatgccgtttaaccgcgagctgggattggagctgcgccattttgacgacgacggcgtcgaactgacctttaccaatcagcacaaactggtaggcaacgccgcgcagaagatcctgcacggcggcgtgatcgcctcggtgctggacgtcgccgccgggttggcatgcgtcggcagcgtgctgatgcgtcaggaatcgctgattgaagaggagctggcggcgcgcctgtcgcgcatgggcaccatcgacctgcgcgtcgactatctgcgccccggccgcggcgaacatttcatcgcctccgcctcggtgctgcgcagcggcaacaaggtggccgtcgcccgcgtcgagctgcataacaacgacggcctgcatatcgctagcgccaccgccacctatctggttggctga

SEQ ID NO: 443983 - DNA, 1065 bp, Serratia marcescens
atggagaggttccccgcggtactgcaatggctgatcctgctgctggcgtcgctggcgctgggcttcgccctgctggcgttccatattcccgccgccctgttgctggggccgatgatcgttggcgtgaccatggggctgctgggcgcgtcggtacgcattcctaaaccgctgtttatcggcgcgcaggccgtgctgggctgcatgatcgcccaaagtctgtccccttccattctgacgccgctgctggccgactggccgctgattttactggtattgctggcgacgctgctggccagcgccatctccggctggtgtctggtacgctttagcgatctgcccggcccgaccggcgcctggggcgcgtcgcccggcggcgcctcggcgatggtcgccatggccggcgacttcggcgcggacgtgcgtttggtggcgtttatgcagtatctgcgcgtactgtttgtcgccacggcggcggcggtagtggcgcgtatcggtctgggggatgaagcggggcagagcagcgccgcattggtctggttcccgccgctggactggcgctttctggcgacgctggcggtggcggccgcaggcgcttggctggggccgcggctgcgtattccttcgggagcgctgctgctgccgatgattatcggtgccgcgctgcactccagcggcgcgatggcgctgcagatcccggaatggctgctggcgctggcctatacgctgattggctggagcgtggggttgcgtttcacccggccgatcctgttgctggcgatgcgtacgctgccgcagatgctggtgtccatcgccgcgctgatgctgttttgcggcctgctggcgtggatgctgacctgtttcctgccggtagacatgatgaccgcctacctggccaccagtcccggcgggctggatacggtggcgattatcgccgccggcagtcgggtggatatgtcatttgtgatggcgctgcagacgctgcggctgttcaccatcctgctgaccgggccggcgatcgcgcgttttatttccaaccacgcgacgccggcctccagctcatcgtag

SEQ ID NO: 443984 - DNA, 474 bp, Serratia marcescens
atgaaattgataacccaacaacagatgaacaccatgggcgagcaggccgcccaactgccgcgcctgcgcacccaccacctgctgcatgacgatatcaatgagccggtgcagagaatgaccattgccatggagccgggcacctatattcgcccgcaccgccacccgcaaagctgggagctgctgacgccgctgcgcggccgctttgtggtgctgcagtttgacgaccacggcgcggtgatccggcgcattatgctgggcgaagagaaccggctgctggaaatgcctgccaacgtctggcataccgtgctgtcggtcgatgccggcggggtgctgttcgaggtgaagccggggccgtatcagccgttaacggcggaagactgcatgcgctgggcgccgcccgaaggcggcgacggcattgaggcggtgttgcgctggtacgcgaccgcacaggaaggcgaccgctacccgggttga

SEQ ID NO: 443985 - DNA, 717 bp, Serratia marcescens
atgcatttttaccggccgctgcgcccgctggcggcgctgacgttcgatctggacgatacgctgtacgacaaccgcccggtgatcgttgagacggagcggcagtcggtggcctttttacaagattaccatccggggctgaaagactttcagtcggcggattttcaccgcctgcggcaggcgctgcgcgcccatgagccggaaatttaccatgacgtcacccgctggcgctggcgggccattcacctggcgctgagccggcaggggctggcggaaggcgacgcggcggaaggagctgacgccgccatgcggcactttgccgactggcgcagccgcattgaggtgccggcggccacccacgccacgctgaaggcgctgggtgcgcgttacccgctggtggcgatcaccaacggcaacgtcgatccggcgcgctgcggcctggacggttatttccgctttgtgttgcgttccgggccggacggccgcgccaagccctatcaggatatgtatcagctggccgccgaacggctggcgatcgcgcccgcgcatattttgcacgtgggcgatgacctgaccaccgacgtagcgggagcgctgcgcgccggttttcaggcctgctggatcaatgaccgccggcgcagcctgatgcaggccgccgacagccgtttgctgccacatattgaggtttcgcagttggcatcgctgacagcgttgttataa

SEQ ID NO: 443986 - DNA, 912 bp, Serratia marcescens
atgacgggcccagcggccggcctgcaaccgccggtggacgcttttctgcgctacctgaaagtggaacgccagctcagtccgctgacccagattaactactcccgccagctgcaggcgctgtgctcgttggccggcgggctgggcgtcagcgcctggtcgcagctggatgcggcgctggtgcggcaactggtggcccgcagcaagcgggcggggctgcatgccgccagcctggcgctgcgtctctccgcgctgcgcagtttcctcgactggcaggtgagccaggggcagttgcccgctaacccggcgaagggcatccgcacgccgcgcagcggccgccatttgccgaaaaatatcgacgtcgacgaagtgagccaactgctggagatcgacgtcaacgacccgctggcggtgcgcgaccgcgcgatgctggaagtgatgtacggcgccggactgcgtctggcggagctggtggggctggactgccggcacctcgatctggccgccggcgagatctgggtgatggggaaaggcagcaaggagcgcaagctgccgatcggccgcaccgccgtcacctggctggagcgctggctggcgatgcgtgatctgttcgcgccgggcgacgatgcggtatttctctccaatcagggcaagcgcatctccacgcgcaatgtgcaaaagcgctttgccgagtggggcgtcaaacagggcgtcagcagccacattcacccgcacaagctgcgccactcctttgccacccacgtgctggaatccagcggcgatctgcgcgcggtgcaggagctgctggggcatgccaacctgaccaccacacaaatctacacccacctcgactttcaacacctggccaacgtgtacgatgcggcgcatccacgcgccaaacgggggaaatcctga

SEQ ID NO: 443987 - DNA, 705 bp, Serratia marcescens
atgaaaagcgttgaggaccaggccgtcgcagccattgcgcttgatgacgacgccgtaatgcagtacctgcagcagaacccggatttctttatgcgcaatgcgcgccaggttgagcagatgcgcgtgccccacccggtgcgcggcaccgtatcgctggtggagtggcatctggcgcgacagcgcaaccatattgaccggctggaagaagagattacgctgctgatggagcaggccagcgccaatgaaaacctgtttggccggctgctgcatctgcaggccaacctggccaccgccgacagcctgcaggatatgctcaatcgcctgcagcgctgggcgcgcggcttcgggctggccggcgccaacatccgcctgttcagcgaccgctggcagatcggcgcgccgtcggactttacccacctgggcattgcgcgctcggcatttgaaccgctgcgcattcagcgcctgggggatgaccaccactttctcggcagcctgaacggcccggaactgctgctgctgttgccgcaggccaaacaggtcggctcggtggcgctgtcgctgctgggcgaggacggcgatttgggcatggtgatcttcagcagccgcgacacgcagcactatcagccgggtatgggcaccgtaatgctggcccagctggcgcgcatgctgccggaactgctggaacgctggatcgaacgcgcatga

SEQ ID NO: 443988 - DNA, 207 bp, Serratia marcescens
atgcaaatgaaaaaacaactacgctatgcgctgctggcggttctggtcgccggtctctctggttgcggtctgaaaggcccgctgtacttccctgatgatgcgaaaggcgagaagacggcgcagccggtacaaaccggcgatcaggtgcagaaaaatcagcaggaagccgccggctctcagcaaaaaccgtcgatgagcgccgaataa

SEQ ID NO: 443989 - DNA, 321 bp, Serratia marcescens
atgaacgacagtgagtttcaccagttggccgaccagctgatgcaggatattgagcaaacgctggataattttgacggcgatgcggacatcgattacgaaaccaacgccggcgtgatgacgctgactttcgagaacggcagtaagatcgtcatcaaccgtcaggagccgctgcatcaggtctggctggcgaccaaatccggcggctatcacttcgactaccgcgacggcacctggctatgcgaccgcagcggctggtcattctcccaactgttgagcgaggcggcgacgcagcaggccggcgagacgatcgaattcgcctga

SEQ ID NO: 443990 - DNA, 741 bp, Serratia marcescens
atgacgattttggtaacccgcccttccccctccggggagcaactggtcagccggctgcgcgcgctcggccgggttgcctatcatgccccgctgattgatttcgcccccggtgccgatttgccgcggctggcgtcggcgctgcacaacctaagcgccggcgatttggtgttcgtcctgtcgcagcacgcggtgaattacgccgactcggtgatcgggcgcacgggcatcgcctggccggcccagcccgcctattacgccatcgggcgcaccaccgcgctggcgctgcaccgcatcaccagcctgccggtggactatccgcacgagcgcgaaatcagcgaaacgctactattattacccgcgctgcaaaaactgacgggcaagcaggcgctgatcctgcgcggcaacggcggacgcgagctgctcggcgatacgctgcgcgagcgcggcgccaatgtcagctattatgaatgttaccagcgcagtcccgtccattatgacggcgcggaacagagcgcccactggcaacgcgtgggcattgatacgctggtggtcaccagcggtgaaatgttacaacagttgtatactttagttcctgattactaccgttctttatggctgctgcgttgccgcctggtagtggtcagcgaacgtctggctaccctggcccgggaactgggctggagcagcattcgggtagctgaaaatgccgataatgacgcgctgctacgcgcgctacaataa

SEQ ID NO: 443991 - DNA, 1128 bp, Serratia marcescens
atgacggaacaaaataccccatccgcaccggttgaagagaacaaccaggcggttgagagtccccaacagccagagaccggcagccgtaaaagtaaaaacagcggcccggtgctcggcgcgatcgccatcgtgctggttattgcgctggccgccggcggttactaccacacacaccgacaggcacagcagctgattgcggcaaaccagtccctgcagcaacagctggcggatctgaagcagagccagcaacaggagaagagcgcgctggaagggttgctgcagcagcagggtaaaaccctcgacgccgctgaccgcgagcagacctcgctggcgcgtcagctcagcgaactgcaggaaaaagtcgccaccatttccggcagcgacgccaaaacctggctgttggcgcaggctgacttcctggtcaaaatggccggccgcaagctgtggagcgatcaggacgtcaccaccgccgccaccctgctgaaaagcgccgatgccagcctggcggatatgaacgatcccagcctgatgaacgtgcgtcgcgccattaccgaagatatcagcgggctgtccaccctgtcccaggtcgattttgacggcatcattctgaaggtgaaccagctgtctaaccaggtcgacaacctgcgcctggcggataacgacagcgacgaagcgccgatggatgaagacagcagcgaactgtccgcctcgctgagcgaatggcgacagaacctgaccaagtcctggcataactttatggccaacttcattaccatccgccgccgcgacaccggcgcagagccgctgctggcgccgaatcaggacatctacctgcgcgaaaatatccgctcccgcctgctggtcgccgcccaggcggtgccgcgccatcagaacgaagtgtataagcagtcgctggaaaccatctctacctgggtgcgcgcctatttcgataccagcgatccggccaccaaagccttcctagaagagcttgacgccctgagccagcagtccgtatcgatggacgtgccggatcagctgaagagccagccgctgctggaaaaactgatgcagacccgggtacgaaatctgctggcgcaaggcgctgccgccactcaccaggagggataa

SEQ ID NO: 443992 - DNA, 555 bp, Serratia marcescens
atggaccactatatcgaactccgcgtactgcccgatccggaattcagcgcgccgatgctgttggaggcgctgtttgccaagctgcaccgggcgttgggtgcggttggcaaggggcgtatcggcgtcagttttcccgatgcaggcaaaacgttgggggaacggctgcggctgcacggttcgctggcggaattgaccgagctggagcagcacggctggcgtaaaggcctgcgtgattacaccgaaagcagcgcgatattgccggtgccggcaggggcggcgtatcgcacggtgcgtcgcgtgcaggtgaaaagcagcgcagagcggctacagcgccgttcggtcgccaaaggctggctgacgatggagcaggcgcaggaacgtattccggcggcgaaagcgcagcgcagcacgctgccgtttatccgcctgaaaagcctctccaacggccagtcttttttattgtttatcgaacagggcatgttgcgcagtacgccgaccgccggtgagttcagcgcttatggcctgagtgctatcgccaccgttccctggttctga

SEQ ID NO: 443993 - DNA, 1002 bp, Serratia marcescens
atggctaaagcaacgattaaaacggcatccgtactggcttttgaacgtaaactggcgaactccgacgccatgatgtacgccggcctgtggcaacaggacacgtggcagccggtgaagattcaggaaaaggcggtgcgcggtaccatctccaaccgtttgaagaatgcgctgaccagcgatccggccaagctggacgccgagattcaaaaagccaacctgcagcgggtagacgtggctgcgttgccgttcgatgctgatacgctgaaggtcagctttaccctgcgggtgatgggcaacctggcgacgccgtcggtgtgtaacgatcaggattatcaggccgcgctggcgcagattatcaacggctatattacggaacacggccttgccgtattggcggcgcgctatgcggaaaacctggccaacggtcgcttcttgtggcgcaaccgggttggtgccgaggcgattaaagtctgcgtcagcagcaacgagcagcgctgggagtttaacggtgaagattacagcctgcgtgccttcagccagccggacggcgcgctggctgagctggcacaggcgatcgaacgtggtctgtcgggcgacagctttgccttcttccgtgtagatgcctatgtgcggctggggcaggggcaggaagtgttcccgtcgcaggagctggtgttggacagcaacagcaagaaaagcaaaatcctctatcaggtcaatgaggttgctgcgctgcacttacagaaggtgggcaacgccttgcgcactatcgatacctggtatccagatgccgttgaattaggtctggggccgattgccgtggagccttacggttcggtcaccagccgcggcaaggcctaccgtcagccgaagcagaaaatggatttctataccctgctggataactgggtgaccaaagggcaggtgccggaggtggagcagcagcattacgtgatggcgattctggtgcgcggcggcgtgttcggcgagaagggcgaataa

SEQ ID NO: 443994 - DNA, 930 bp, Serratia marcescens
atgagttcgttaattgttttgcgccatgttcgcgtggagaacgccaacgctattgcggggctgacctatggctttccggccatcagccactttctcggttttacccatgcgctgtcgcgcaggctgcagcacagccgaggcctgacgctggataactgcggtgtggtgtgccaccagcagcagttgcaggcgtactcctccggttacgacagggtgttcgctctgacgcgcaatccgttaaccaaagaggctaaaacggcggcgttcaatgaagaagggcgcatgcatatcaccgtatcgctggtggtggagtgcaacggcgtcatcgacggcggggaagccggtgcgcaggcgctggcagatgagttggcccgcctgagtctgagccagcgtctggccggcggcaccattgtcgatatcggtaacgtcagcgtgatggcatatcccgccacgccggcagcgctgcgacgtattacccgccggctgctgccgggcttcgcgctgctggatcgttccgaactgctgtacgaccactatcagacgctgcatgcaagtaatccgcaggtggagatgctggacgcctggctggatttcgccgcgctgaaacagcaggcagaaggcgacgagcagagcgaacacgttgagtggcgctacctgccgaagccggctgccggctatctggtgccgttgcacaccggctaccgggcgatttctccgctgtacgcgccggacgaggttaaaaacacccgggatgcggccacgccgttccgttttgccgaagcgctgtatggcgtcggcgaatggcgcagcctgcaccgcattagcgacctgccgcagatgttatggcaataccaccatcaagatgactgctacctgtgccgcggcgtgatgtcggcgcaggaagagtacgcagaatttaatgaagaataa

SEQ ID NO: 443995 - DNA, 1350 bp, Serratia marcescens
atggaacacgatgggttagtgcaatcaattattgcctatgtcgatagccgaaggcagccaaagctggaagccttcgataaagacacggagaaaaagctggccgggttaagcgatgcgctggagattgccgccgtcaggcagagggcggcagagcagcggcgtgagctggagcagcgttatgaggtgcgtaactggctgacggatgcggcgaaccgcgccgggcagatcggtctggtgacccatgcgctgaagtttacccacagcgatgccaaaggcagtagcatttttgcggtgcaggaggatgaagacgcccgctacctgaccaccgcaacgttgcgccagccggcgatcgacgcggttggtaacgctgcagctctggacgtcgccaagctgctgcaaatggaacatcggggcgacacgctgatcgcccagcttaaccgtggcgatgagagtgcgctggcagcgctggcggaggatgaacagcagttaaaccagtgggtcagcggctttaaacaggttctgatcaacaagcagcctgcctcccatgcgctggcaaaacagctctattttccgatcggcgataaccaatatcacctgctgagtccattgttttcctcctcgttggcgcaggcgctgcatcagcgtctggcgcaggcgcgttttagcgaacaggcgaaggcgatttccgccgcggtccgggcgggaaaatggcacgcggaaacgcgcgtgatgtaccccaatctggcagtgcaaagcatgggcggcaccaaaccgcagaatatttcctaccttaacagcacgcgcggcggccgtaactggctgctgaactgtgccgcaccgcagtggctcacgcagtccaagccgccgttaaaacacacctctattttttaccgtagcagcgagttcagcgcgatagcgcgcgatgcggtgcgacagctgcgtgcctacctgcttagtgtccagcccagggacagcacaatggagatccgccagcggcgcgcggccggcgtcgatgaagtgattgatatgttgttcagctacgccgccggcctccagaacctggaagcgcaggccggctggagcgcggaggcagagtgtcgcctgaagcgatcccagcagctgtggttggatccgctgagagggcgcgtcgatccggatttccgcgccgaacgcgaagccggcgactggcagcgggagatcgcgctggacttcggcgtatggcttaacagacagctggagcatgaacagatgctgtttagcgaagtggaacgcagggaatggtcaacggcgccgctgtttaagcagcgcctgcgtgagtttgaggcggagtgggcggaggcggcgctatga

SEQ ID NO: 443996 - DNA, 3246 bp, Serratia marcescens
atgaatatcatgctggtggcgcagtgcagcaaacgggcgctggtggaaacgcggcgtattctcgaccagttcgccgaacgccgcggcgagcgtacctggcaaacggcgattacgctggaggggctgaataccttgcgccgtctgctgcgtaaaaccgcgcggcgcaatacggcggtggcctgccactggattaaaggcgccaaccaaaccgagttattgtggattgtcggcaacccgcgctgttttaaccgacagggcgcggtgccgaccaacgtcacgcagcgcgatattctgcgccagcaggatgaagatcagtggcgcagcgcggaatgcatcagcctgctggccgacatcgccggtctgttccacgacttcggcaaggccaacgccctgttccagcaggggttgcgtgggcaggccaagggctatcagccttaccgtcatgaatgggtgtcgctacggctgttttgcgcttgggtgggcgagcgcagcgatcgggagtggttggcggcgctgagtgagatcgacgcagatgatgatgcgcgtatgttggctgcgctggtggacgatgatgtgtcgccctctgcttccgtttttgccgcgttgccgccgttggctaccaccgtggcctggctgattgtttcccaccaccgtttgccgacctaccttggtgctgaccatgcgccggatccgacgcagatggacacctggcttacgcgacaactggatgcgatgtggaacgtccctcctcatcagcttgccgactggagccgggaggagaggaaagcggtatggacatttcccgacggcacgccgatccgcagccggcactggcgtgccaaggcgcataaatttgcccggcgcgccctgttgcagccggcgttattacagtttggcgtgctgcaacagcgttttaccagccatatggcccgcctgacgctgatgctggcagaccaccactattcatcattaccgaccaccaccgctgcctggcaggatgaaggctatcacgcctatgccaatagcgatcggcagagcggtcggttaaagcaaaagctggatgaacacaccatcggcgtcggacagaacgcgctgctgttggggcgcagtctaccgaagatccgccggacactgccggcgataacccgtcataaaggttttcagcgccgcagcacgcaggagcgcttccgctggcaggataaggcattcgacgtggccgctgcattacgggagcgcagcgtgcggcagggattttttgggatcaacatggcctcgaccggctgcggaaaaacctttgccaatgcgcgcatcatgtatgccctggctgacgaggcgctgggctgccggttctcggtggcgcttgggctgcgcaccctgaccttgcagaccggcgatgcgttgcgggataaattgcatctgcaggatgatgatctggcggtgctgattggttccgcggcggttagccagctccatcagctgcggcagaaagaagccgcgccgggcggcagcgcctcgactgaagcgctgctggcggagcatcactatgttagttatgagggcagcctggacgacgggcggctgagccgttggctgcaggagcgttcgccgttaaataaattgcttagcgcgccggtgctggtgaccaccatcgatcatctgatcggcgcgacggagggcgtgcgaggcgggcaacagatcgccccgatgctgcgactattgaccgccgatctggtgttggatgaaccggatgattttgatcttaacgatctgccggcgctgtgccgcttggtcaactgggccggcatgctgggcagccgggtgctgctctcttccgccaccttgccgccggcgctgattgaggcgctgtttaacgcctattgcgccggccgacaggattaccagcaggtgtgcggccagcccgacacgccgctgaacatatgttgcgcctggttcgatgaacatgaagccaggcagcaggacatcgccgatgccgctggttttaagcaggcgcacggtgcttttgtcgaacgccgcgtgaagcggctgggcagcacgcaagtgctgcgccagatggcgctgattcccattgatgcctccagccagcgcaagggcgacgtgctggacagcgtggcgacgacattttcaacggcgatgcaccgccttcatcacgatcatcatcaatgccatccgtccggacaacgggtatcgctgggggttgtacgcatggcgaatatcgatccgctggtagcggtggcccggcgtctgatgaatacgccgtcgccggcggatacgcgggtgcactactgcgtttaccacagccagcacccgctgatgatgcgttcgcatatcgagcagcgtctggaccagacgctgacgcgttacgatccgcaggggctgtggcagatcccggaaattgagcaggcgctgcgccgttaccctgaaaaaaatcagctgtttgtggtgctggcgacctcggtggccgaagtcgggcgcgatcatgactatgactgggcgctggccgaacccagctcgatgcgttcactgattcagctggcggggcgcattcagcgccaccggcggcagccctgtgagacggcgaatttatgggtgctccggcaaaatatcagggcgctgtgcggggcggaacccgcctacacgcgaccgggttttgagtccgccgcctttacgctgaaccgtcacgatcttagcgacatcttgcggcccgaacagtatcaggccatcagcgccgttccgcgcatccaacagcgtagatcgctgtcttataaagagaactttgtcgatctggagcactacagtctgcgggtcaaactgcaggggctgaaagggcaaaaaacctattacgctgcgcagtggtggcgggagcaggcaacctggagcggtgaacagcagcggctgacgccgttccgtcattccgcgcccgacaaacgtcactacctgtggatagcggaagagggagatacgccgtgctttaagtttcccgatctgcagccaggacaatggcgtgagagcgccggattccgcgaagcgtcgctggacttggccgacggcgtcagcgcgtggtttgaactgaactatctcgatgtgtatcagcggctggcggagcagttgaacaaggaactgagtgatatcagtcagctgtttggcgaagtgtgtttgcgtcgagaggagggggatgcgtcatggcattaccacccgctgttgggagtgtttggcgcactggaataa

SEQ ID NO: 443997 - DNA, 981 bp, Serratia marcescens
gtgggcaatattatttcgccgtcagaattaaaaaccattctgcactccaaacgtgccaatttatattatctgcaatattgtcgggtgctggtaaacggcggccgggtagaatatgtcacggatgaaggacggcagtcgttgtattggaatattcctatcgccaacaccacggtggtgatgctgggcaccggcacgtcggtcacgcaagcggcgatgcgtgaattcgccaaggccggcgtgctggttggcttttgcggcggtggcggcacgccactgtacgcagccaatgaggtcgaggtcgacgtttcctggttaacctcacagagcgaataccgtcctactgaatatttacagcactgggtgagtttctggtttgacgaacaataccgtctggcggcggccgtcgcttttcagcgtgtacgcattgcgaaaataaaacagcactggctgagccccgccatgcagcgggaaagtgggtttaatttatcccaggagcggctgctgcaattattatcccgttatgaaaatagccttgcagattgccgcaacggcaccgatttattaacgcaggaagcggtgatgaccaaggcgttatataaattagcggcgcaggcggtaagctacggcgattttacccgcgccaaacgcggtggcggggcggatgtcgccaatcgttttctcgaccacggcaattacctggcttacgggctggcggcggtggccacctgggtgatcggtttaccccacgggctggcggtgctgcatggcaaaacccggcgcggtgggctggtgtttgatgtggccgatctgattaaagacgcactgatcctgccgcaggcgtttatcgccgccatggaaggggaagatgaacagacgtttcgccaacgttgcctgaatggcttccaaaaggcgcaggcgttggacgtcatgattgacgccctgcaggatacggcacttcaactgagtcaggtggcgcgatga

SEQ ID NO: 443998 - DNA, 294 bp, Serratia marcescens
atggcggaaaccaccacctggcacctgtatatgctgcgtctgccaagcggcatgctgtataccggcatcaccaccgacgtggcacggcggctggcgcagcatcaggcgggcaaaggcgccaaggcgctgcgcggcaaaggcgagctgcagttggcctttcactgcgcggtcggcgaccgttcgctggcgctgcggctggaataccgcatcaagcagctgagcaaggtgcaaaaagagaggctggtatcacacccgcctctgtctttggactatctgctggttaaaaacggttaa

SEQ ID NO: 443999 - DNA, 504 bp, Serratia marcescens
atgctgattcgcgtagagattccggtagacgccgcgggcatcgatgccctgctgcgcagtgccttcgggcgtgatgatgaggccgatctggtgcgccagctgcgcgaagacggcctgctgacgctgggcgtggtcgccaccgatgacgaaggcggcgtggtgggctatgccgccttcagcccggtcgacgttgagggcgaggatcgccagtgggtcggcttggcgccgctggcggtggaagagcgcctgcgccgtcaggggctgggggagaagctggtttacgaagggctggatgcgctgaacgagttcagctatgccgccgtggtggtgctgggtgagccggcgtattactcacgctttggctttaagccggcggcggagttcgggctgagctgccgctggccgggctgcgagcaggcgtttcaggtttacccgctggcgcaagacgcgctggacggcgtaaacggcgcagtggagtacgccgcgccgtttaaccgtttttaa

SEQ ID NO: 444000 - DNA, 540 bp, Serratia marcescens
atgaaggagtggatgaccgtgttggaaaaactacgatcgcgcattgtgcgccaagggccgtcgctgctgcgcgtgccgctcaaactcacccctttcgccctgcagcgtcaactgctggagcaggtgctgggttggcagttccgtcaggcgctcgcggatggcgatctggaatttcttgaatcacggtggctgaagatcgaagtacgcgatctggcgctacaatggtttatgacggtagaaaacgatcggctggtggttcgccagcatgcacaggccgacgtcagcttcagcggcgacgccaacgatctgatcctgatcgcggcgcgcaagcaggatcctgacacgctgtttttccagcgtcggctacagattgaaggggataccgaattgggcctgtatgtaaaaaatctgatggatgcgattgaactggaagccatgccggcgccgctgcgcattggtttgctgcagctggcggagtttgttgaagcaggtttacaagagggcgcagaaccgtcttcccgagtggtggcgccatgctga

SEQ ID NO: 444001 - DNA, 996 bp, Serratia marcescens
atggagctgctttgtcccgccggaaatttaccggcgctgaaggccgcggtcgataacggcgccgacgccgtttatatcggtctgaaggacgacaccaacgcgcgccacttcgccgggctgaacttcagcgaaaaaaaactgcaggaagcggtggagtatgtgcatcgccatggccgtaagctgcatatcgccatcaacaccttcgcccaccccgacggctacgcccgctggcagcgcgcggtggatatggcggcgcagctgggcgccgatgcgctgattctggcggatctggcgatgctggagtacgccgccgagcgttacccgcatatcgagcgccacgtctccgtgcaggcctccgccaccaatgaagaggcgattcgcttctatcagcgccactttgccgtgcaccgcgtggtgctgccgcgcgtgctgtcgatgcatcaggtgaaacagctggcgcgcaccagcccggtgccgctggaggtgttcgccttcggcagcctgtgcatcatggcggaaggccgctgctatctctcttcttacctgaccggcgaatcccccaataccgtcggcgcctgctcgccggcgcgtttcgtccgctggcaacagacgccacagggcatggaatcacgcctgaacgacgtgctgattgaccgctaccaggaaggcgaaaacgccggctacccgacgctgtgtaaaggccgctatctggttgacgatgtgcgctaccacgcgctggaagaacccaccagcctgaacacgctggcgctgctgccggaactgttggccgccaatatcgcttcggtaaaaattgagggccgccagcgcagcccggcctatgtcagccaggtggcgcgcgtctggcgccaggcaatcgaccgctgcatcgccgaccccgccggctaccagcccgacgccggctggatggcggcgctcggcgcaatgtctgaaggcacccagaccacgctcggtgcctatcaccgtaaatggcaatag

SEQ ID NO: 444002 - DNA, 879 bp, Serratia marcescens
atgaaatacgcattggggccggtgctctactactggccgaaaaccgagaccgaaagcttttaccagcaggcgatgcgcagcagcgccgatataatttatctcggcgagagcgtctgcaccaagcggcgcgagatgaaggtcggcgactggctggcgctggccaaaacggtggcgcagtccggcaagcaggtggtgctctccacgctggcgctgctgcaggcaccctccgagttaaatgagctgaagcgctatgtggaaaacggcgagtttctgattgaggccaacgatctcggcacggtgaatatggcggcggaacgcggcctgccgtttgtcgccggccatgcgctgaactgctataacgcctataccctgcggctgctgcacaagcagggcatgacgcgctggtgcatgccggtggagctgtcccgcgactggctgggtaaggtgctggagcagtgcaacgagctgggtttccgccgcggttttgaggtggaagtgctgggctacggtcacctgccgctggcctactccgcccgctgctttaccgcccgttcggaaaaccgcggcaaggacgagtgcgaaacctgctgcatcaaatatccgcaggggcgcgccatgcgctcacaggaaaaccagcaggtgttcgtactcaacggcattcagacgatgagtggttactgctacaacctgggcaatgagctgagcggcatgcaggagctggtcgatatcgtgcggctgtcgccgcagggcgtggagacgttgacgatgctcgagcagttccgcgccaatgaaaacgctcagcaaccgctggcgctggccagcagcagcgactgtaacggctactggcgacgcgtcgccgggttggagctggtgcggtaa

SEQ ID NO: 444003 - DNA, 1140 bp, Serratia marcescens
atgaagagttactggcaaacctttagccgggtgctgatcggcatgctggaacggccgatgtggctgatgttgatcctgtcgctgtgcgtaatgagcctggtgtatgccaaccgttcggtgtgggatctgccggtgggggtgatcgatcaggatcatagcagcgccagccgcgagctgatccgtcagctggacgccacctcgaaaatcgctatcaaaacctacgacagtctggatcaggcgcagcgcgatctgggctggcgcgagctgtttgcggtgatcattatgccggtggatctggagaagaagatcctgcacggtgagaacattgtggtaccggtgtacggcgatgccaccaaccggctggctaacgggcagatccagcaggacgtggtgaccgcttatcagcagctgcttaatcagtacaacacgtcgctgctgctgcgcagcggctttagcgagcggcaggcgcagattatcctgacgccgattcaggggcagacgctggacgtgtttaaccctggcatcagctttgcggcaatcgtcttccccggcctgctggtcatgctgctgcagcattcgttgctgatcgccagcgtgcgcgtcagcattgcgctgaaaagcgcgccgagcggcaaaccgtcgatcccggtgtatctcggcggtctgtcggcgttgctgccgatctggctgtttttgtcgatcgtattgtttgtgctgtggccatgggtgctgggctaccggcagacggcgaacattgcggaagtgctgttgctgaccttcccgttcctgctggcggtgttggggttagggaagctggtgaccgagtgcctgcgcagcgtggagatgatttacctgacgctggcgtttatcaccacgccgattttctacctttccggcaccatctggccgctgcaggcgatgccgggctgggtgcgcgccatttcctactgcattccttccacctgggccaccaaggcgatcgccggggtgaaccagatggggatgtcgctgaatgaagtggggaacgacgtgctgatgctgctgttgcttggcgcggtatataccgtgattggtatcggagtgggtctggtgcacaacagcgtggcgctgcgcagcctgttccgtaagcggcgggcgtag

SEQ ID NO: 444004 - DNA, 1155 bp, Serratia marcescens
atggcaatggaaagagtaagggccggatggcgctgcttcagccacgcgtttagccgggaatgccgggttgctttccgcagcccggtgatccactggctgggctggctgttcccgctgatcctgtttggccttatcagcagcaacttctcggaggggacgttgctgaacctgccggtttcggtggtggataacgaccacagcccgctgtcaaaatcgctggtccgtaaactggatgccggctctcatgctcacgtggaggctcatgacggcgggttgagtgagtcgctgcgccggctgcgcagcgcgcaggactatgcgctgctgtatgtgccgcccgatcttgaggcgaatgccctggcgggcaagcagccgagcatcgtgctgtattacaacgccctgttctacggcgccgggctttactccacccaggatttcagcggcctgataacggaaaccaacggcagctaccgttcgattatcgccgccagcatggggaaaacgctgccgccgctggcggatgtgacgcttaactacggcagtctgtttaacgccagcggcagttatatttattaccagcagttcgccgcgaccattcacctgctgcagttgtttgtcgttacctgcatgatctacgtgatggcgcgcagcaagtcgctgctgagcgtacgaccgttcagcctggcgctgttgggcaaactggcgccgtacaccatcagctttaccacgctgctgatgattgagattgccgcactggtgggtatttttgacgcacgcgtcagcggcaacccgctgtttatgctgctgatcggctttttctacgtggcggcggcgcagagcatcggcctgctgctgtttacctttaccggcagtgcgattaccgcctacagcctgatcggtattctggtcagtatcgcgatgacctattccggcatggcggtgccggagctgtcgatgccgctgccggcgcggattatttccaatattgaaccgttgacgcacgcgctgtacgcgatgtttgacgtcttcctgcgtcaggtgccggcgcgggctattttcggcgtctgcgcgctgctgttggtctatccgctggtgaccgcgtttttggtgcgcaaccggctgccgaagcggctggctaaggacgagggaacgctatga

SEQ ID NO: 444005 - DNA, 972 bp, Serratia marcescens
atgaataaaaagaccttatttaccctgctgctggtggtgatcgcgattgcgatggcggtattattccgctcgcataatcaggacttattactgcagggagaggtggacgcgccggaagtgatcgtggcgtcgaaagccaagggacgggtggtggaacgcctgattgaacgcggcgacgacgtgaaggccggccaggtgatgattacactggacagcccggagctgttggcgcagctgcgttcggcacaggcaacgcgcgatgaggccaaggcgcagctcgaccagtcgctgcacggcacgcgtgaagagaatatccgcagcctgcgcgccagtctggcacaggcgcaggccgaactgcgcaacgcgcagcatgattacgatcgtaaccgcagcgtggcggccaaaggctatatctccaagtctgagctggacagttcgcgccgttcgcgcgacaccgcctaccaacaggtacaggatgcgaaggccaagctggatgaaggcatcaacggcgaccgtatcgagctgcgtcagcaatatgccgcggcgctgcgtgcagcggaagaaaacctgctggaagtgcaggcgcaggctgatgacctgcaggtgaaggcgccggtcgacggcgaagtggggccgattcccgccgaagtcggtgagctgctgaacgcttccagcccgttggtgacgctgatccgcctgccggatgcctactttgtgtttaacctgcgtgaagacattctggccaatatacgcaaaggcgataaagtgaagctgcgcgtaccggcgctgaaagataaagtcatcgatgccgaagtgcgttatatcgccccgctgggggactacgccaccaagcgtgctacgcgcgccaccggcgatttcgacctgaaaacctttgaagtccgcctgtacccggcccagccgattgaaggcctgcgcccagggatgagcagcttatggcaatggaaagagtaa

SEQ ID NO: 444006 - DNA, 1014 bp, Serratia marcescens
atgacacaaaacgcatcagttccgctttcggtactggatctttccccgattcctcagggagcaaaagcgcgcgacgcgtttcactgctctttagatttagcacaacatgctgaaaagtgggggttccagcgctattggttggcggaacatcacaatatgaccggtatcggcagcgcggcgacctcggtgctgctcggctatctggccgccggcaccgacaccattcggctgggctccggcggcgtgatgctgcccaaccatgcgccgctggtgatcgccgaacagttcggcacgctggagtcgctgtaccctggccgtatcgatttggggctgggccgcgcgccgggcaccgaccaacgcaccatgatggcgctgcgccgccacctgtccggcgaggtggataacttcccacgcgacgtgcaggagctgcagcactactttgccgaggtacagcccgggcaaccggtgcaggcggtgccgggccaggggctgcacgtgccgatctggctgctgggttccagcctgtacagcgcccagctgtccgccaagcttggcctgccgttcgccttcgcctcccacttcgcgccggatatgctgttccaggcgctgcgcttgtaccgggaaaactatcagccttccgaacgctggccgcagccgcatgcgatggtatgcgtcaacgtcattgccgccgacagcgagcgcgacgcgcgcttcctgttcagctccatgcagcagcagtttatcaacctgcgccgcggcgaaccggggccgctgccgccgccggtagacaatattcacgcgctgtggagcgccggcgagcagtatggcgtcgagcaggcgctgagaatgtcgatcgtcggcgatgaaaataacgtgcgtgaaggcctgcaggcgctgctgcgcgaaaccgaggccgacgagattatggttaacggccagatcttcgaccatcaggcacgactgcgctcgtttgagatcgtcgcgcaggtgaaggatgcgttaacgcgcggctaa

SEQ ID NO: 444007 - DNA, 1440 bp, Serratia marcescens
atgagcacaccatcatccgcggccgttctgggccgtgcggggttgataattttactggcggggcaactgttgccgatgatcgacttttccatcgttaacgtcgggctggatgcgatggcgcagtcgctgcacgccacgccgacgcagctggagttgattgtcgcggtttacggcgtggcgtttgccgtttgtctggcgatgggcggccggatgggggataacctggggcgtcgccgcctgtttttatggggcgtgcggctgttcgccctagcctcgctgatgtgcgggctggcgaactcggtctggctgctgctggtggcgcgtacgctgcagggtgtcggcgcggcgatgatcgtgccgcagatcatggcgaccattcacgtttgcctgcgcgggcgcgaacacgcccgggcgatggcactgtacggcggcatcggtgggctggcgtttattatcggccaggtgctgggcgggctgctgatttcgctggatatcgccggttacggctggcgcagcgtctttttgatcaatattccgctgtgcgtgctggtgctggtctgcgcccatcgctgggtgccggacacgcgcgcgcaacggcgggtcaatatcgactggccgggcaccttgctgctggcgctgaccatcgtttgcctgctgtttccgctggcgttggggccggtgtggcactggccgtggccgtgtctggcgctgctggccctcagcgggccgctgttgctgcagctgtggcgtgtggaacggcgccaggaacggcgcaataacttcccgctgctgccgccggcgctgctgcggctggcgagcgtcagattcgggctgaccatcgccattctgttcttctcctgctggagcggctttatgtttgtgatggcgctgacgctgcaggcgggggcgaagctgaatgcattccagtcgggcaatgcgtttattgcgctcggggtggcatattttatttcctcgctgctgagcagcacggtgattgagcatttcggcaaggtgcgcacgctgctgtttggctgcctgatccagatcggcgggctgttggcgctgatgctgactatgctgctggtatggccgcagccgggcatcgtcaatttaatcccggcaacgctgctgatcggtgccggtcaggcgctgatcgtcagcggtttcttccgtattggcctggctgatgtgccggtcgagcatgccggctccggcagcgccctgttggcgacggtgcaacaaacgtcgctggggctggggcctattttgctggggacggtattggtgcaggtgctgcatgcgtcgccgggtgactatctgcatgcgctgctggcggcattggtgctggagctgctgttgatgctggcgctgctgctgcgcaccctgctggtactgcgcgccgatcggcggttggcggccggacagccgtcccgcacctga

SEQ ID NO: 444008 - DNA, 867 bp, Serratia marcescens
atgtctgaaattacatccccaaccgacgctggacaggcggataaccgcaagcagctgggcgcatttctgcgcgcgcgccgtgaaagtctcgacccgaaccggcttggcctgccgcgcatgcgccagcgccgtacgcccggcctgcgccgggaagaagtggcgcagttggccgacgtcggcattacctggtacacctggctggagcagggtcgggcgattcaggcctcgacgaaaaccctgagcgccatcgcccacgcgctgcagtgcaatgaggcggaaacccatcatctgttcaggctggccggtcaaagcctgccggccagcgcccagcacggcggctgtgaaaaactgtcgccttacggacaacgcctgctggatcagcttgatccgctgccggcgatcatctccaacgcacgctttgatattctgggttttaaccgcgcctactgcctgctgatgggggtcgatctggcgacactgccgcccgaggaccgcaactgcatctatctggcgttcacccacgagcagtggcgcgccagccagctggactgggacgatatcatgccgaaaatggtggcgctgttccgcgcgcaaatggcggaacacctgggcgacccggtctgggaacagcagctggcgcgctatctgtcggtctcggaggattttcgcgcgctgtgggaacgccacgaggtgcgcagcatcgataataacgtcaagcgcttcctccacccgcaggtcggggaaatgagcctgcggcagaataactggtggtcggcgccgcgcaacggcgaccggatgctggtgtatataccggcggatgaacagagtgaacgccgcctgcaacagctgaccggcggcgcggagtaa

SEQ ID NO: 444009 - DNA, 1212 bp, Serratia marcescens
gtgaactggcaacaatttaaaactgactatctggtgcgcttctgggcgccgctgccggcggtgatcgccgccggtctgctggctacctactactttggcctcaccggcaccttctgggcggtcaccggggagtttacccgctggggcggccacgtcctgcaatggctggggctgcatcccgagcagtgggcctacttcaaggtgattgggctggagggcacgccgctgacgcgtatcgacggccggatgattatcggcatgtttgccggctgtatcgctgccgcgctgtgggccaacaatatcaagctgcgccggccgcagcaccgcatccgcatcgttcaggcgctgctgggcggcattatcgccggctttggcgcgcgtctggcaatgggctgcaacctggcggcattttttaccggcatcccgcagttttcgctgcacgcctggctgtttgcgctggcgaccgccgccggctcttactttggcgccaaattcaccctgttgccgctgttccgcgtgccgataaaactgcagaaggtgcaggccgccgcgccgctgacccagctgccgcaacaggcgcgccgccgttttcgtctggggatgctggtcttcctgctgatgagcgcctggtcgctgtggacgctgtttgatgcgccgaagctgggcatcgccatgctgttcggcattgccttcggtctgttgatagagcgggcgcagatttgcttcacctcggcgtttcgcgacctgtggattaccggccgcacccatatggcgcgggcgattattttaggcatggcggtcagcgcgatcggcatcttcagctatgtacagctgggcgttgcgcccaaaatcatgtgggccgggccgaacgcgctgattggcggtctgctgttcggctttggcattgtgctggccggtggctgtgaaaccggctggatgtaccgtgcggtggaagggcaggtgcactactggtgggtcgggctcggtaatatcattggcgcgacgctgctggcctactactgggatgcgctggcgccgtcgctggccaccgactatgacaagatcaacctgctggaggtcttcggcccgacgggcgggttgctggtgacttatctgctgctggcgctggcgttggtcgccatgctgtggtgggaaaaacgctttttccgcgccaaagcgcgggcggagcgggttgatgcgaggagtatgtga

SEQ ID NO: 444010 - DNA, 663 bp, Serratia marcescens
gtgaagctattgattgtcgaagacgatgagctattgcaacaggggctggccatggcgctggctgccgaaggttacgcctgcgattgcgccctgacggcggcgcaggccaatacgctgatcgacaccagtcagtacagcatggtcatcctcgatctcggcctgcccgacgtggacggcggcgccttgctgcggcaatggcgccgccggcaactggacttgccggtgttgattctcaccgcccgcgatgcgctggaagaccgcgtcgacgggctggacgccggcgccgatgactatctgatcaaaccctttgcgctggttgagctgcaggctcgcgtcagggcgctcatccgccgctatcagggccacagcgacaacctgctacagcaggacgatctcacgctcaatctctccagccagcaggtttacctgcaacagcagcctatcgacatcacgccaaaagagtttgcccttctgtcgcggctgattatgcgcgctggccagacggtcaaccgtgaactgctgcaacaggatttatacgcctggaacgacgatctcggctccaatacgctcgaagtgcacgtccataacctgcgccgcaagctgggcaaggatcgcatccgcacggtacgcggcatcggctaccgtctggagccgttgccatga

SEQ ID NO: 444011 - DNA, 1065 bp, Serratia marcescens
atgatcagcatgcggcgtcgcctgttgctgatgctggcgcttattctgctggtcacccaattgatcagcgcgctgtggctatggcacgaaagccgggaacagatcggttttctggtcgatgaaaccctgtcggcccaggtgcgcaccgaaaaggtcgacggtgaaatcgccgaagcgatcgcctcattattggcgccgtcgctgattatgatgattgtcacgttgatcgcctcgttctgggccatcagctggattatccgcccgcttaatcagttgcaaaaccggctggaaaagcgttccgccgacaacctgtcaccgctgccggtcaataacgacagccgggaagtgatggcggtcaccaccgcgctcaatcaactcttctcgcggctcgataacaccattcagcaggagcggttgtttaccgccgacgcggcccacgaactgcgtacgccgctggccggcatccggctgcatctggaactgatggagcagcagggggtgcgggaaagtacgccgctgatcgcgcgcatcgaccaactgatgcataccgtagaacaattgctgatgctgtcgcgcgccgggcagaagtttgccggcggccactatcaacgtttcgactgggtcgcggacgtgatgacgccactgcgcgaagaactgacagaactggcgcaacaacgcaatcagcagctgacgtggcaactgccggtggaggccgtcactcatggcgatccggtattacttcgcctgttgctgcgaaatctggtggaaaatgcccatcgctatagcccgccggacagcgccatccaaatccgcctcgacgcgcaaaacggcggccatcagctgcaggtgatcgatgaagggccgggcattaagcaagagatggccggagagctaacccaggccttcagaagaatggaccagcgctatggcggcagcggattggggctaaatatcgtcatccgcatcatccagctgcaccaagggcgactggcgctgaaaaaccgccataacgccagcggccttaacgcgcgctgctggctgcccgccaacccgctgaagccataa

SEQ ID NO: 444012 - DNA, 258 bp, Serratia marcescens
atggcacacaaaaaggctggcggctcgactcgtaacggtcgcgattcagaagctaaacgtctgggcgtaaaacgctttggcggcgaagcagtactggcaggcagcatcatcgttcgtcagcgtggcaccaagttccacgcaggcaccaacgtaggttgcggcaaagaccacactctgtttgctttgaaagacggtaaagtcaaattcgaagttaaaggcccgagcaatcgtaaattcatcagcatcgaagctgaataa

SEQ ID NO: 444013 - DNA, 357 bp, Serratia marcescens
atgaaaagtgagtggttttctgccagggaattgacgggcatcgcggggttgccttcctcgccacagggaattaatcagatggcgcgtcgggaaaaatgggtgagtcagcgtcggaaaggcgtacagggtaaagcggtggaatatcatatcgacagcctgccgccgggcgtgcgtaatgctttgatgctgaaagaggattctgcagattacactgctgaaagacaggatccgctgacggtgtggatcgcctattttcaccatatgtcggatgatgaaagggagcagatgctgtcatttctggtacgtgagggcattggcgggctgttggcgcttatcgctgaacgtcgccagcgataa

SEQ ID NO: 444014 - DNA, 357 bp, Serratia marcescens
atgaaaagtgagtggttttctgccaaggaattgactggcatcgcggggttgccttcctcgccacagggaattaatcagatggcgcgtcgggaaaaatgggtgagtcagcgtcggaaaggcgtacagggcaaagcggtggaatatcatatcgacagcctgccgccaggcgtgcgtaatgctttgatgctgaaagaggattctgctggttacactgctgaaagacaggatccgctgacggtgtggatcgcctattttcaccatatgtcggatgatgaaagggagcggatacaggcgtttttgttgcgtgagggcattggcggactgctggcgcttatcgccgaggggcgtcagcgataa

SEQ ID NO: 444015 - DNA, 261 bp, Serratia marcescens
atgaattcaaggagtgaagattggcatcctgccgatgtcatcgcagcattacgcaagaaaggcaccactctggcagcggtatcgcgcagcgccgggctcagttcgtcgacgctggctaacgccctgtcccgcccctggccgaaaggcgagtggctgatcgccgaggcgctgaatgttcacccttcagagatctggccaagccgctatttcgatcccaagacccggcgcttgctggaccgcaagagtcggatcaaatcctga

SEQ ID NO: 444016 - DNA, 264 bp, Serratia marcescens
atgaaagttaaaactactgttgtgactcttggcgtactgtccatgctttcattcggcacttttgcagcacaatccgttagcacggagcaggcagcaaaattgcagccgacaggcaccattaccgtcagcggcgttgccgcagcgccttccgatatccgtcaggcactgtctgataaagccgatgccaaaggcgccaccgcttttcgcgtgattgaagcgcgtaatgaaggcaacttccacgccacggcagaaatctacaaataa

SEQ ID NO: 444017 - DNA, 264 bp, Serratia marcescens
atgaacatgaaattttcgattgcagcgatggcgctgctgtcagccgtctcttttggcgcttccgccgccacgctggtgagcaatgaacaggccagcaccctgcagtctgtcggcaccgtgaccgccgccggcgtcgccggttcaccatcggacattcgccaggcgctgtccgataaggccgaccaacagggcgccacagcctaccgtattattgaagcccgtgagaacggcaactggcacgccacggccgaaatctataaataa

SEQ ID NO: 444018 - DNA, 276 bp, Serratia marcescens
atgagagaactatccgtaagcgaacagcaggaagtcagcggcggcctgtttggccttatcaccgcgcctatcggcggcattctcggcgccgcaatcggctccatcgttgatgccggcaaccgtctctccggccgtgactccaacttcaaagggtctggcgctctgctgggcgccggcatcggcgcagcggtaggcttgtcaccactgaccgccatcctcggcatcggctccggtattgtctccatcgtccgcaacggcctcggcctcaaggcgtaa

SEQ ID NO: 444019 - DNA, 3822 bp, Serratia marcescens
atgagcctggtgaaaaagatttgtcttgggttgctgatcgttctgctgctgctggtagggggcgttgcctacctgctcggcaccaccaacggtctgcatatggtgctcaacggcgcggcgcgctgggtgccggggctggatatcgccagcgtcagcggcggctggcgcgatctgacgctaaaaggcgtgaaataccagatgccgggcgtgacggtgaatgccggccagttccatctgtcactcgatttgtcatgctttaaacgcagttcgctgtgtgtgaacgccttgaccgctgatgacgtcgacgtggtggtgaaaaccagcgaaatggcgccgtccgagccggcggcggagagcagcgaaccaaccaccgatctcagcactccctacccgattatcctgcgcaaactggcgctgaataacgtcaaggtcaacgttgacgacaccgccatttcactcggggagttcagcaccggcgccgaatggcaggagcgcgcgctgcagctgcagccgaccaaaatcgcttcgctgttgattgccctgccgaaaacgccggccaatccgctgccggaagacgtacagccggcggtcgatatggtgaagaaagccggagagaaagcgggcgatgcgccgaaaacggcgccgcagccggaagagcaaccgctgggcgagacgctgaaagaactgtttgccaagccgctgctgccggatctgccggaagtgcgtctgccgctggatatcacggtgaaagagatccgcggtgaacagctgcgtctgaccggcgataccgacgtgctgatcaccagtctgctgctgaaggccagcaccaaggaccagcatatccagttggacaactttgacgtcaggtcgccgcagggcacgctgttcgcgcacggccaggccacgctgaaagataactggccggtgcagatgagcgccaacagcacgctgaatatcgatccgctgaaaggcgaaaaggtgaagctgaccctcggcggcggcctgcgtgaagcgttgaacgtagcgctgaacctgtccggaccggtgggggcgcagctcgatctgcagaccgagctggcagaggcgggtttaccgctctcgctgacgctgcagagcaaacggctgaagtggccgcttaccggcgtatctcagtaccaggtgaatgacttacgtctgcgccttaacggcaaagccaccgactatgcgctgtcgacgcgcgccgatatcaaagggcaggatctgccgccggcgctgctgacgttggacggtaaaggcaacgtcgagcagttcagacttaaccgcctgcgtctggcggcgctgcagggcaataccgacctgaccgcgctggtggactggagcaaggccatcagctggacgtcgcagttgacgctcagcggcatcaataccgccaaacagtggccggaatggccggcgaagctgaacggcaaaatcaccacccgcggcagtctgtacggcggcagctggcagctacaggtgccgacgctgcagctggacggcaacgtgaagcagaacaaggtgtcggctcgcggctcgctgagcggcaacgccgccggccagtggaagattcccggcgtcgacctggcgctggggcgtaatagcctgaacgtgaaagggcaactggacgagaaaagctggaatctggacgccaacatcgacgcgccgcagctggacggcgcgctgccgggtctgggcggcacggcgaagggcttactgaagctgcgcggcaatctgcaggcgccgcagctgctggcggacctgaccgcgtccggcctgcaatggcaggcgctgcatatcaaacgggtgaaagtagacggcgacgtgcgctccaccgatcagattcagggccagctggcggtgcgggtcgagcagctgaagcaggatgcgctggaggtgaacctgctgcagcttgacgctaagggcacggaaaagcagcacacgctgcagttgaaggttgagggcaagccggtctccggccagctggcgctggcgggcagcttcgatcgccagcagcagcgctggcgcggcaatctgaacaatacccgttttgatacgccggtaggcgaatggcgcctgacgcgcgccatcgcgctggactatctgaatacccagcaaaaaatcagcgtcggcccgcactgctggcagaacccggatgccgaagtctgcgtgccgaaaaccatcgaagccagcgccgccaatggccaggccagcgtggtgctgaaccgctttgatctgaaaatgatcaaaccgttccttggcccggaaaccgcgctgaacggcgtgtttaccggccgtgccgacgtgagctggaaagagggcgccgcgctgccgcaggcgaaggtatcgctggtgggcaatggggtgaaagtcgtgcagcaggtgcagggcaacgcgttgccgatcgcctttgatacgctgaacctcaacgcgggtgttaacaacggtcgcgcgcaggccgattggctgattaagctgcataacaacggccaactggacggtaacatccaggtgaccgacccgcagaagcagcgcaatatcgccggtaacgtcaatatcgccaatatttctctggcgatgatcaacccggcgctgatgcagggtgaaaaagccgccggtatgctgaacgccaatctgcggctgggcggcaatgcgcaaaaaccgctggtatatgggcgtctggcgctggacaaggtggatattgacggcagttggatgccgttcgatatgaccgacggccggctggcgattgacttcaacggcatgaattcgacgctggatggcctcattaccaccacgcgcggccaactgaacctgaccggcgatgccgactggcgcgatatcaacgcctggcgggcgcgcatcgccgcgaagggcgacaaactgcgggtgacggtgccgccgatggtgcgtatcgacgtgtcaccggatctggtgtttgaagcaacgccgcagctgttctcgctgaacggcaatgtggatatcccatgggcgcgcattaccgtgcaggagttgccggaaagcgcggtcggcgtctcgtcggatgaagtgatgctggataaacagctgaaaccgatccagccgaagagcaccgcggtggcgattaacagtaacctgatgattcacgtgggcgacgatgtgcggctggatgcgttcggtctgaaggcgcggctcaagggcgacctgaaagtggtgcaggataagcgtggcctggggctgaacggccagattgatatcccggccggccgtttccacgcctatggtcaggatcttatcgtacgtaagggacaattattgttctcaggtccgccggatcagccatacttgaatatggaggcgattcgtaacccggaggccaccgaggatgatgtgaccgccggggtgcgcgtcaccggactggcggacgcgccgaagctggaagtgttctccgatccggccaaatcgcagcaagaggcgctgtcttacctgctgcgcggacagggcctcagcaactccggcgccgacggcaacgcgatgacgtcgatgttaattggcatgggggttgcacaaagtggtcaacttgtgggtaaaatcggcgaagcatttggcgttagtaatctggcacttgataccgccggcgttggcgacagctcccaggttgtcgtgagtggttatgttctccccggcttacaagtaaaatatggggtgggtattttcgactcgctggctacgttgacgttgcgttaccgcctgatgcctaagttgtatcttgaagcggtgtctggtctcgaccaggcgctagatttgctctatcagtttgagttttag

SEQ ID NO: 444020 - DNA, 1737 bp, Serratia marcescens
gtgccacgttaccgtgtcctttgcgttttatgcgcgctatttgtcgcgcctgcggcgctgtcggccaatttgcggctgcaggtcgaagggctgagcggagagttggagaaaaacgtgcgggttcgcctgtcagccatcacccccgaagaggtgagcgccgacggccgttttcgtgcacgggtagagcaggcggtgcgtcaggggctgcgcgcgctgggttattatgagccaaccattgaatttactctcgacgacaaccccaagctgtcgcgtccggtgctgcatgccaaggttaagcccggcgagccggtgcgtattgccggcgccaatatcacgctggaaggcggcgccaaaaccgatgaagactatctggcgctggtgaagaagggacggccgaccatcggcgagatccttaaccacggcacctatgaaagctttaaaagttccctgagcggtctggcgctgcgcaaaggctactttgacgccgagatgaccaaaagccaactgggcgtgtcggaagagctgcgtaaggcgtactgggattttgactttaacagcggcgagcgctaccgctttggtaaagtgaaattcgaaggttcgcaaatccgcgaagactatctgcaaaacctgatccccttccatcagggggagtattacagctcgcaggatttggccgagctgaaccgccgtttgtctgccaccaactggtttaactcggtggtggtgtcgcctgattttgaagatgccaaagagagcaagatcctgccgttggacgcgctggtaacgccgcgcagccgcaatacgctggaaaccggcgtgggctattccaccgatgtcgggccgcggataaagggcacctggaagaagccctggctgaacgatcgtggccacagtctggaaaccagcgcctatatttcggcgccggagcagcagctggatctgacgtataaaattccgctgcagaagagcccgctggaagagtattacctgatgcagggcggctataagcgcagcgacctgaacgacaccaagtcagacagcaccaaggtggtggtatcgcgcaactgggataaatccagcggctggcagtacgccatcaatatgaccggtcgttttgaccactttacccaaggtaatgtcaccaacaccaccgtgctgctgtatccgggcgccagcctcagccgcacccgctcgcgcggcggcctgatgccgacctggggcgacagccagcgctattccattgacgtttccgataccacctggggctcaggcgtcgattttgcgctgctgcaggcgcagaacgtctggatccgcacgctggcggataaacaccgctttgtggcgcgtggtcaggtgggttggattgaaaccaatgacttcgataaggtgccgccggatctgcgcttcttcgccggcggcgaccgcagcatccgcggctacaaatataaagacatctcgccgcgtgacgcagacggcaagctgaccggcgcctctaaaatgctgaccggctcgctggagtatcaatacaacgtgaccggcaagtggtggggcgcggtgttcgtcgactccggcgaagcggtgaatgatatcaaacagagcaatttcaaaaccggcgcgggcgttggcgtgcgctggcaatcgccggtcgggccggtgaaactggatattgccgccccggtcggggataaggaaacccacgggatgcagttctatatcggtttggggcctgaactatga

SEQ ID NO: 444021 - DNA, 639 bp, Serratia marcescens
gtgcaaaatacagataaatctcgcctggtcgaccaggccaacgcgctgccggggcgcgccacgccggtgccggtcgccgcgctcaacatcgtcactcagcactctatgacagaggtgccggccggtatggacgtggcgattttcgccatgggctgcttctggggggtcgagcgcctgttctggcaacagccgggcgtctacagcaccgccgccggctacaccggcggctacacgccgaatccggcctaccatgaggtgtgcaccggccagaccggccacgccgaagcggtgcgcgtgatcttcgatccgaaagtcatcagctatccgcagctgctgcaggtgttctgggaaaatcacgatccggcccagggcatgcgtcagggcggtgatatcggcacccagtaccgttctgcaatctactacctgacgccggaacagcaggccgacgccgagcgcagcctggccagcttccaacaggcgatggacaccgccggggaccagcgcgtcatcaccaccgaaatcgccccggccacgccgttctactacgccgaagacgaccaccagcaatacctggaaaagaatccgggcggctactgcggactgggcggcatcggcgtttgtctgcccccgcaggcctaa

SEQ ID NO: 444022 - DNA, 207 bp, Serratia marcescens
atgagaatcttccagcgttataaccctttgaaaattgccaaatatgtgaagaccctgttccgcggacgtttatatatcaaagatgttggtgcatttgaattcgacaaaggccgaatcctggtgccgaaagtccgcgacaagcgccatctcagcgtgatgtctgaagttaatcggcaagtgctgcttttgcaatcggaaatgggttaa

SEQ ID NO: 444023 - DNA, 555 bp, Serratia marcescens
atgaaaaagagtcgcatgctaatgatgtccctgctgttcgcccccctactggcctcagcgcacaactttcaactgctgcagcgcgtcgcgccggtcagcgtcactgaccgcggcgagctgcattatgctaacggcgacttcagctacgaaaaatggagcagtggcaagctcagtggaaaagtacgggtaattcagcatattgccggccgcagttccgccaaagacatgaacgatccattgattgaagccatcaaggccgccaagctaccacgcgatcgttaccaaacgacgacaatcatcaatattgatgacgctatcgtcggcaccggcatgtttgtgcgcagcagtattgaagacaacaaaaaagagttcccgtggtcgcagtttatcgtcgacaacaagggctacgtgaagaaagcctgggatctgcaaagcaacggctcggcgattatcgtgctggacgatcagggacgggtgaagttcgccaaagacggcaagctgacggaagaagaagtgcagcaagtgatgaacatgctgcaccagatgctgcgctaa

SEQ ID NO: 444024 - DNA, 1971 bp, Serratia marcescens
atgatgaaacgtccgctggcattatccgccctcgccctgctgatttccgccacggcgcaggcggcgaaggtcgacctgcgcgtgctggaaaccaccgacctgcacggcaacatgatggactttgattactataaggataagcccaccgagaaatttgggctggtgcgtaccgccagcctgattcagcaggcgcgccagcaggcggttaacagcgtgctggtcgacaacggcgatattattcagggcagcccgatggcggactatatggcggccaaggggttgcgcaaaggcgacatacacccggtctacaaggcgctgaaccagctggattatgtggtaggcaatatcggcaaccacgaattcaattacggccttgattatctgcaaaccgccctcgccggcgccaagttcccctacgttaacgccaacgttatcgacagcaaaacccagaaaccgctgttcaccccgtatattatcgtcgatacgccggtaaaagaccgcgacggccacacgcacacgctgcgcatcggctatatcggtttcgtcccgccgcaaattatggtctgggacaaggccaacctgcagggtaaggtcacggtcaatgatattaccgccaccgccaaacgctacgtgccggaaatgcgtcagcaaggggccgatctggtgatcgccattccccactccggcctctccagcgcgccttataaagccatggcggaaaattcggtctactacctcagccaggtgccgggcatcgacgccattatgttcggccacgcccacgcggtctttcccagtaaggacttcgccgcgattaaaggcgccgatattgagcagggcctgctgaacggcgtaccggcagtgatgccgggccaatggggcgatcacctcggcgtggtggatttacagctcagtaacgacagcggccgctgggcggtcacccgtgccaaggccgaggcgcggccgatttacgacagcgccgccaaacgttcgctggcggcggaagacgccggtctggtgaaggtgctggccgacgatcataagggcacccgcgagttcgtcagccagccgatcggcaagtccgacggcaatatgtacagctatctggctttggtgcaggacgatccgacggtgcagatcgtcaacaacgcgcagaaagcctatgtggagcactacattcagggcgatccggatctggcggatctgccggtgctgtccgccgccgcgccgttcaaggtcggcggccgcaaaaacgatccggccagctttgtggaagtggaaaagggacagctgaccttccgcaacgcggccgatctgtatctctaccccaatacgctggtggtggtcaaagccagcggtaaagaggtgaaagagtggctggagtgctccgccgggcagtttaaccgcatcgacgtcaacagcagtaagccgcagagcctgattaactgggacggcttccgcacctataacttcgacgtgattgacggcgtcagctaccaggtagacgtcagccaaccggcgcgctacgacggtgaatgtcagttaatcaatgataaagcggaacggatcaaacagctgaccttcaacggcaaaccgatcgacccgaacgccacattcctggtggctaccaacaactaccgcgcctatggcggcaagtttgccggcaccggcgacaaacacatcgccttcgcctcgccggatgaaaaccgcgccgtactgtcggcctatattagcgcagagagtaaaaaacacggggcggtgcatccgcaggcggacaacaactggcgtctggccaacatcgacgccgcccagccgctggatatccgttttgaaacctcaccaagcgacaaggccgcggcgtttatccggcaaaacgcccgttacccgctgaagcctgtcggcaacgacagcatcggttttgcgatttatcaggtcggcctgcaaacgccgcccgcagaggcagcgcgctaa

SEQ ID NO: 444025 - DNA, 651 bp, Serratia marcescens
atgggcagaatcgcgcccaggagaaggaaaaccacccgcacccagcggtcgttgctacgcgtctggcaacgtatcagccaacgcctgaagttcggcgcaccacggcagatgtccgcagggtcggattcgcagcagccgcctgcaagcggtcagggacagggaatcaaagcgctactgttgaaaatctggcatttgccggacggcttcggctggctggaacctttgccctatttccaccgccgctgggtcatcatcttcggcgccgtgctgctgctctcgctgttgtggccctattcgccggagcgcgatgagcgcccgtacggcagtgagccgcaaagcgtgcaacagacggatgcgcagccgcccgccacagcatcggatcccgccggtcagtggcagcgttaccgcattcagcccggccagacgctggcgcagctgttccgcgacaacagtcttccggtcaacgaggtgttcgccatggcacaggtggaaggcaatgataagccgctgagcaatctgaaagccgggcaggaagtgcgtatcgaacgggatagcaacggggtgattatcgcgctgtcagtcaccacgctcgacaataatcaggtgaccttccgtcgtcagtccgatggcggctaccgccgccagcgctaa

SEQ ID NO: 444026 - DNA, 357 bp, Serratia marcescens
atgacgcagatccgattactgcgggtgtatgacttcagcggcccggcgccgcactgttttcttatcgatcggctgtggccgcgcggcatcagcaagcagcggctggaaggcgttgaatggctgaaagaggtggcgcccagcggtgaactgcgccagtggttccatcatcatactgaccagtgggacgcgtttgtcgcgtgctatcggcaggagttggctaccagcagcgcctggcagccgctgacagcgctgttgcggcagggcgagtgtctgaccctgctgtacggcagcaaggacacacagcacaaccagggcgttgtgctgcgcgatttcctcctggaacggttgtcggcttag

SEQ ID NO: 444027 - DNA, 267 bp, Serratia marcescens
atgaaacatgccactctcgccatgcttgcagtattgctgttttccagcggtgcgatggccgcagaagagatcgacgcccgccaggcttcacagcgccagagcatcgggtttgtcaccctgaaccgcaacgtggtgtctcccgacgacgccgaggcgcaggtcagacaaatcgccgaacgacgcggcgccggcgcttatcgcgtcatcgccatgcatgagccgggcagcaacgcgtcgattcacgtcagcgccgaactgtaccgctaa

SEQ ID NO: 444028 - DNA, 753 bp, Serratia marcescens
atggttgagctatttgacgaacgcgttggggaaattgcggttattcatgcggtgccggccgggaaatatgagcaccccctgccgacggtgttcttttatcacggttactgctcatcgaaagaagtgtatgcctattttggctatgcgctggcgaaggccggattccgcgtgatattgccggacgccgctcagcatggcgaacgctatcatggcgatgagcagcggcggctggcgcagttctgggacatcctgaaaagcaatatcgacgaactgccggcgctgcagacgcattttgcacagcgcgggctgattgacggtgcgcgcgtcggcgttgccggggcgtcgatgggcggcatgaccacgctgggagcgctgacacgctatccgtggatcaccgcggcggccagcctgatggggtccggttcgtttacctcgctgtcacgcacgctgtttccgccgctggatgcacacgggcaaccgctggctgacgcgcagcatgccgcatacctggcgccgctggcggatgatgagtttgagcggcagtgggataagttggccgaacgcccgctgctgttgtggcacggcgaggccgatgatgtggtgcccgcggcggaaagcctgcgactggcgcaggtgttgcgcgaacgcggtctggccgagcggctgacggtggcggttgaggcgggcgtgaagcaccgcattacgccggcggcgctggacgcctgcgtgggttttttccgcgccgcgttataa

SEQ ID NO: 444029 - DNA, 321 bp, Serratia marcescens
atgactcttacacgcactgccgccctgctgacgctgctgacgctgctggccgcgttatccggctgcggcctgatgaccaccacgcccaaaccgccgccgccgccaattgccggacaggcgcaggaggtcatccgggcgcagacctttggtctggaaaagatgaccaccgtcagcgcgctggtgcacggcagcccgatgaacgtggaagacgccatccagaaaaaggccaccgccagcggcgcccgctactacctgattattatgaacagcgaaaccgtggtgcccggacagtggtactcacaggccattttgtatcgctaa

SEQ ID NO: 444030 - DNA, 1179 bp, Serratia marcescens
atgacgccgcgccgcaacctggcagacatcgccgcccgttacggtttccactttcatatcatcgacggcgagccttattgggatgagtcgcgcgcctaccgttttaccctgcaacagatagaacaggggattgaagcaccgaccgaagagctgcacgccatgtgtctggatctggtcggtcgagtggtggcggacgatgccctgctgacgcagctggcgatccctgaactgtactgggatgccatcgccgccagctggcggcggcaagagccgtcgctgtatggccggatggattttgcctggggcggcagcgggccggtgaagctgctggagtataacgccgataccccgacctctttgtacgaaagcgcatttttccagtggctctggctggcggactcggtggcggccgggcgcattccggcaggggcagaccagtttaactccctgcaggaacagctgatccagcgctttgcgctgtggcgcagcgccgatccgctctacttttgctgctgtcgcgattcgcaggaggatcgcggtaccgtgcgttatctggaggactgcgcgcgtcaggccgggctggatacccgttttctgcatatggaggagattggtctcggcgttggcggcgtattcaccgacctgcaggatcggacgttgcgtcaggcgtttaagctctatccgtgggaatggatgatgcgcgacgatttcggccccgcgctgcgcggcggccgtacgcaatggctggagccgctgtggaaaagcatcgtgagcaacaagggggttctgcccttgctgtggcgttggcaccgcggccatccgaacctgctgccggcctattttgccgaggaggtgcagcggccgggctggcgactggcgcaagagatgggggcgcagtggcgtggttttgtgcgtaagccgctgtattcccgcgaaggcgccaatgtggcgatgttcagcgatcgggacgggttgcgctgtgaggcgatgaccggcggcgactatgcgcaggaagcgcagatttggcaggcctgcgcgccgctgccgcgttttggcgatgactatacgctgatcggcagctggctggtgggcgatcgggcggcgggcatcggcctgcgggaagataattcgccgatcaccaaagacacgtcacgctttgtgccgcactttatcgcttag

SEQ ID NO: 444031 - DNA, 633 bp, Serratia marcescens
atggccggcaaacggcgcgcgcagacggcgcgcaacacgcagagtacacccgcgttcaagcgttattcatcaccgtcgaccacacgcaagtcgccgcagctgttgacgctggtgttgatgggcggcgcagccggcgcggtgtggtatagcctggatgaccccgcgcccgagcaggcggtgatttatcattcggtgtccgcctgcgtggatgccggcaatagtcggacagtgtgccagaacagctatcagcaggcgcaggaagcgctgcggctcgacagcctggggtttactcggatagacagctgcgagtcccactacggcgcgtataactgcacctatgatttaccgacgcaacactttatcccgaggatggcgggctttacgctggcgacgaatgctcaggatgatgaaagcggcgcgtcttcctcctcgtccggaggtagctattacggcggcggtgcaagttcgcgcgcgcgtcccttcttccgttcgcgcgacaggttcaatgagctgcaaacgccgggcgaccgcgaaagctggcgcctgaaaagcgcgggcaacgttcagccggcgtcggcgcagacggtctcacgcggcggttttggctcttcatcgcgcagttggggtggttaa

SEQ ID NO: 444032 - DNA, 399 bp, Serratia marcescens
atggatatcattagcgcactggcggcgtttgccgcctactttttcagtggttttgccatggtgctggtctttttgtttatctacacccgcatcacggcgcatgacgaatgggcattgattaaacagaataatcagtctgccgcattcggtttcgtcggcgcctgtctggggtacgtgattcccctggccagcgcggcgatcaactcggtcagcctgctggattacgttatctggggcgcggtcgcgctggtggtgcaattgctgctgtttgccgcagtgaaagtctatatgccgcgcatcagcgataaaattgaggccaaccatttggcggcggggattttcctcggcggcgtctccatcagcggcggcgtattgaatgcggcgtgcatgacatattaa

SEQ ID NO: 444033 - DNA, 201 bp, Serratia marcescens
atgaatgcaacaatttggctggcgttaggtttggttctggtgctggaaggtctggggccgatgctgtttccgcgcgcctggcgtaaaatgatcctgacgatttcgcaattgccggacgccacgctgcgtcgtttcggtggtggaatagtggttgccggcatcgtgatctactatatgttgagcacgcgccttggtggctga

SEQ ID NO: 444034 - DNA, 1245 bp, Serratia marcescens
atggcgtggaatcagcccggtaataacggacaggaccgcgacccgtgggggagcagcaataataatggcggcaactctggcggtaacaaaggcggtcgtgatcaagggccacctgatttagacgatatcttccgcaagctgagcaagaaattgagcggcctgggcggaggcaaaggctctaacggcaatagcggcggcagcggcgcgggcttcagcggccgtatcatcggcatcgcggcggttgctgtggtggtgatttgggcggccagcggtttctataccattaaggaagctgagcgcggcgtggtcacacgcttcggcaagttcagccatctggtgcagccgggcctgaactggaagccgacctttattgatgaagtgcgtccggtgaacgtggagtcggtgcgcgaactggctgcatccggcgtgatgctgacttccgatgagaacgtggtgcgggtcgagatgaacgtgcagtatcgcgtgaccgatccggaagcgtacctgttcagcgtggtgaacgctgacgacagcctgagccaggcgaccgacagtgccctgcgcggcgtgatcggcaagtattccatggaccgcatcctgactgaagggcgtaccgtggtgcgtaacgatacccaacgcatgttggaagagaccgtgcgtccgtacaaaatgggcatcacgctgctggacgtcaacttccaggcggcgcgtccgccggaagaggtgaaggcgtcattcgatgatgctatcgcagcacgtgagaacgagcagcagtacatccgtgaagcggaagcctacgccaacgaagttcagccgcgtgcgaacggtcaggcgcagcgtctgttggaagacgccaaagcgtataaagaccgtaccgtcctggaagcccagggtgaggtggcgcgctttgccaaactgctgccggaatacaagtcagcgccggaaattacccgtgagcgtctgtatatcgaaaccatggaaaaagtcctgagccatacccgcaaggtgctggtgaatgacaaaggcaacaacctgatggtgctgccactggagcagatgctgcgcggccaggccggcgcatccagcgacagcggcaacaaagacaccagcctgattcgtctcaaccctgcgccgtcgacttccggcagcaacgccggcagcaaaccgcagaacagcggttcggttatggaccaacgccgggcgaatgcgcagcgtgacgataccactcgcgtagggagacaataa

SEQ ID NO: 444035 - DNA, 1755 bp, Serratia marcescens
atgatgtatggactaaagaaaatcctcggcatggcgctgatcgtcgcgatggggctgtttggcccgtcgttggcgcaggcggcgtcatcgtcgctggcggatatcaaagtcaccaacgcccagcgcgaggcgaccgtcgcggtcagctttaacggcccgccggcctatgcgttcttcccgctgcacgggccggagcgcgtagtgctggacgtcaatcagagcggcaaagtcagcggcctgccgcttaacttcagcggccagaatttggtgaaacgcatccgctccagtgcgccgaaagacgcgcagagcgtgcgcctggtgtttgagctgacgcagcgcgcgaaaacccgcgcggtcacgcggcagaacggcaacgtgtataccgtggtgtttaccattgccgccacgggcagcaataacgttgtgcgccaggcgcccgcgccggcggccagtaagccgctggccagtaaaccgctggtgacgaaaacagaagaaccggtgcgccgtgtggcgtctacccgctcatccggcagcaatccgttcaaggaaaaaccgaccgtggtggccggcacagcaacggcggaaacgccgcgcagcagccgcgtgtccgccggttcgggcaaccgcgtcgtggtggcgatcgacgccggccacggcggccaggatcccggcgcgctggggcaaaacgggttgcgtgaaaagaacgtaaccattgccgttgcccgccgtttggagacgttgctggagaaagatccgatgttcaaaccggtgctgacgcgtaccggcgactattttgtgtcggtaatggggcgttcggaagtggcgcgtaagcaaggggctaatgtgctggtgtcgatccacgcggactcggcgccaaaccgcagagcgaccggtgcgtcagtatgggtgttgaataaccgccgtgccaacagtgaaatggccaactggctggaacagcatgagaaacagtccgagctgctgggcggcgcgggcgatctgctggccagcaatcaggccgatccgtatctcagccaggcggtgctggacttgcagttcggccattcgcagcgcgtgggctatgatgtggcggtgaaggtgctgagtgaaatgcagactatcggcgtgctgcacaagagccgtccgcagccggccagtcttggcgtgctgcgctcgccggatattccttccctgctggtggaaaccggctttatcagcaacccttcggaggagcgactgctgggcagtagcgactatcaggaaaagctagccaaggcgattcatcgcggtctgcgcagctacttcctgtcgcatccgctacaagccgacccaaaggtggaaaaccgaccgctggacgtcgcagcggcggttaacacggcttcaccagacgttagcagcagttaccggggtaaaacgcagattcacgttgtgcgcagaggggaaacgctctctgcaattgcccgccgttacggcaccagcatgacggcgttgcataacctcaataaattgaagaaagacggcgtatgggtaggacagcggctgaaagtgccggcggcgggtgccgctgccggcagtcagcacatcgccaaaacgcacggcggcgtgagcaaaccgtcgcggcataaagtggtgcgcggtgatacgctgtcttccattgccgtacactatggcgttagcgtcagtgccctgaaaagcgccaatcgcctgaagtcggacgtcgcgccgctggatcggacgctgaccattccgcatacctga

SEQ ID NO: 444036 - DNA, 462 bp, Serratia marcescens
atgaaagaactcgtgttacctctgccggatgaggcagcgacggttgaattgggagccgcgttggcgcaggcgtgcgatcgggccagcgtcatttacctgtatggggatttgggcgccggtaaaacgaccttcagccgcggtttcctgcaggcgctgggccatcagggcaatgtgaaaagcccgacctatacgctggtggagccttatgctctggagccgctgtcggtttatcactttgatctgtatcggctggccgatcctgaagaactcgaatttatgggcattcgcgactacttcgcgcagaatgccatttgcctggtggaatggccgcagcagggcgcgggcgtcttgccgccgccggatttggcgctgcatcttagctaccaggatcaaggtcgggaagcgcgtctggacgcgctgtccgactatggcagccaactcatcgaccgaatccacgggtaa

SEQ ID NO: 444037 - DNA, 1515 bp, Serratia marcescens
atgacgggccatagtgagaaacaatacgctgtcagtttaccacactctgtctggcctgcggactggatccgacaggcggagccgttagcggcggcggcggccgggatatcgctgtacgaactgatgctgcgtgcaggccgggcggcttaccaactggcttgcgatcgctatccggctgcgcgtcattggctggtgctgtgcgggcatggcaataacggcggtgatggctatgtggtcgcgcgtctggccaccgaagccggcgtgcgggtgacgctgatcgccggcacaggttcgcgccccttgccagaggaggcagcggcggcgcgccaggcctggctggatgccggcggtctggaactggcgagcgacagccgctggccggcggatatcgacctgatcatcgatggcctgttgggcagcgggctgacgagcgcgccgcgtgcgccggtggcggcattaatcgaggcggccaatcacagcgggctgccgattgtggcgctggatattccctccgggctactggccgccagcggcgcggttcccggtgcggcgatccgcgccgcgcacaccatcacctttatcggattgaagccgggcctgctgaccggccaggcgcgcgattgggtcgggcaacttcatcagagtacgctaggattatctgactggctggcacagcaaccggtgcagattcagcgcgttagtgcgcccgatctggcgggatggctgccaccgcgccgtccgtgttctcataaaggcgaacacgggcgcctgctgttggtcggtggcgatcgcggctttggcggtgcgatacgtatggccgctgaagcggcgctgcgcagcggtgcaggtcttgtgcgagtacttactcactatgagcatgtggcgccgttgctgacggcgcgtcccgagctgatggtgcaagcgctggatgacgaggccctgcagcgggcgcaggcgtgggctgatgtcacggtaattggcccgggtcttgggcaggaggcgtggggtcagaatgcgctgaaagttctccaatccagcgataaaccaacattatgggatgctgatgcgcttaacctgctggcattaaatcccgagaagcgtcagaatcgtgttattacgccgcatcccggcgaagcggcgcggctattgggctgtagcaccgctgacattgaaagtgatcgcttacttgccgtgcgacgtttggctgcggagtatggcggcgttgcggtgctgaaaggcgcggggacgctgatcgccgatgagcacggcgcgatggcgattgccgatgtcggcaacccaggtatggcgtccggcggtatgggcgacgtgctggcgggtattatcggcggattgctggcgcaaaagctctcgctgtatgatgccgcctgcgccggttgtgtggtccacggcgttgccgcagatagcgtggcggaaaaacagggcaccagagggttgctggcgaccgatttactgccggcgatcccctattacgttaatcctcagttggcaaaatag

SEQ ID NO: 444038 - DNA, 585 bp, Serratia marcescens
atggctggcaacgcggttgaattgtggtttacactgccggttcaattgcttactgcatggaagactcaaaatatgttgcgattctttaagcactgctcacaaggacgccgcgcctggctgttgatggctatcaccgcgctggcgctggaactgactgcgctctatttccagcacgttatgctgctgcaaccttgtgtgatgtgtatttatgagcgctgcgcgctgtttggcattctgggcgcctctctgttaggggcaatggcaccgaaaacgccactgcgctacgccgccatcctgctgtggatctacagcgcctgggaagggctgcagctggcgtggaaacacaccatgattatgctgcacccttcaccgttcaatacctgcgactttttcgtcagtttcccttcctggctgccgctggacaagtggatgccggccgtatttcatgcctccggcgactgttcggtgcgccaatggcagttcctgacgctggaaatgccgcagtggctggtcggcatcttcgccgcctacctgctggtcgccgcgatcgtgctgctcagccagatagtgcgttcacgtcagtaa

SEQ ID NO: 444039 - DNA, 1572 bp, Serratia marcescens
atggaaatgacaacacgcagcgccgttgtgaaaaattttctcggccaatcccctgactggtataaattaaccatcctgatatttttggttatcaatccgctggtctttttcctgataagccccttcgctgccggctggctgctggtcgcggaattcatcttcaccctggcgatggcgctcaagtgctacccgctacagcccggcggcctgctggcgctggaggcggtagctatcggcatgaccagcccggcgcacgtcggtgaagagatcgccaacaatattgaagtgctgctgctgctgatctttatggtggccggcatctactttatgaaacagctgctgctgttcgtatttaccaagctgctgctgaacatccgctccaaaatgctgctgtcgctggcgttttgtctggctgcggcggtgctctcggcgtttcttgacgccctgacggtcgtcgccgtggtaatcagcgtcgccagcggtttttattctatctaccacaatgtcgcctccaaccagccggaagacgcgcataacgtgaacgacgacagcggcatcgacggcgatgaccgcaaacagacgctggaacagttccgcgcctttctgcgcagcctgctgatgcacgctggcgtcggcaccgcgctcggtggcgtgatgaccatggtcggcgaaccgcagaacctgattatcgccaaaagcgccggctggggctttattgatttcttcctgcgtatggcgccggttaccctgccggtctttgtatgcggcctggtggtgtgtctgctggtggagcgctttggcgttttcggctatggtgcgcaactgcctgagcgcgtgcgcgaagtattgaccgagtttgaccgccaggccagcgccaagcgcaaccgccaggaaaaagtcaaactggtggtgcaggcgctgatcggcatctggctggtggcggcgttggctctacatctggcggaggtcggtctgattggcctgtcggtcattattctcgccacctcgctgtgcggcgtaaccgacgaacatgccatcggcaaggccttccaggaagccctgccgttcaccgccctgctgacggtatttttcaccgtggtggccgtaatcatcgaacagcatctgtttagcccggttatcgcgtttgtgctgcaggccgagccgtcggcgcagctgatgctgttctacgtgtttaacggcttgctgtcggcggtttccgataacgtctttgtcggcacggtctatatcaacgaagccaaagccgccctcaccagcggcgccatctcgctgaagcagtttgaaatgctggcggtggcgatcaacaccggcaccaacctgccttcggtcgctacgccaaacggacaggcggcgtttctgtttctgctgacctcggcgatcgccccgctggtgcgcctttcctatggacgtatggtctggatggcactgccatataccatcgttctggcgctggtcgggctgctgtgcgttgagtttaccctggcgcccgtgaccgacctgctgacgcagtggcactggctcacgctgccgcatctagaggctgcggggcactga

SEQ ID NO: 444040 - DNA, 1074 bp, Serratia marcescens
atgccccgcccaattaccgcaacgctgcacctggcggcgttcgacaacaatttacaggttatccgccgccatgcgcccgctgcgaaggtttggtcggtggtgaaggctaatgcctatggccacggtattaaacacgtctggcgcagcctggcgaatactgacggctttgcgttactggatctggcggaggcggtgctgctgcgtgaatccggttggcaaggaccgatcctgctgctggaggggttctttcagccgcaggacctggcgctgattgaccgttatcagttgaccaccgccgtacacagcgactggcagctggcggcgatcgccgaggcacggctcgcggcgccgctgaatatttatctgaagctgaatagcggcatgaaccggctgggctttgcgcccgagcggatacgcagcgtctggcaacgggcgcagggcatcgccaatatcggcgctatgacgctgatgagccacttcgcgactgccgatgatgcgcgtggcgtagcgcagcaaatgacgaccattgatcgcgcggcggcggaactgccgctgccgcgctgtctggccaattcggcggctacgctgtggcatccggatacgcacggcagttgggtgcggccgggcattatcttgtacggcgcatcgccgagcggcaactcggcggatattgccgcgacggggctacaggcgacgatgtcattgcgcagtgagattatcgcggtgcagacgctaaaatccggcgacagcgtcggctatggctggcgctataccgccagtgccgtacagcgaatcggcattgtcgcctgcggctatgccgacggttatccgcgccatgcgcagagcggcacgcctatctgggttgacggcgtattgacgcgcaccgtaggtacggtatcgatggatatgctggcggtggatctgacgccgtgcccgcaggcggctatcggtgctgaggtggaattgtgggggcggcatttgccggtggatgacgtggccgccgcagccggtaccctggggtacgagctgctgacggcattgacgccgcgggtgccggtggaagccggcgcataa

SEQ ID NO: 444041 - DNA, 1194 bp, Serratia marcescens
atgcaaaaatttctccttctcctgctgagtctggtcttgctgggcccgttaggcatcgacctctatctgccggcgataccggccatcgcgctgggcctgaacagcagcgaagcggtgatccaatccaccatttcgctgtttattctggtgctgggactggggcagatcgtcgccgggccgctggtcgacaactacggacgcaagccggtcgcgctggccggcattatcctgtatatgatcggcgccgccatggccgcgctggccaacagtccggcgctatttatcgcctcgcgcctgctgcaaggcatcgcggtctgctgcaccgccgtagtggcgtttagcggcgtgcgtgaccgtatgaacggcgacgatgccgcccgcgcctttggtttcctcaacggtacgctgaatattatcccggcgctggcgccgctgttgggcggattactggcggaagcgtttggctggcgcgcccctttctggttcctggtcggctacgcgctgctggtcttcgtgctgatcgctctgcgcctgccggaaacccgcccggcggatacgcggccggtaaaaggactccccgtacgccagtacgcacacatcctgcgtcagtcacgctttctctctttcgccgtggtcaatgcaggggccatgggcatggcgctcacctacgtgtcgctagcgcctaatgtgctgatgggcaccgccggtctgacgccgctgcaattttccctggcgttcggcgccaacggtttctggattatgctggtgagcttcttcgccaaccgggtgattcgcaaggtcggccggccgttttgtctggcaaccggcggcgtgctgatggggctggggtgccttgccctgctgtttgatatcaccttcctgacggccgatgcgcaaacccactggctggcctatatgctgccggttgccatcggctgcgccgggctggcgtttgtgatgggcccggccaccagctatgcgctggagccgtattccagcgaggccggagtagcctcggcgctggtcggtttcgtacagatggccggcggcgcggcgctgggactgctggcgatggcgctgcctctgcagccgaaaatggcgctggcgctggtgatggcggcgggctgtttactggcgctgcacgcccggcagcgcagtaaacaattaaagggacagttaaaccggatcggctga

SEQ ID NO: 444042 - DNA, 567 bp, Serratia marcescens
atgcaccatgtgatgttggatatagaaacgctggatgtgaagccaagcgcggtcattctggtggttgccgccgtatttttcgatcccaaaaccggtcagttgggcgaggaatttgaagcggccgtcagcccgcagaaggagcaagacggcaggacaataagcctggacaccgtcgcctggtgggccaggcaatccgatgaggcgcgtaaattggcctttggcggcagcgacagcttaaaacgcgtgctgaccaacctgagccgctttattcatatgcacagcagcgacacggtaaaagtctggggcaacggcaaagagtttgactgcgccatcctggagcacgccttccagcaactgacgatgccctgtccgtggaagttttggcacacgcaggatgtccgcaccctggtgacgctggcagaactgcacggctttaaccccaaaaaggcacggccgtttgaaggtacgccacaccgggcgctggacgatgccaaacaccaggcaaaatatgtcgccgatgtggtggccaactgctatttccgccacgatgccgcactgctgccctga

SEQ ID NO: 444043 - DNA, 177 bp, Serratia marcescens
gtgagaacgctgatctttatttgttgcatgttggggtatgcgctggtgctggggtatctgggcacctttgtggcagacaaagtctgcgaaggttacagcaactacagcaaaatctgccgcatggtggatatctctgaaccacatatctccaaaacgccgccacatccggcgaagtaa

SEQ ID NO: 444044 - DNA, 2118 bp, Serratia marcescens
atgtctgggatttttcctgtcaaacgctcccgtctgttatgcgctattgccctgtttttaccgctgtcctcctgggcggaggatacgctgctggtgaccgccaagccggcggacacggcggattcggcaactcatggttataccgccggcaccagccagggggcgacaaaaaccgaccgaccgctgattttaaccgggcaggcggtatcggtggtgacgcgtcagcagatgaccgaccaaaatgccttaacggtcaatgatgcgttgaagtatacgccgggtgtgttcaccaactttgccggcggggcgacgcgttatgacaccattgcgctgcggggctttcacggcggcgatgtgaataacacttttctggacgggctgaggctgctgagcgacagcggcagttacaacgcattgcaggttgatccctggttcctggagcgggttgacgtgattaaagggccgtcttcggtaatgtacggccaaagcattcctggcggtctggtggccttgaccagtaagcggccgcagtttgccaccgaagggcacctcaccctgacgggcggcaatcaccatacccagggcggcgcgtttgacgtgaccggcgcgctgtcggatcaatgggcataccgcctgacgggcatgacgcgcagcagcgataccatgtatgaccaccagcgcgaagaacgctacgcgattgcgccgtcgctgttatggcaaccgagtgaagatacctcgctgttgctgaaggcctatctgcaaaaagatccgtccggcggctatcacagtgcggtgccggcggacggcagcctgtatgccagtcagggcgacaaactggggcgcgggttctttgacggcgacagccgccataacgtattcaagcgttgggagcagatctacagctatgccttctcgcaccggtttaatgacgtctggacgttccgccaaaacgccagctacacccattcgaacgtcgagttggagcaggtgtatcaggcgggctggaatgaagagcataccttgctgaatcgctattacagcggatccagcacctcactggacgcctatgccgtggataaccagctggaagccgagttcgccaccggtccgttggaccataaagtgttgctggggctggactaccagcgcttccgcaataatctgtgggatgaaagcggcggagcgtcaccgttgaatccctataccggcgtagcgggggagccgttgctgaccgacgtggtgcgcaccgactcgcgccgtcactatcagcagaccggcgtctacctgcaggatgagatcgccttgaacaactggtatctcaacctggccggccgttacgatcgcctggagagtaaaaataccaatctgaccgccgacagcaccgattcgcgtaacgatcaccacttcagcggtcgtgcctcgctgctgtatcacttcgacagcggcttctcgccgtacgccagctacagctcggcgatcaccccagaggcgctggcggataatgacggccatatgctgaaacccagcaccagcaagcagtatgaggtcggcctgaagtatcagccgccgggcagcacatcgttgtacagcgtgtcgctgtatgacctcacgcaaaaggacgtggcgaaccgggtggtgcagcaaagttattatgaacctgccggtaaggtgcattcgcaggggattgagctggaagcgcgttcccaggtgaccgatcgccttaatgtgattgcgggttacacctataacaaggtgaaatttaaagacgccatcgacggcaataacggcaatacgccatatttggcgccgaaccaaatggcgacgctgtggggacaatatgatgcgggctacgggctgaatcttggcgcgggcgtgcgttatatcggcaagcagtgggcggataatgaaaatacccaacgcattccgtccgtgaccttgctggacgcatcagtacgtatgaacctggcgcaggtggcgccgagcctgaaaggggcgtacgtacagctgaacgtcaataatctggcggacagaaagtatgttgcggcctgttacggcaccagctattgctattgggggcaggaacgcagcgtggtcgcgacggtcggttacgacttctga

SEQ ID NO: 444045 - DNA, 177 bp, Serratia marcescens
atgtcgtcgctgtgggttgcaacacaatatttttatttgtttggctttttattctctgtggtttttacttatctggtcagccgggatacgattaaaattcgctgtctcagcgctctcaccatcggcctcacctggccgctcagtttaccggtcgtgctcatgttttccctgttctga

SEQ ID NO: 444046 - DNA, 162 bp, Serratia marcescens
atgggcttttggcgtatcgtatttaccatccttataccgccactgggcgtgctgctgggcaaaggattaggcggcgcatttattttgaatattattctgacgttgctgggatatttcccgggcctgattcatgcgttttgggtgcagaccaaagattcctga

SEQ ID NO: 444047 - DNA, 855 bp, Serratia marcescens
atgacaacgcagtatcacggatggcctagggacgtctgcatcggggagcgcgttgccgggctggcgacgcaacgtgtttatacaagaacaacgaggggaatcgaacgggtgaaaattttcaaattcaaaacgttggcaatcgccggtgcgctgctgtgcgcgcagggggctcaggcgggaacctggtcgctgggggcatcggcgctgttgacgccggacccttacaagggcaacaacacccgcctgtatccggtgccggtgatcaactatgacagcgaggatttttacttccatacgctgaccgccggttattacctgtggaacgatgaggtcaacaaactcagcgtgatggcgtactattcaccgctgcactttaagcccggcgacagcgatgacgatagcatgaagcggctggacaaacgtcgcggcacgctgatggccgggatggcctattcgcataatgccgagtggggcacgctgcgtgcagccttcagcggcgatacgctggataacagcaatggattggtcggcgatctggcctatctgtacaagttccagctgggcgactggagcctggccccgggcgtcggcgtgacctggagcagcaaaaaccagaataaatactactacggcgtgagcgacaacgagtcgcgccgcagcggcctgaacagctacaagccaagcgacagctgggcgccatacctggagctgacggcgaactatcagatcaacaagagctggaacgccttctttatgggacgttacgtgcgcctgtctgatgaagttaaagacagcccgatggtggactcgtcttacgacggcatgctgtggagcggtgtcacgtacaccttctga

SEQ ID NO: 444048 - DNA, 876 bp, Serratia marcescens
atgaacgaaaaagttttcaccctgcccattagcaaacagatttctccgtatatcagccaacgacagctggacgagttaagcgtcgtggtggtgtctcaccccaaagttcgcgcggcggtaacgctgcaaggcgcgcatctgatcggctggcagccgagcggcgaacggcccgtcatctggttgagcgaaaacacgccgtttaaagccggcaacgccatccgcggcggcgtaccgatctgctggccatggttcggcccggccggcaagccttcgcacggctttgcgcgtaatcaaccctggcgcctgaccgcgcatgacgaagatcaggatggcgtcatcctcacttttacgctgcaggataacgaacagacccgcaagctgtggccgcacgcctttacgctaatcgcccgcttcaagctgggggagagctgtgaaatcgagctggaatcacacggcgactatcaggccactgcagcgctgcacagctatttccaaatcggcgatatcgccagggtcagcgttgccgggcttggagaaacgtatctggataaagtggcaaacggcgctgaaacccgccagagcggcgatgtgaccttcagcggccagaccgaccgtatttacacccagccgacgacatgcagcctgatcaaggatcaggcgctgcaacgcacgattgaagtgcaacaccactatatgagcgatgtgatcgcctggaatccgggcgctgaactctcctgcagcatggcggatatggccaacgacggctacaaaaccatggtgtgtgttgaaaccggacgactcaacaagcctctgctggcgcagggcgaacagccggcccgtctggcggtgaccttccgctgccgcaaagacgcctaa

SEQ ID NO: 444049 - DNA, 414 bp, Serratia marcescens
atgagcaaagatcacgccccccacaccccggtcacggaactgaatgaaatacaacgttatgtgacccaggaacacggtacggaagcgccgtattccggcaaattgctgcagaacaaacgcgatggtctctaccattgcctctgctgtaatgcgccgctgttttattccgaaagcaagtatgactccggctgtggctggccaagtttctatgagccggtgtccgacgatgccatccgctatcttgatgataattcacataatatgcagcgagttgagattcgctgcggtaactgtgatgcgcacctgggccacgtgttccccgacggcccgcagccgaccggcgagcgttattgcgttaactccgcctcgctgagttttaccgacgccgccaacggcgagaagacggcaggctga

SEQ ID NO: 444050 - DNA, 633 bp, Serratia marcescens
atgaacagcgccctgttattgattgatttgcaaaacgacttctgccccggcggcgcattggcggtcacagatggcgatgccgtcatcgcagtggccaaccaggcgatcgcccccagccacgaccgcggcgactgggtggttgccagtcaggactggaatccgatgcagcatcgcagttttgccgttaattcatcagggctggtcggcgaattgggtgagctggaaggattgccgcaggtctggtggccggttcactgcgtccaggaaagcgccggcgccgagtttcatccgcgcctgcagcagcggcaaatcgatgcggtatttcgcaagggacaggatccggccatcgacagctacagcgcgttttttgataacggccaccgggcaaaaaccgcgctggatgattggctgcaacaacgcaacgtcagcacgctgacgatcatggggctggcaaccgactactgcgtaaagttcagcgtgctggacgccctgcagctgggttacgccgttcaggtcattagcgacggctgccgcggcgttaacctgcagcccgatgacagcgatcgggcgctgcaggcaatgcagcaggccggcgcgcaattagtgaccttgtcacaatttctgcagcgctaa

SEQ ID NO: 444051 - DNA, 1854 bp, Serratia marcescens
atgcatactttgtggcgtatcattgccggaacgttcaggtggacatggcgtctgctgaattttgtcagagagtttattctcaacctgtttttaatcgtgctgattttgatcggcgtcggcatctattttgccttccagagcaccccgccggctgaaagcacccgtggcgcactgttggtcaacctgagcggcgtggtggtcgatcagcccagcatgaaaaaccgtctcctgcaacgcagccgcgaattcctcggcgcctccgccagcgagctgcaggagaactctctgttcgatctggtcgacagcatccgtaaggccaaggacgataaaaacattaccgggttggtactgcagctgaatgattttgccggtgccgatcagccatcgctgcaatatatcggcaaagcgctacgggagttccgcgacagcggcaaaccgatctacgccattggcgatagctataaccagacgcaatactatctggccagctacgccaacaagatttacctgtcgccgcagggcaacgtcgacctgcacggtttcgccaccaacaacctgtattacaagaccctgctcgacaaactgaaggtcagcaccaatatcttccgcgtcggcacctataaatcggcggttgagccgctgctgcgcgacgacatgtcgccggccgcgcgcgaagcggacagccgctggataggcaacctgtggcagaactacctggacaccgtggcagccaaccgccaaattacgccgcagcagctgttccccggcgctgccggcgttctcagcggtttgcaggccgcccagggcgacaccgccaagtatgcgctcgacaacaaactggtggatgagctggcttcacgcacagtaatggaaaataagctggtcaaggcctttggctggaataaacagaccaacgattttaacgccatcagcatttacgactaccagccggcgccaacgccggagcaaggcggccagatcgccgtcgtgttcgccaatggcgccattatggacggccagcagacgccgggcacggtcggcggcgacaccaccgctgcggaactgcgccaggcgcgtctggacccgaaagtaaaagccatcgtattgcgggttaacagcccgggcggcagcgtcagcgcttccgaggtgatccgttccgaactggcggccgcccgcgccgccggcaaaccggtggtggtctcaatgggcggcatggcggcctccggcggttactggatctctacgccggcgaattacattatcgccagcccaagcaccctgaccggctcgatcggcatcttcggcgtgatcaatacctatcaggacacgctgggcagcatcggcgtgcacaccgatggcgtggcgacctcaccgctggccgatctggcggtaaccaaagcgctgccgccggagtttgcgcagatgatgcagctcaacattgagaacggctacaagcgctttatcggcctggtggcggactcgcgcaaaatgacgccggaacaggtggataaaattgcgcagggccacgtctggaccggcagcgacgccaaaaccaacggtctggtcgatcaattgggtgatttcgatgacgcggtgaagaaagccgccgagctggccaaactgaagcagtggcagctgaactggtttgttgactcaccgagcatggcggatatggtgctcagccagtttggcgtctccatccacgccatgctgcctgccgccatccaatccatgctgccggcaccgctggcttcggtggcgatggcgatgaaagagcagccgggattgttcaataacatgaacgatccacagaaccgctacgccatttgtctgacctgcggcgaggtgcgctaa

SEQ ID NO: 444052 - DNA, 552 bp, Serratia marcescens
atggatgcgctggatctgttgttgaaccgccgttcggccgctcgcctggcggcccctgcgccgagtggtgaagtacggcaaaatattatcaatgccggtttacgcgcgcccgaccacggcgcgctgcagccttggcgtttcgtgctgattgaagagcaggggctcgagcgtttcagccagctgttgcagacggccgccagacaggatgggttggacgatgcggcgattgacaaggccagacaggcgccgttccgtgcgccgctgattattaccgtgatcgcccattgcagcgacaaccccaaggtaccgcaatgggagcaggtggtgtccgccggctgcgcagtgcaggcgatgcagatggccgcgctggcgcaaggatttaacggtatctggcgcaccggcgcctggaccgcgcatgcgcaggtgcgtgaagcgttcggctgccgtgagcaggacgaaatcgtcggtttcctgtatctgggcacgccgcagctgaaggcggccagcaaagttgtcgcgccggatagcgcgccgttcgtcagctacttctaa

SEQ ID NO: 444053 - DNA, 1044 bp, Serratia marcescens
atgacatcgccaaccatccgcctgacccagtacagccacggtgctggctgcggctgcaagatttctccgcaagtactcgaaactattctgcacagcgaacaggccaaattcgtcgatccgcgtttgctggtgggtaatgaaacccgcgatgatgcggcggtttacgatatcggcaacggcaccggcgtgatcagcacgactgatttctttatgccgatcgtcgacgatccatttgatttcggccgtatcgccgcggccaacgccatcagcgacgtgtatgccatgggcggcaaaccgatcatggcgattgccattcttggctggccggtggacaaactgccgccagaagtggcgcagcaggtgatcgacggcggacgttatgcctgccggcaggcggggattgcgctggccggcggccattccatcgatgcgccggagccgatctttggcctggcggtcaccggcatcgtcagcaccgaacgggtgaaaaagaacagcgctgcgcaggccggcgccagattattcctgaccaaaccgctggggatcggcgtgctcaccaccgccgagaagaaaagccagctgcggccagaacacgccgggctggcgaccgaggtgatgtgccggctgaacctgccgggcgctgaatttgccgaggtcgacggcgtgagtgcgatgactgatgtgacaggctttggcctgttgggccacctgagcgaaatgtgtcagggctccgggctacaggcgacgctctggtttgaccgggtgccgaagctgccggacgttgaatgctatatcgccgaaggctgcgtgccgggcggcaccggccgcaactttgacagttacggccacctgataggcccgatgagtgacgtacagcgtcagctgctgtgcgatccgcagacctcaggcggactgctgctggcggtgatgccggagggcgaagcgcaggtgcaggcgattgccgcgcgccacgatctgcggttggaagcggttggcgaactgcacgacgcggtggccggtaaaccgatgatcgaggttcagtag

SEQ ID NO: 444054 - DNA, 1116 bp, Serratia marcescens
gtgacggtacaaagcagggcggattgcaacgactaccgccagattttcctgcaggatgtgccgctgattgacgtgcgcgcaccggttgaattcagcgccggcgcgttcccgcaggcggtgaatttgcctttgatgaatgaccgggaacggcaggctgtgggcacctgttataagcagcatggccagcagcaggcgattgccttgggccatagcctggtgaacggcacactccgccaggcgcgaaccgaagcctggctggccgcctgcgccgaacggccggcgggttatatttactgcttccgcggcgggttgcgctcacagttggtgcagcaatggctgcacgaagcgggcgttgactacccgcgcattgtcggcggctataaggcgttacgccattatctgctgaatatcctcgaatacagcgccgagctgccgatggtgatcgtcggcggcaataccggcagcggcaaaaccctgatggtgaatgagctgtcgaccggtatcgatctggaagggttggcgcgccatcgcgggtcatcatttggccgcacgctgaccgggcaaagtgcacagatcgattttgagaatcgtctggctgtgttattgctgaaaaaacagcatggtggctgccgtcagtgggtgctggaagatgagagccgcctgattggcgccaacagcataccgctgccgatgttcaatcgtatgcagcaggcgccggtcgtggtgattgacgacccgttcgacgtgcgtctggcgcgtctgcaggcggagtatattgacgatatgcgccaggcatttacccaggcctacggcgaacaggacggctggcagcgctacggcgaatatctccaccacgggctgttcgccattcggcgtcgtttaggcatggaacgctaccagttgctgacgcagcggctggaatgggcgctgcagttccagctagccagcggcagcagtaacgcccaccaagagtggctggtgccgttgctgcagtactattacgacccgatgtaccgtttccagttggaaaagaaagcccggcggattgtgttccgcggcaactatgctgaagtaagagaattcctgatgacgtatagccagaaaaacggtgaataa

SEQ ID NO: 444055 - DNA, 288 bp, Serratia marcescens
atgaattacccgatgccgttggcgatcgccgtcgctggcatgctgttttcctcaatggccggggcacatcgcggcgacgtagacgtggtgctgccggtcgcgccggagatctggggcgcagcgaagagtacggcggcacctgcgccatgcctgcgctgctgtatatatcaagatcagaactattcggaaggggcgctgctgaaggttgagggtgagttattgcagtgtcagcgtgataaaacacaggtaggcacccattcgttgatttgggtgcgcctgagcaagtga

SEQ ID NO: 444056 - DNA, 405 bp, Serratia marcescens
atgaaaaccatagacgtggttgcggccattattgaacgcgacggcaaaattctgttggcacaacgcgatgcgcaaagcgatcaggccggcttatgggagtttcccggcggaaaggtcgaggccggcgagagccagccgcaggcgttagccagagagctggcggaagaactgggcattgaggcggttatcggcgactatgtcgccagcaataactggcagacgggtgaacgccttattcgtctgcatgcctggcgggttggtgcgttcagcggcgaattgcagcaccgctgtcattcagcgctggtttgggtagagccgcaacgggccggcgcctacccgctggcgccggcggacattccgctgctggctgactatctgcgcggcgaaacgccacatcactcgtga

SEQ ID NO: 444057 - DNA, 573 bp, Serratia marcescens
atgcgtcataatatttgcgttttttgcggcgccagtgaaggcgttaaccccgattatgccgagcacgcccgcaagctcggacacgctttagccactcagggacgacgtttaatctatggaggcggcaagaaaggcttgatgggcattgtcgcggatgcggtactggaggcgggaggagaagccattggcattatccctgagcgtttggtcgaagcggaaaccgcgcatcgcggcctgaccagcctggaagtggtgcccgatatgcatacccgtaaggcgcgcatggccgcacaggcggacgcgtttatcgccctgccgggcggcatcggcacgttggaagaactgttcgaaatctggacctggggccaaatcggctatcacaataaacccgtcgggctgctggatatcaatggcttctaccgccctttaaatcacttcctgcagcacgttgccgatcagggctttatgcgccatgactatctcggcaccctgcataccagcgactcagcgtctacattgctgcagcagttcgatgactaccaaccgaaaaattacgatcgctgggcaaaataa

SEQ ID NO: 444058 - DNA, 528 bp, Serratia marcescens
atgcgctcaatgtgtctgaatatcggccagtatcgacaatggccgcaggttttaggagttattttgtctgaattatgcccctgcggcagcggcgccgggtacaacgcctgctgtgagccttatatcagcggcgttgcaaccgcaccaacgccaggcaagctgatgcgctcgcgctatacggcctatgtcaagcagcaggtcgattacctgatcgccagctggcatccggattgcaacgccgcacagtggcgcgacgccatcgtcgaaagttttcaaaccacccgctggctgggcctaacgattgtggcggaacaaaacggccgagacgacgatgaaggcttcgtcgagtttatagcccgctttaccgacggcgaccatgccagccctcaggccatgcatgaacgctcccgcttccttcgccaggagcaacgctggtactatatcgacggcacccggccgcaaccgggacgaaacgacccttgcccctgcggctcggggaaaaaatataaaaaatgctgcgggcgttaa

SEQ ID NO: 444059 - DNA, 900 bp, Serratia marcescens
atgcgacaaatcaaaattgggctggcgttaggggcgggatcggccaaaggatgggcgcatatcggcgtcatcaatgccctgaagaaaatggggatcgagcctgatattgtcgccggttgttccgtcggttcgctggtgggtgcggcttatgcctgtcaccggctgccggcgatggagaaatgggtgcgctcattcagctactgggacgtgattcgtctgatggatctgtcctggcggcgcggcggcctgctgcgcggtgaacgggtctttaatgcggtggggcaactgctgaatattaacgacattgaacagtgtgcgctgaaatttggcgcggtggccactaacctcagcaccggccgcgaattatggttaacccagggggatattcatcaggccgtgcgggcgtcgtgcagtatgccggggttgctgtcgccggtttggttcgacggttactggctggtggacggcgcggtggtgaacccggtgcctatctcgttgacccgtgcgctgggggcggatatcgtcatcgcggttgatttgcagcatgatgcgcatctaatgcagcaggatctgttttcggtacgcagcgaagcggaggagccggtggcgatggcggataactggcgcggacggttgcgtgagcgtatcggtaaaatgcgcatcaaaaaaaccaactttacgccgaccgcgatggaaatcatgagcacatcgattcaagtgttagagaatcgtctgaaacgaaaccgtatggcgggcgatccgccggatgtcctgatccaaccttactgtccgcaaatatccacgctggattttcatcgggcggaggaagctatcgccgcgggaagcctggcggtggaaaaacagcttgagcagctgttgccgttgataaaacaaaaatag

SEQ ID NO: 444060 - DNA, 918 bp, Serratia marcescens
atgcctgctttaaatcggaaagtcagaaaagcagtgatcccggtggctggattaggtacgcggatgttaccggcaacgaaagctataccgaaagagatgctgccgctggtggataagcctctgatccaatacgttgtcaatgaatgtattgccgctgggatcaacgaaatcgttttggtaacgcactcctctaaaaattctatcgaaaaccattttgataccagctttgaactggaagccatgctggaaaaacgcgtgaagcgccagttgcttgacgaggttcagtctatttgtccgccaggcgtaacggttatgcaggtgcgtcagggggttgcgaaaggcttgggccacgcgatcatgtgcgcctatccgttggtcggtgatgagccggtagcggtggtgctgccggatgtcattctggatgaatacagtgcggatctgaccaaagataacctgcatgacatgctgacgcgtttcgaacagagcggcaccagccagattatggttgaaccggtaccgcaggaaaacgtcggcagctacggcgtggccgattgtaaaggttacgatctgcagccgggcgaaagcgcgccaatggtcagcgtggtagaaaaaccatcgccggcgcaggcgccgtccaacctggcgatcgtcggacgttatgtattgtcagccgatatctggtcgctgctggcgaagactcctccgggagccggtgatgaaatccaactgactgatgctatcgatatgctgatgcgtaaagagccggttgaggcctatcacctgaagggtaaaagccacgattgcggcaataaactgggctatatgcaggcatttgtcgagtacgggctgcgtcacgctagcttgggtaaggaattttctcagtggctgaaacaggttgttgccactaagcaagcataa

SEQ ID NO: 444061 - DNA, 1635 bp, Serratia marcescens
atgcagcaagtcgtaacgcgtacgcctttagccgtttttattaccggattgtttttttctgcgctgaatgtcagccaggcggctcaggtgcctgccggtattcaactggcaccgcagcaaactattgtggtgaataatggttcggaagtggcgtcactcgatccgcataaagtagagggcaacccggaaagcaacataattctcaatttactggaagggctggtgagttccgacgccaacggccatgtggtgccggcggttgcggagcgttgggagaatgagcagtttaaagtctggacttttcatctgcgtaatacggcacgctggagcgacggctccccggtgactgcggaagatttcgtctatagctggcgtcgtctggcggatcctaacgtcgcgtcgccttatgccagctacctgcagtacgccaagattgccaatgccgacgcgattctgagcggtaaaaagccgccgcaggacctgggcgtgaaagcccttgacgcacacaccctgcaggtgacgctgagcgagccggtgccttatttgctcagtatgctgacgcatacctcgatgaaaccggtcaagcagtcggtggtagagaagtttggcgataaatggacgctgccgcagcattacgtcggcaatggcgcctaccggctgaagcagtgggtggttaacgagcgcatcgtgctggaacgcagcaacacctattggaacaatgcggcgtcggtgattgagcaagccaccttcctgccgatcgcctcagaagtcagcgacgttaatcgctaccgcagcggtgagatcgatatcagtaacagcgccattccgccaacgctgtttggcaagatgaaacgtgaaatccctgagcaactgcacgtcaatccttacctgtgtacgttctattacgaaatcaataataagaaggcgccgtttaccgatccgcgggtgcgtgaagcggtgaagctgacgctggaccgcgacatcatcgccaacaaaattatggggcagggacagatcccggcttatgggtttacgccaacctttaccgagggtggcaactttaccgcgcctgagtgggcgacatggacacaggcccagcgcaatcaacgcgccaggcaactgctgagcgaagccggctacggtgcgggtaacccgctgaaattctcgctgctgtacaacacttccgatcaaaacaaacagcaggcgatagccgctgcgtcgatgtggaaaaagaacctcggcgcagacgttaccctgagaaaccaggagtggaaaacgtcactggaaagtcgccatcagggggagtttgacgttgcacgtgccacctggtgcggcgattacaacgaaccgagcgccttcctgaatctggcgctctccaacagcagcaacaataccctgttctataaaaatgcacactttgacgcgctgatggccgccagcctgcaggcgccggacgccgccgcgcgcaccgcggtgtatcagcaggcggagacgcagctggataaagattcggcgctggtgccggtttattaccgcgtcagtgcgcgcctgatcaagccgacggtgggtgggttcaccggtaaagatccgctcgattatatcgatgtgaaaaatctgtacatgatcaagcagtaa

SEQ ID NO: 444062 - DNA, 1473 bp, Serratia marcescens
atgcacgcaaataaccgctggttgatcctggcaatgatctccagcgcgctttttttaattatcattgatatgaccgtgctgtacaccgcgctgccgcggctgacgacggcgttggaagccagcgcatcggaaaaattatggatcgttaacgcctatccgctggtggtcgccggtctgctcccgggcgccggcatgctcagcgaccgtatcggccacaaaaaaatgtttatcgccggtctgccgatgtttgccgtcgcctcgctgtgcgccgcctttgcccccagcgccgcaatgctgattgccgcccgcgcctttttggccgtcggtgccgccatgatgatgccagcgacgctttctatcgtacgccacgtatttaccgagccaagcgaacgggcgctggcgatcggcatctggtcggcggtcgcctccggcggcgcggcggtcgggccggtagtcggcggcatcttgctggaatacttctggtggggatcggtatttctgatcaacgttccggtggtattggtcgtgctgccgctggcctggcggctgattccccagtgcggcggcaacagccagcgtccctttgacgtggcgggttcgctgcagattatggtggggctggtcagcagcatttatgcgttaaaagaactgagcaagacccagccgtcactgccgattctggcgctttccgctacgttggggctgctgtttttaatcctgttcgcgcgtcggcagcgtcgggcggcatcgccgatgattgatttctcgctgttcagcaaccggctgttcgccagcggcgtcaccgtggcggtgatctcgatgatcgcgctggtgggcattgagctggtattgagccagcgcctgcaactggtcagcggcctgacgccgctgcaggccgggctgtttatcctgccgattccgctggcttccgccctttccggcccgctggcggggctgctgctgccgcgctggggagagcggcctctgatactgggcggtctgctgctgaccacgctggccatcgccggactgattgggtgttatcacggtgcgccgctatggcaactggcgctgctatttgccgccggctttggtctgggtgccgccatcaccgccgcatccaccgccattatgctcaatgcgccggaagaaaagtccggtatggcggcgtcgattgaagatgtggcctatgagttgggcagcgttttgggcatcacgctgctgggtggcctgatgaccgtggtttacagttacagcctgctcctgcctgccgatctaccggtgacgcagttggcctatgacagcctggatgaggcgttacgccaggccggtgaactgagtgcggatcagggagcgacgctgattaaactggcgcgcgcctcctttgaccaggcctttatcgccgtgctggccgccgctgccgccctgatggccatcggcgccgctgtgctttcccgcgcgatgaaaaagtaa

SEQ ID NO: 444063 - DNA, 555 bp, Serratia marcescens
atggggcgacagcgaagtatcgatcgcgatcgagtgttggatgcggcggaagaaatcattgcaacgcaaggggcatccggcctgacgattgattccgtggcgaaggcaatggggatttcgaagggcggcgtacagtactgtttcggcagtaaggatgcgctgattgacgccatgtttgaccgctggggcaaggcgtatgataacgttttcgaccagattgccggcgacgaccctgcaccgttgaccagggtgcgggcgcatatgctggcgacctgcaactccgatcacacctccagcgccaaggcggcaggcctgatggcgaccctgatacaaacgccggaacatctgcagagcagccgggagtggtaccgcgagcggattgatggcctcgatctggcctgcgaagaggataaacgcgcccggctggcgttcctggccactgaaggcgcctttatgctgcgttactttggtttgatggatatctcggaacaggagtgggaatccatgtttgccgatatgcagcgctatattctggatacgcagtcggcgtcataa

SEQ ID NO: 444064 - DNA, 297 bp, Serratia marcescens
atgctgtatctgatctatgcgcaagacctgcccggcacgctggaagaccgtctggcggtgcgcccggcgcatctcgcccgcctgcaggcgctgcgcgatgaaggccgtctggtggtggccgggccgaaccccgccatcgacagtaacgatcccggcagcgccggctttaccggttcgacggtgatcgccgagtttgagtcgctgagcgctgcgcagcagtgggcgcagcaggatccctacgttgccgccggcgtgtacggcgacgtggtggtcaaacccttcaaacaggtattttag

SEQ ID NO: 444065 - DNA, 807 bp, Serratia marcescens
atgggcttttcctctcctgaaaacggcggtcacgcgctcgacctgagcaccaaagatacctgcggcctgccggtatttggcgtagccgtgcgctaccctgcgggccatatcgtccccttgcataaacatgcgtatggtcatctgatatatgccaatcacggtctgttacgtgtggaagctgaaagcggacaatggctggtgccgcctacggcggcggtctggctgcgctctggcgtggcgcaccgtctggttgcccccgtggcgctgcaagcatgcggcctgttcgtgcgcgaagatgtctgcccccgcctgccggagcgcgattgcgtcgtccatgtctccggcctgctgcgcgagttgatcatggcgctggcccaggccgaccaccagatcataccgtctaaacgtatacatttgctcggtgagcttttggttgaagaactacatacccagccggcgctgccgcttcatctgccgtggccaacgggcgatgccagcaacccggtgcagcatgtatgccaggcgctactggacaacccaggcgatagcgccaccgccgtcgagtgggcaaacaggctggcaatgggcgacaaaacgttccaccggcgctttcttcaatcgaccggtatgaccttcggcaaatggcgtcagcaactgcggttgatgtcgtcgttaacgctattgatgcagggaataccgatcacgcaggtggcgctggcgagtggttacgatagccacagcgcctacagcacggcattcagtaagcaattcggccggccgccttcggtatttgctgcgaatctataa

SEQ ID NO: 444066 - DNA, 1677 bp, Serratia marcescens
atgctgaccgatccttcccaaaaataccgtcccatctcaccggtcgttcttgccgagcgtcaatggccatcacgtaccctgacgcaggccccgatctggctgtccaccgatttgcgcgacggcaatcaggcgttgtttgagccgatgaatcgcgaacgcaagctgcgcttgttccacaaattggtgcgcatcggtttcaaagaaattgaagtcggttttcccgccgcatcgcgcactgattttgacattgttcgccaccttattgacgtagggcagatccctgatgacgtcaccccgatggtcatgacgcaactgcgggatgatctgatcgccgagacggtgcgcagcgtggcaggcgcgcggcgcgtgatcgtgcatttctacaacgccatcgcacccgcatggcgcgagatggtgttcggcatgggcgtaccgcagattatcgaaatggtagaacgccacattacgctgttcaggcaactgacggatgcccatccggaaaccgaatgggtcttgcaatactcgcctgaaactttctgcatggccgagctggatgtttcactggccgtctgcaacgccgctattcgtgcctgggatgccgggccgcagcgcgcgatgatcatcaacctgccaaccacggtagaagtctctacgcccaacgtcttcgccgaccagattgaatggatggatcggcggttggaacggcgcgagcacattgtgctgtccgtgcatccgcataatgaccgggggacgggcgtggcctgcgccgaacaagccatgctggccggtgcgcaacgggtcgaaggctgcctgtttggcaatggcgaacgcagtggcaacctcgatgtggtgacgctggcgctgaacctgtatacgcaaggcatcgcgcctgggttagatttttccgacattgcggcgattgcccgcgtggccgaggagtgtaccgctctgcccattcacccgcgacatccgtatgtgggcgacctggtattcacggcgttctccggctcgcaccaggatgccatcgccaagggtctgaacgcgcaaaagggtgatgcgatttggcgtgtgccttatttgcccattgaccccaaagacctgggccgaacctacgacagcatcgtgcgcgtcaatagccagtcgggaaagggcggtatcgcatttttgctgcaacgcgatcacggcatcaccatgccgcgccgcatgcaggtggagttcagcgccatcgttcaggctctggccgacggcagcgaaacggaactgaccagcgagcaaatatgggcggtgttcgaacgcacttatcttgccccgacatgggaacagacccgtttcatttatcgcgggcatcgcctgttcgagcacgcggacgggcagggtatcgcgttggaaatggcggatgcggagggcaatatcaagacggtcgaggggactggcaacggcccgattgccgcgacggtagcggcgttaggccaatcgttacgcatcgatagctatgaggagcgcagcctgggcgcgggttccggtgcggtggcgctggccattgtggaggctgccatgcccggcgtgcccggctcacgttttggcgtgggtcaacacgcgaacatcgtcactgcttcggtactggcggtgttgagcgcggcggccaggttctcgccgccagatgaaacggtcggctga

SEQ ID NO: 444067 - DNA, 753 bp, Serratia marcescens
atgctgctaaaaaagatgttcccaattcgccgtttgtcagtgccgattgtcctctccgttggcttacacagcgccctggtggccgctttactctatgcctccgtcaaggaggtgatgatgccgcccaagccagaggatgcgccgatcagcgtcatgatggtcaataccgccgcgctggcggaaccgccgccgccggcgcctgccgagccggagcctgagccgcaggtagaaccagagccggaacctgaaccgatcccggagccgccgccggtgccgaaagcgattcccaagccggaaccggtgaagccgaaaccaaagcctaagccaaaaccgaagccgaaggtggaaaaaacggtaaaacgcgagccgaagaaagccgagccgcgtcagccttcgccgtttgaaaatgatgcgccggccaaaccggtcgataaagcgccggtgaagcaggcgccggcagcgccggtgcaggggcgttcaaccgataccgggccgaagccgctgagccgcgtggcgccatcatacccgccgcgtgcacaggcgctgcagattgagggcagagtgcgggtacagttcgacgtcgacagcgatggccgcatcagcaacgtacgcattttgtcggcccagccgcgcaatatgttcgagcgtgaggtgaaacaggcgatgcgtaaatggcgttatgaaccgaaagcagcgaaagaccgcatcgtcaatattcagttcaaactggacggcaccgcctcgctgaattaa

SEQ ID NO: 444068 - DNA, 753 bp, Serratia marcescens
atgtccatcacggctaacactgtgtaccgtgacagttttaactttttccgcaaccagctggctacgattctgctgctggcgctgctgaccgcgtttatttcgatactgctcgatcaggcattccagcccgacgccgaacagctcaagatactggacgccgcgtttaatgagctatctacatccaccgggatggggctgcaggagtttgtggcgcagatgaccccggaacagcaaatggtgatgctgaaaaaatcagccgcggccacctttgccgcgctggtggggaatttactgttggtcggcggtatgctgacgctgatccgtctggtttctcaggggcagccggtcagcgcgctgcgtgcgatcggcgcttccgcgccggagttgccgcgcctgctgctgctgctgtttatctgcaccttgctgattcagctcggcctgacgctgtttgtcgtgcccggggtgattatcgccgtcgcattttcgctggcgccggtgatttgctctgcagataagcaaggcgtgttcgcgtcgctgcggcagagcgccaagctggcctttgccaacgcccggctgattgtaccggccatgatgctgtggctggcggccaagctgctggtgctgctgctggtcagccacctgtcggcgctggcgccaagcgttgccggcgtggtgctgaccgcgctgagcaatctggtgaccgcgctgctgctggtatatctgttccgtctgtatatgctgctgcgcaactga

SEQ ID NO: 444069 - DNA, 441 bp, Serratia marcescens
atgagcgaaattctcaatccctgtgttagctgtggcgcgtgctgcgcctattttcgagtgtcattctattgggctgaaggcgatgacggcggcggcgtggtgccaagcgcgctcaccgagccgttaaccccgttcctgcgctgtatgcagggaaccaacagcaggtctccgcgctgcaccgcgctcgacggtgaaatcggccaggccgtatcctgttctatttaccttaaccggccgacgccgtgccgcgaatttgacgcctcgggcgaaaacgggctgcgcaatgaagcctgcgatcgcgcacgcgaacgctacggcctgccgccgctgcccgttcctcagccgctggcgctgccggaaacgataatcgctgaagaaatcagcgccatagcgcttgcggggtgccacagcgagccggaacaaggtacaatccaccactga

SEQ ID NO: 444070 - DNA, 654 bp, Serratia marcescens
atgaagaagactactttagcggtattggcggcgatggtcgcgccaatggtgccaatggcggcaaatgcgcatcaggccggggatttcctgctgcgcgctggcgcggcgacggtgcgtccgaccaccggttcggatgacgtgctgggtcagggctcattcgacgccagtaacaatacccagcttgggctgactttcggctatatggtaacggacaatatcggcgttgaattgctggcggcaaccccgttccgccataaagtgtcgctcagcggccaggcggtcagcggcgatatcgctaccgtgcaccacctgccgccgacgctgatggcgcaatattactttggcgaccgtcaggataagctgcgtccttatctgggcgtgggcgtcaactacaccaccttctttgatgaaaaattcaatcagaaaggcaaggacaccggtctgagcaacctgagcctgaaagactcctggggcgttgcggcgcaggctggcctggactataacctggatgagcactggatgctgaacatgtcagtgtggtggatgaacatcgaaaccaaagcccgctttgacgatgcgtccggcggccatcacagcattgatacgcgcctggatccgtgggtattcatgtttggtgccggctaccgtttctaa

SEQ ID NO: 444071 - DNA, 807 bp, Serratia marcescens
atggaacgttatcagcaactgttcaagcgcctggcgagccggcaggaaggcgccttcgtgccgttcgtcacgctgggcgaccctaacccgacgctgtcgctgcagattatcgatacgctgattgagaacggtgcggacgcactggagctgggcatccccttctctgatccgctggcggacggccctaccattcaaaacgccacgctgcgcgccttcgccgccggcgtaacgccgagccagtgctttgaaatgctggcggccatccgtcagaagcatcccgatattcctatcggcctgctgatgtatgccaacctggtgttccataaaggcatcgataatttttatcagcgctgtgccgacgtcggtgtggattcggtgctggtcgccgacgtgccctttgaagaatccgcgccgttccgcgccgccgcgctgcgtcacgatatcgcgccgatcttcatttgtccgccgaatgccaatgacgatctgctgcgcgagatttcgtctcacgggcgcggttatacttacctgctgtcccgcgccggggtcaccggcaccgaaagccgcgcgcagcagccgctgaaccacttgatcaatacgctgcgtgaatatcatgccgcgcctgcgctacaggggtttggtatttcagagccgtctcaggtgcgtgaggccttgcaggccggcgctgccggcgcgatttccggctccgccatcgtgaaaatcattgagcagtaccagcaacagccggcagagatgctcgccaagctgggcaaattcgtcagtgagatgaaggacgccacccgcggctga

SEQ ID NO: 444072 - DNA, 1362 bp, Serratia marcescens
atgcaggaaaccgtgctcaacaagattgttcgtgataaagcgctctgggtcgcagcacgacagcaacaacagccgctggccagctttcagaacgaactggtccccagcgaacgcagtttttaccatgccctacagggcgccaaaacggcgtttattctcgaatgtaagaaagcctcgccttccaaggggctgattcgggaagatttcaatccggcggagattgccggcgtctataaagagtacgcctcagcgatttccgtgctgaccgatgaaaagtatttccagggcagttttgacttcctgccgctggtcagtaacgccgtcagccagccggtgctgtgtaaagactttatcatcgacccttaccagatttacctggcgcgccactatcaggccgacgccgttctgctgatgctgtcggtgctcagcgacgagcagtaccgacagctggcggcggtcgcgcacagcctgaagatgggcgtactgaccgaagtcatcagcgaagaagagctgcagcgggcagttacgctcggcgccaaagtcgtcggtatcaataatcgcgacctgcgcgatttgagcatcgacctgaaccgcacccgcacgctggcaccgcaggtgccgcacggcgtcacggtgatcagcgaatccggcatcaataactacgcgcagatccgcgagctcagccgctttgccaacggtttcctgatcggcagcgcgctgatgtcggagccggatctgcgtgcggcggtgcgtcgcgtgatcctcggcgacaataaagtctgcggcctgacccggccgcaggacgcggcggcggcgtatcaggccggcgccaactatggcgggctgatttttgtcggccgttcaccgcgctatgtggatatcagccgtgcacgcgaagtgatcgccggcgcgccgctgaagtacgtcggcgtgttctgcgacgcgcaggtcgacaccgtggcgcaaaccgttgagcgtctgggcctgcgcgccgtacagctgcacggcgccgaagaccaggattatatcagcgccctgcgcgcccgcctgcctgccgactgccagatctggaaggccctgagcgttaaaacgcaggtgccggcgcgcgatctgcagcacgtcgaccgctatctgttggataacggcgccggcggcaccggacagcgcttcgactggagcgtactgcacgccgagccgctggataacgtgctgctggccggcggcctgagcgccgataactgtattgaggccgcacagctcggctgcgccggtctggatttcaattccggggtggaaagcgagcccggcattaaagacgcgcagcgtctgagcgccgtcttccagacgctgcgcgcttactga

SEQ ID NO: 444073 - DNA, 876 bp, Serratia marcescens
ttgactgacaccactgctccatcctccgcctttaccctgtacgatctccacagccacactaccgcttcagacgggtcttgcacgccagcacaactggtacagcgtgcggcggagatgcgcgtcggcgtactggcgattaccgatcacgacaccaccgacggcctggcggcggcggcggcggccatcgagcagcaggcgctgccgctgcggctggtcaacggcgtggagatctccaccctgtgggaaaatcacgagatccatatcgtcggtctgggcatcgatccggcacatccggcgatggtgcaactgttggcggagcagattgaacggcggcagcagcgcgcgcaggaaattggcgtccgtttggccaaagcgcgtatcgaaggcgcctttgaaggcgcacagcggctggccgacggcggggcggtaacgcgcggacattttgcccgttatctggtgcaggtcggcgtcgccgacaatatcgcccaggtgtttaaaaaatatctggccaaggggaaaaccggctacgttccgccacggtggtgtacaatagaacaagccattgatgtgattcatcaatccggcggacaggcggttgtcgcgcatcccggtcgttatgatctgacggcaaaatggctaaaacgcctgctggcgtattttgcggaacacggcggcgatgcgatggaagttgcccagtgtcagcaggcgccgaatgaacgtacgcagctggcgcaatatgcccaggattttcagctgctggcgtcgcagggctcagattttcaccaaccctgcgcctggattgaactgggacgcaaactgtggctgcccggcggcgtagagccggtgtggcgtgactggccgctggcgcggcaatga

SEQ ID NO: 444074 - DNA, 360 bp, Serratia marcescens
atgataaaacagactttactggtcgcttccttactggtttcttcggcggcgaacgccggtttttattctggcagcgcgctgttagcggaaagtgacggctatgtgaagaataaaaacggcgtggcgaccgtcgccgaggcgttgaacggcggtatgttcatgggctatgtcgccggggtattcgatacttattcgatgcagggcaaccgcaacatctgcccggatgccggaatgagcgtcggcacggcgtccgacgcggtgatgcaatacctcaacgaccatcctgaacaactgcactattcggcgccgtcggtgattatgctggcgctggcggccgcttatccttgcgagcgtcactaa

SEQ ID NO: 444075 - DNA, 762 bp, Serratia marcescens
gtgcattacaaccctaaacacgatctgctggagcaacgcatcattctggttaccggcgcaggcgacggcatcggccgcgaagccgcattaacctatgcgcgtttcggcgcacagctggtgctactgggccgcaccgaaagcaaactgttggctgttcgcgacgaaattgccgcccaaggcggcgcgccggcgctgaccgtcacgctggatctgctgcatgccacgcaggagcaatgccgccaggtcgccgccgacctgacggatcagctgccgcgtctggacggcgtactgcataacgccggcctgttgggtgatatcgtgccaatggccgagatcgatatggcaatgtggcacgatgtgatgcaggtcaacgtcaacgccacctttatgctgacccaggcgctgctgccgctgctgttaaaatcccctgccggctcgctgatctttaccacctccagcgttggccgcatgggacgcgccggctggggcgcttatgccgtctccaaattcgccaccgaaggcatgatgcaggtgctggcggaagagtataaaagccgccatctgcgggtaaactgcatcaatccgggcggaacgcgcaccagtatgcgcgccgccgccttcccgcatgaagacaaaaacaagctgaaaaccccggcggatatcatgccgctgtacctgtatctgatgggtgatgacagccgccgtaaaaccggcatgagctttgacgcccagcccaaccgcaaacccggcgccgccgaatag

SEQ ID NO: 444076 - DNA, 1047 bp, Serratia marcescens
gtggagtttatatctgtttacggcctgtttttggccaaggtcgccacggtggcgatcgctatcgccgcgctggcgctgctggcggtaagtctgggacatcgcaagagccagcaaaaaggggagctgcggctgaccgatctcggcgaacaataccgcgatatgcagcgtgatatgcgtctggcgcggatggatgcggcagagcaaaaaatctggaacaagcagtttaagaagcagaccaaggccgacgataagctcaaaaagcagcgggcgaaggcgggcgcggtggaggcgggtaagccttgtctctacgtgctggatttcaagggcagcatggacgcgcatgaagtctcttcactgcgcgaagaggtctctgccgtgctggcggtggcgacggcgcaggacgaagtgctgctgcgtctggaaagccctggcggcgtggtacacggttacggcctggccgcttcgcagttggaacgcctgcgcaacggcggcatccgcctgacggtggcggtggacaaagtcgccgccagcggcggttatatgatggcctgcgtggcggatcgcattgtggcggcgccgtttgccatcattggctccatcggcgtggtggcgcagatccccaacttccaccgcctgctgaaaaagaacaatgtggacgtcgagttgcacaccgccggccagttcaaacgtacgctgacgctgtttggtgaaaacaccgacgaagggcgtgagaagttccgcgaggagctgaatgaaacccatctgctgttcaagcagttcgtccatcagcaacgtccttcgctggatatcgacagcgtggcgaccggtgagcactggctcggcacgcaggcccgggaaaaagggctggtcgacgcggtgggcaccagcgatgacctgctgattgccgaaatggaaacccatgaggtgatcggggtgcgctatacccgccacaaacggctgatcgaccgctttaccggcagcgcggcggaaagcgccgatcgtctgctgctgcgctggtggcagcgtggagaaaagccgctgctgtaa

SEQ ID NO: 444077 - DNA, 252 bp, Serratia marcescens
atgaacaataatacttcaccgattaaccgtgagacgttactcaaagaagcaaataacatcatccgtcagcatgaggattatctccacggcatggtcgccaccgatgtcgaacaaaaaaacggcgtgctggtatttcgcggcgaattctttttagacccggacggtttgcctacggcaaaaaccacggcggtatttaatatgtttaaacatctcgctcaccgactttcggaaaaataccacttggtcgattga

SEQ ID NO: 444078 - DNA, 327 bp, Serratia marcescens
atgagcaataatcaatctgttgaaattgcagtatgggaagatgaagattgcacgcggcaacttgttgagttcgatttacctgatgacatttgccagaatattgacaaattcatctcagaggtcaatcacttccttgttgaaaagaactatattgaagatgtcgatagtgatcccttaacaaatttggagtattcacaaatttcagggatcacctcttctaaagaaattaattgcgatcgtaaagcattagatccacatacgaaagtgttatctcttgtggtatctagacctaagaaaatggggatatcaacaaggcataaaaagtaa

SEQ ID NO: 444079 - DNA, 393 bp, Serratia marcescens
atgaaacaaaccgaatttatccggcggtctaccgctgagcaaatcctgaaagcgctgatagcgacgcggattaaccgacacatggtttacgcataccgtaaacgccaccccggtgatgaggccgggatcgagaaaactggttccgcactggaacagtaccgcattcatctgctggaacagaagcgacagccaccaaagccaacggcggcgacattagcccttgctgatttactggatgaacatcatccgcacggcaacgcccgatccacgatgactaaagacatgatcgaacgtcaaaaacagctcattaagctgagttttggccgtgatatcacaactgagcaggtgctgaccctctgggcggcttccaatatcgaatccctcacattttaa

SEQ ID NO: 444080 - DNA, 321 bp, Serratia marcescens
atgagtaatgcgaagaactatcacaccatgaccctaaaggatctggtagagcgcatcgccacccgccggagtctgaaatccgtgcgtacatgggtttatgcaaaagaaaaagacggctctcttaccccggccgaggtcaataaggtgaagaccgcgatccagtgcgtcacgatcatgaaacagatccaaaagtacaacatggaggttaacgagttggaaagcttcgacactgtacgtttttacgctgttgatgagatggagtatctgttgcgtacaggctatgacacagcacaaaaatcattccgcgatgaggggatgtga

SEQ ID NO: 444081 - DNA, 189 bp, Serratia marcescens
atgcagctgaatctagaaattgaaaattccctgaatgagcgtctcaaggcgctggctaaagcccgtcaatgttcaacttttaaaattgtccgtgctgccttgcggcagtacatcgagcaaaatgatttacaacatgatttatcacctgatttggagatccaacagcatgacagcagcaacacaaagtaa

SEQ ID NO: 444082 - DNA, 774 bp, Serratia marcescens
atgacagcagcaacacaaagtaatagccaacataccccgttctattggcatttgatggattatgagggcgtcaagatttcggatgtggtggtctatggctacctgctagggtggcagaagagcgccaaagaccccaattctaaagtaaaaagagttttcccctctcttgaccgcatcgggagcgacctgagaattagctcaaaaagcgtaggccgttcagtggcacttttggaaaagctcggatttctgatcaaggagcgcccaaatcgccgaatgagctacctgtacacggttgttgaactggatgatctcccagctgtagcgccagcagcagaaccgcaggaattcaaccagccaacagagcaggagccagcagatgagcatgctaatgattctccaccacaaaacgatgggtctcaggattcagatgatcaggatcagactactagcaattgtcgtgctgttgggagtcatattggtgcttcctttacttcagctttcgctgttgtccctgtcatagaggatgctgttggtatcccagacgcccagcctgtagagcctgcaacggctgagacatggctagacgcaccatttaccccacacggcgagctgatcccggaggccgtgcaatattgctttgaacagggagtaaatgaccctgaagagcagaaagattttgtgcggaaacttgctgatccggactacgcgagaccgaaaccgatctataacccgacaccggcagcagcaccggaatgggaggaactgcctttctga

SEQ ID NO: 444083 - DNA, 411 bp, Serratia marcescens
ttgttaactttagaggatgaacgacaggtagaggagattgccgcccggctctctgaaagaaaagcccgcaaaatagccttagcaaagtatccagtagaaaccttaaaacgcgttaaatcgatgctagttcagcaagtgccgatggcgactatctgcaagttgtgcggggtgccaaccagtgtagtaataaagctacagaaggatttcaacccaaaattacggaaacgcttccacctgaatcagagcgacaaggttttttacatccgccagatgctggccgacaactgtacacctgagcagatcgccaagtttcttgatctgtcagtacagggattcaaaagttggtggtcatatcgtaaaaacgacaccgccgatcagcctaccaaaggaaggctgaatcgccacggataa

SEQ ID NO: 444084 - DNA, 330 bp, Serratia marcescens
atgacggagtttattgtcttgctcatattgttttttttcctgttttatatagtacgagagttttactttacctataagatagatagcgatggtaaagagtctacagcaataattattcaatctaaacaaattagttctaacaccggagggactattaatggtgagtttttcataacctttaaaaatgaatctggagatgatgaaacactgttgtttcaggagacaattcctcaactttatgcatcacgcgtgcaggttggtgatacaataaatataaagtatatcagaatgaaaaataataaactgatggtgtcatttatctttaattag

SEQ ID NO: 444085 - DNA, 384 bp, Serratia marcescens
atggctatcctcgaagccgccaatattatattaacgtttgccattatcttggtatgttattattttgccatcagagttatcaaaggttcccgtcggcgtgaacaggggattattgaacagggcgcagatgtgtacgttactatcctgtcactaaagcaaagcggcctgtttattaataatacccctgttcttgagatggatttactgctagaggatcctgaaagccaagccgtctggatgctggaaaaacaccgggaaaccgtgttgctgattgcgctttcggcttatcaacttggattggtatatcaggccaaggctaatggtaaaaatgattttgtttttattaaagataacgctggaaaacccgttattgttagccattga

SEQ ID NO: 444086 - DNA, 2541 bp, Serratia marcescens
atgaaaattatcaaacccctgcgccttagcgtattaaatcgcccttatcgctggcagggccataaccaccttggcgtttcggtgatggcgctggcggatatgggggaggcgccgcagctgcggccggaagtggagctgtggcagctggcggccagcgagctgcagaccagcggcggggtgattgatatggcgatccccaaagcccgggcggagtttctggccacgggttatgcctacagccatcaccagtcggataaaaccgccgttgcggcgcgtatcgagatagaaggtctgagcaaaaccctggcggtatatggcgatcgctactgggccggggatcggccaacgccgccgcagccctttgaacagatgcggctggactggagccgcgcctggggcggtgaaggccatgatgaaaaccctcacggcgttggtctgcatccggtggcagtcggtggctatcagctgcgtccgttgcccaatatcgaatcaatgcaagagcgcatcaccgccgccggtcagcagccggaaccggcgggttttggcgcgctggatctgctgtggccgcgacgctttaagcgcatgggtaaaaaatatgatgcccgttggctgcagcaggacttccccggctttgcccgggatatcgactggcgggtgtttaacgccgcctcgcccgatcagtggtggcaggagcgtgatgcgctgcctcctcaggcgcgctggcgcatctggaatatgcatccggaacagccgctgcaggagggcacgctgccgccgtggcaggcccgttgctttatcaaccgccagcgcggcgatgagacgttattcgaagaaatcgcgctgcgcgccaccaccgtctggttcttcccgcatctgcagcagatgatccttatttggcagggcaatacccgcatcaatgaagatgacgccgctgatgtgctgcagctgatgcccgctctggagaacgttggcgccgcccgttcggccagccactatcgcaaggtgctgagccagcgaatggataaagagcgcggcgcgctgtttgccttccgggaaaaggacctggtgccggaagccgccatcggcccctggatcgacagtgaagtggagcagagccccagcccgatgcgcgacaatatgaagaatcgcgccaacctgttacgtgaacagcatcgggcacggctggaggctcagggcgacagtgtagatgacctgctgccagagttcgaagagccggagatcccgccgctggacgaactgccggagtttatcgacaagctggaacagcaggcggaagcgcagcgtctcgaagccgaagaacgcaagcgcgagatggaggctcgcttccccgaagcagcagaggatgaaaacggcccccgggggccggaatcgatgcagcgtatgcaggatatgctgcaccagaataaggatgccatcagcgagaagaagctggcgcagagtcaggcggcgttgcaccagatgtacctgatgtcggtacagagccagccgccggcccggcgtctgaagggcgacctggcgcagatcattcgcgaccgcgtacagcgcaccctggcacaggggggcgatttcagcggtatggatctgaccggcgcggacctttccggtatggatttgcgcggcgccaacttcagcagggcgttgctggagtgtgccgacctcagccacagccggctggatggtgcctgcttgcgcgaggcgatgctggcgcgctgcgaactgcatcacagctcactgcgggaatgcgatctggagagtgccagcctggcgttggcccagtgttgtcacagcgatttcagcggcgcgcgttttaaagaaacccagctgcaacagacgctgttcgacgactgtatttttgacgatgccgttctggatggtctgctgctgcgcgaaacctggctgacccgctgccgtttccgacgggcgcggctggagggctgcgtctttatggagctgacgctgccggctcccgatttcagttcggcccggctgcataaaaccacctttatgaaaaccacgctggaggcggcctgcttcagcggcgccagccttgaaagctgttcctgggtggagagccatgccgagcaggcgcggtttgacggcgcgacgctggtgacctgtgcggcggcatcggaaagcgtgctgagcggcgcagactttagcaacgccaccctgaagcagtgcaacctgcgccagacggcgctgcgcggcgctcgtttcacgctggcgaagctggaaaacagcgatctcagcgaagcctgctgccagggcgcagactttacccgggccaatttagtgggtagtttgtttgtgcgcagcgatttccgccaggccgacttcagcgacgccaacctgatgggggctattttgcaaaaaagcctgctgggcggtacccgctttaacggcgccaatctgttccgggccgatctctcgcaggccattaccgacagtgaaaccagcctgaacggcgcctggaccaaacgggttaaaacgttgccgggccgtgacggggagacagtatga

SEQ ID NO: 444087 - DNA, 1071 bp, Serratia marcescens
atgagccatcttagcgcaacagatttacagcagcgggtgaaaggcggcgaagcaattagcgagctggtgctggatgggctcgatctgcgcaactgcgacctgtctggcggtatctttcaggaagtctcgctaaacggtgccgatctgcgcggcgccaacctgcatgaagcggtgtttaccgagtgcgagctgaacgatgttcaggccgacggagcgcagctggcgcagacggtgtttaaccagtgcggcatggcaaacctccgggctgccagtacggcgctgcgcgagtgcgtctttaacgaatgtgtgctgacggccggcgacttttctgacggccagtttgataccacccagtttatgcgctgcgagctgcagcaaagccgttttagccgcagcgcgctggatcgcagcaccttctttgaaacgccgctggataaggcgcagttttcccagtgtcggctgctgatgaccaccttttacggtatcgatttgcgcggcgtcgatttcggcggcgccagcttcgagcgggtggtgttctttgaatgcgaccagcggaataaaagctatgcccgccagcagtttaccggctgccagtttactgataaccgccttgacgaggcggatttcagcggcgcgcagctgacccagtgcaattttaaaggcgcttcgctgcagcgggcgaacctgcgacaggtcgacgcccgtcaggcgctgtttatggaggccgacctgagcggcgctcagtgtcagggcagccagttcgatcaggcgattatggtcaatgcgctgctgagcggcgccgatttcagccagagccggctgtttcagagcattttgcagcaggcgattgccgtggggacccgtttccgcttctgcgatctgacctatagcgacttttccggcgccgatctgcgtcaggcggattttaccgacgtccgtttttcccgaacccgctttcaccgtgcccgccaggacggcgcgcacatcccaaatcgcagagggatgctggaatacgatgaagaattactggccgccgaagcctggagcgcccagcgccacagccgaggttga

SEQ ID NO: 444088 - DNA, 606 bp, Serratia marcescens
atgaacaatatcaatcataaactggctcaggcggcgctgccgccgctgcaggccgctggccgggtaacccactgttttgccgacggcagcctgatggtggagtgcgaaggccgcggctggcactgccgccgggcggcaagctgtctgattgccccggcggtcggggacagcgtgctgatcgccggcgcggcggacaaggcgtggctgctggcggtgctggagcgggccgatgaaggcagcgccgagctgtcgctgccgggggatctgcatatccgcagcgccggagagttaagcctgagcggcgccaccctgaaggtggaggcgcagcaaggggactgccatatcggcgagatgaactacagcggcgataagctttccgcctgggtcagcctgacccgtatggtcggcaagcgcgccgaatcggtatggcagacggtgacccaggtcagtcagaacctgttccgtcatacccgcaataccgagcaggtgcgggccgggcaggtggatatccgggccgatgattacgcgcgtctgcacgcgcacaacacggtgattacctccaaggcgatcaccaaagtcgattctgaacagatccatatgggctaa

SEQ ID NO: 444089 - DNA, 393 bp, Serratia marcescens
atgtttgccaactgtcaaatgatgggcgtcgatctggccttcccggacgtgtgcctgacgccgatgcctgcaccgacgccggtgccttacccggatatcgcgctggggccgacggcgatccccaacgcgctgaatattctgtttatgggcatgccggcccacaatatggcgacggtgacgccgctgaccaatggcgataatgcgggcgtcgccaccggcgtggcgtccggcacggtgatggggccgtcgcgccacctgaccggctcgtttaccgtcctgcttaagggcacgccggccacccgcctgaccagcgtatccttgcagaactccaccaatacggtggggatgcgtattgttcccagccagtttaaggtcttgatgctggcgccgtaa

SEQ ID NO: 444090 - DNA, 684 bp, Serratia marcescens
atgaataatcacagtctggcgccgtggccgggtgagctggcgccaagggaaaaattgctgcgcgacggcgcggcggcactttcggatgttgaactgctggcgatttttttgcgtaccggttttcccggcgtacacgttatgtcgcgtgcggaacagctgctgcggcagtttggctcgctgcatcggctggtgtcggcggattatgcccagctgtgcgctcagaagggcgtgggggatgccacatacagccagctgagcgccacgtcggaactggcgtttcgctgcttttccagccggttgacgcaggaggacgcgctgctgaacccgcaggtcacccgcaattatctgcaaagtctgctgacgcatcgagaacgggaggtttttttagtgttgttgctggataaccagcaccgggtgctctgccatcaggaaatgtttgcgggcagcatcagcagcgtggtggttcacccgcgggaaatcgtgcgcgaagccttaaaagcgaatgctgccgccattattttggcgcataatcacccctcggggcgggctgaacccagcctggccgaccgccaaatcaccgaacaaatcgtcaatgcctgccaattattggagatccgggtgctcgatcatctggttatcggccggggcgaatgcgtctcttttgccgagcgcggctggctttag

SEQ ID NO: 444091 - DNA, 774 bp, Serratia marcescens
atggaaaaccgcaaaagcctgtcggtcgtgatgatcgccaaaaatgaagctgcgctgctgccggattgtctgcagtcggtcaactgggcggatgaggtcatcgtactggactccggcagccaggatgatacggcggccattgccgaaagccttggcgccaaagtcttcatcaaccgtaactggcaaggcttcggcaaacagcgccagctcgcgcaaagctacgccagctgcgattacgtgttgatgatcgatgccgacgaacgcgttacgccagaattgcgccgcgccatcgaacaggtgctgaacgccgcggatgacgaccaggtttacagcctgggacggcgtaatctgtttcttggccgtttcatgcgccatagcggctggtatccggaccgcgtcaaccgtctgtatgcgcgtgaacgctaccgctataacgacgacctggtgcacgagtcgctcaatacgcacggcgcgcgcatcgtaccgttacagggcgatttattgcatctgacctgccgcgacttcttcaccttccagcgcaaacaactgcactacgcacaggagtgggccaaccagcgccacgccgccggcaaacgctgtggttacctctccatactcacccatacgcttggcgccttctgcaagacctggctgctgcgcgccggctttcttgacggtaaacaggggttgctgttagccgtggttaacgcgcaatataccttcaacaagtacgccgcactgtgggcgttgggccgcaactactcagagaagtaa

SEQ ID NO: 444092 - DNA, 1014 bp, Serratia marcescens
atgaaaaatattttaattattcgccgcgataacattggcgatcttgtttgcaccctccctttgattgaaggcgtaaaaattgcgtatccagatgcaaagctctatttgctaattaacaaaatcagccaggacgttgtaaaaaataacccgcatattgagaaggtttttgtctataaaaaggcaaagcacaaagcgaagaatgaaacgacgctgggggtgtatttcgagcgcctgctgatattcctgaaattgcggaagataaaatttgatgcggtgattctggcgaatcccgtcccctgcaagtacagcctgcgcctggcgaaaatggcgggcgctaaacatattatcggcgccgatctcggtacgccggaaataacccggccgttcaaaccggcggatttccacggtaaacaccaggtggaacatacctttagctatttgtcggcgatcgctgaacggcaaatagccattccacccgtgcgggcttatttaagcgcccaagagcagcagcaggcgcagcagcgtatacaggcgctattaccgcaagcggaacatatttatgcggtgcatatcagcagccggatggccaaccggcgctggccgctggagcgctatgccgagattattcgccgtttgaccgatgacccgcgtaattcggtgctgatattctggtcgccacagggtacgctggcgccggatgatatcggcgaccagcagcgcgctcagcaactgctggcgcagtgcgacagtcagcgcgttgcgctgtacccgacggcgtcggtacgtgagctgctggccgcgtttgagcgctgtgacctggtgttgtgcagcgacggcgggcagatgcatctggcggcggcggtaaacagcacgcaggtggtattcttcggcgataccgacaaggattcctggcacccgtggtcgggtaaatacgctattttgcaaacggaatcgggtgagtgcgccgacgtgacggtcgatgaggtgtggcagcagattcgggcgctgcagtag

SEQ ID NO: 444093 - DNA, 1098 bp, Serratia marcescens
atgcgtattctgatgattatcgatggcttgcccggcggcggtgcagaaaaagtcgtgttaacgctgtgccagggcatgcagcaacttggtcatagcgtcagcctgatttcactgcgggacgtctgtaactatcccattccttccggcatcgactatcaagtcgtgccggacaactgccgtaaaccctggcgcaagctgacggaactatcccgccgtgccgcacagctggatcgcgccgttatcgctaacgagcagcagcatggcgtctatgacctgattttctccaacctgcataaaacggatcgtatagtcagccgtagcaagagacttaacaacgaacggttatggttttgtattcacggcatactctccacctcatacctcggccaccgtaccgggctggaccgctggctcaagcagcgtaagatcgccaacgtctaccagcagcgcaatatcgtcgccgtttcacgcgcggtcggcgacgatctccaaaacaatctgccggttcatccgcaacgcctggccgtcatcaacaatccatttgatatcgccgccatagaatcgctggcgtcacagccgtgtgagctggctggccagcagtatttggtgcacgtcggacgcattcatccgcacaaacgccacgaccggctgctgaaagcctatgcgctttcaggtatcgaagcaccattggcgttaatcggcaccggtaatgaaaatgaagtggaaaaaatcaaacggctggcgattgagttaggcatcgagcaacgcgttctgttcttgggatttcaggagaacccctacccgtttatcaaacacgcggcacagttagtactcagttcagacagcgaagggtttggtaatgtgctggtagaagcgctgctatgcggtaccccggtcgtcagtacccgatgccctggcggcccaacggaaatcttggaaaacgctggaatgccccaggcgctggcagatttaaatgagcaatctctggctgaaaaaatggtgcagacctatcgccaaccgccggagatcgatcaccagcagttattacgttacggcctgcaccccatttgcgcacagtatctggctttggcgcagtaa

SEQ ID NO: 444094 - DNA, 1002 bp, Serratia marcescens
atgctgctgaccacgccggtcatcaatacgctaaaagctaactacccgcaggcgcagatagacgtgctgctgtaccaggaaacgcaggatatgttagccagcaacccggcaatatcacgaatattcgccattgaccgccggtggaaaaaacagggcgccaaggctcatatgggccatgaatggcgcctgatccgccagttgcaggcgcaacgttacgatctggtggtgaacctggccgaccaatggcgcagcgcgctgattacgcgcctgacgggcgcacgcatccgtttgggctttgctttccccaaacgccgtggttttctctggcagcattgccatacgcaactcgtctccgtcgaaacccatggcaccttgcatacggtggagcagaacctttctttactgcagccgcttggtctgccactcagcgatacgcaggtcaccatgagctatgccgagcaggattggcagagcagcgaaacgctgctgcggcagcacgatgtaccgcatgactatatcgtcgtgcagcccacctcgcgttggttctttaaatgctggagcgaagagaaaatagcagcggtcatcacggccctgcaggccgatggccacacggtggtcattacctccggccccgatgagaaagagcgtaaaatggtgaacaacattctggcgcactgccccaaacagggcgttgtgtcgctggcaggacagctcaccctgcggcaactggcggcaatcatcgatcacgccaagctgtttattggcgtagactccgtgcccatgcatatggccgccgcgctgaaaacgccctgcatcgcgctgtttggcccgtccaagctgacgttctggcgcccatggcaggttatcggccaggttatctgggccggcgactacgggccattgcccgatccggacgcggttaacaccggtaccgatgagcgttaccttaaccttattcctacagacgcggtgattactgccgcgcggagccagctttcatga

SEQ ID NO: 444095 - DNA, 1092 bp, Serratia marcescens
atgtctaagaaatggaaaataaaggctgctaactggtttttacgaaaatacgtcgcaaagcgcggccgttttcaagataaagccacttttgatcccgacatgcagtttgcccagatcgtgatttactctaccactgcgctcggcgatttcatgtttaatacgccggcaattcgcgccgtacgagagcggtatcctgaagcccatattacgctggtggtgcataaaaagaaccaggagctggtggagaacggccgctatattgaccgcgtggtatattgggacagcaaatttaaaagcatggggccgctgttaacgtctctgcgtgaatatccgcctgacctggcgttaatactgcattcccaccaaccttatgatgttatcagtgcggtgctggccggcgccaagtacattatccgcgataattaccgcaatggtatttgtggtctggaagagtggctgactaactatgttttcgactattacggccactttatccggcgcaagctggagttgatttcggtattgggctgccgctctgatgatccgacgatggaagttttggcgccgtttcccgcagaggaaaagagcgcggaatactgcactatcggttttcaacttggcgcctcaacagaatcacgctgttggccggtttctcattttgtaaagctggcggatgagctggtcgctcggcatgataacgtgcggattgtgctgattggcgcaccttttgacgatggaaaagcacagcagtttttgcagcaggttcaggataaaacgcgtacgcacgtggataaccgcattgggaaaaccgggctgcggcagttgctgacgttgctgagcggtttccatctgctggttaccggggataccgggccgctgcacttagctattgctctgaaggtgagaaccatcagcctgtttgttaccgccgatccgcgcacgaccggcccgattcaggatcttgaattgcaccgtatcgtgcatgcgtcacgaaccggttataccctgcctttggaggctgaaagcccgatgggggtgattcagccgtcgcgcgtctaccaagaagtggtggaacatttgtcccttggctga

SEQ ID NO: 444096 - DNA, 984 bp, Serratia marcescens
atgagcgcttatccatacttactcagcgtaattgttcccttttataataacgctgattttatcgtcgacagcctacgttctctgttgaaccaagtgactgatgacgtagaaatcgtaattattgatgatggttcgacagatgattccgttcagcgcgtcacacagctccttgaggggcaaacagcccaccatgcaacgctgatttgtcaaccaaacggcgggatagcccatgcgagaaatgttgggctggctaacgtccgtggccgctatgtgacgttccttgacggcgatgatttactcagcagcgactactggcagatattgcggccgctactgctggctgaccagtacgatattattgattttaattatcagaaattttcagagaccgtccccacccaaccgcaggggaaaaagactgaaatttatggttatgattttaaaaatcaagggctagcatgccttatgccgttgtttacccgttcaatgtggcacctgtggagcagagtctaccgccatactctgctggaaggagagtcatttgcgaccgggcgacgctatgaagacgttatcttcactccttttttatacttcaagacccgcaagatagcgcatattgagcaggtgctttatttctatcgtgacaacaatttagggattacccgtaaccatagcgaaaaagatattgcagatttgcagttcgctatgagtaaaatgacggactacgctctacagcatcaacacaactcgcaaatacgaccgctcgcggctttgatgatcgctaactgtttctgtgaaataaaaaatatcaccaaaaaaatccacggttgttatcgttacagcccggaactgcgaaatgccctccagcgtgcggctaaagtgtgccagggtacgaaggtccccagtaaaaaagtctgccaaatgcgctacccatacatcgacgagctattgtcaaaggtgcgcattgggctcaagaaacactaa

SEQ ID NO: 444097 - DNA, 1239 bp, Serratia marcescens
atgtcaaaagaaaaaataccgcaccctgcttttagttatcttatctatttaggatgcgctatcgctttttgtaccataccttttggttcaacaactgggcgaaatattttctatatttccagctacatagcatttattgccttctgcttaaacttccgttacctcaccagcaacaaaaagaatctggtgctgcccggcctgtttttaggcgtaggtttagccagcgtgctctgggtggcagcctttaaacagcctggtgaatttattgatctttatcgttcttatacgtcaaccggcaagctgcagatcgcaacggcgtttatcctgctatacgccttgaacgaaccgctatgcatgcaacgcgcgtttattgccgtcgcgttgataaccgggatcgcggtcaatatttactcactataccagggactgtttctggatatatcgcgcgtagagctcaactttgaccgggccacagttgtcgcctacctgatcactgctataaatctggtcatgctgcaggcgatcctgatgctgaaatgccgctatcgtctctggttatatatcctggcgtttatgttgacctattctaccgtgatattaacgggaactcgtgcagccatgttggtttatcctgtagtggtcggcatttccattctggcaaccaaggacctgctctcccgtcggaacaaacttgcccttgtcaccgccgtgccgatattgcttatcgttagcggattggtgtttaaaccccagatagaacaacgtattgctgattttaaaaccaacttgcagttaatcgatcagccgcagatagataactcgatcatttcgcgcatttccatgcaaattgtgagcctgaaagcagggaccgcagcgccactgggtgagtcggcagaaaaacgtggggatgctatccgcaatatcatcgctcacgaaccgcaattatacggcgtcacgccttatatcaacgtccatatgcataatgaactactggaaacctattcaatcaaaggcgtgtggggcgtcttgttgttgctgtcactctatatcagtctatttatctccgccttcagaccccacagaaatgcgctgttgctgggagtcacggccagcctgtttgtgtacggattgagtgatgtgattttcttcagtaccgaatgcaccgttatattttgtttggcgatcattgccagtgtattgtcagggaagaaaaaggccgctataaaggttaaaccatga

SEQ ID NO: 444098 - DNA, 1164 bp, Serratia marcescens
atgaagaagctgcacattattaatctggaaaaaatgggtggtgtcgaacgcctgtttttacagtacatcaacgatacaaccgacggcagcaatgcggttatctgcatcagcaatgaaatcggcacggaaatacgccaaaaaatgccgcagcaaaaagtaacttttgccaatcgcctgatcaacgccttatccttccgctgcccgcaatttctgcgcaaatatttgttgaagtggaaagttgaacgggctgacgccgatgtgatcatcgtctgggatttaatccctggattggcggcaaagcccaagcgtggcaaactggtgtattacgatcacggctgctcctggcgttatgcaaagaacaacaaaaccctgcgctttttctccatgctggatggcgtcatttccgcgtctcaggcttcaaagcgcgtcatggaactgcgttttaacctcccctgccccaacccggtggtgatcaaccgcatcaaaacgccggcaggcatcagtaacgaaccgaaaacgctgagtcaaccggtcaggatcggcacggcttcacgtctggtgacattaaaaggcatcagcgtctcgctgctcatgctgcaggaactgctgcgccgcggccataatgtcacgctggagatagccggaaaaggtcctgacaggccagcctttgaagcgctggcgcagcgcctgcagttaggcgatcgcgtcacattcagcggttttcagcacaatgtggccgatttcttcaaccgcacccatatctatatgagcacaccgatcaccgaacctttcgggctgtcctgcatggaatcgctttattttggcgtaccggtaatattcccgatggtggacggtcagcccgaggcggtaaaagacggttattgcggcattggcttaacgccttccgtcaccatagaagagcaccgaaagctgacgggcatcgaggtcgatttccctcacgatgtttacgacccgctcactgaccggctagtaacgcccaagctgctgtcacatattgactgcgccgatgctgtggaaaaaatgttggttcaatctcattacgaacagctaagcaaaaattcaaaacgttatccggctgagcattttaactatgccatgttcaaatcagattttgacagcaccttgcagtcatttgttatgtaa

SEQ ID NO: 444099 - DNA, 963 bp, Serratia marcescens
atgcaggtgttgatcgtcaagacctcgtccatgggggatgtactgcatacgctgccggcgctgacggatgcgatgaacgccatccccggcattcgtttcgactgggtggtagaagaaggtttcctccagatccccacctggcatccggcggtggatcgggtgattccggtcgccattcgccgctggcgcaaaaactggttcggcagtgaaacccgtcaacagcgctgcgactttaaacgtcagctgcaagaacgcgattatgatgtggtgatcgatgcgcagggtctgatcaaaagcgccgcgctggtgacccgcgtcgccaaaggcagcaagcacggtcaagactgcaaaagcgcgcgcgaaccgtttgccagctggttttacaaccatcgtcattacattgataaacagcagcacgcggtagagcgtacccgcgagctgttcgccaaaagcctcggctacgccaggcccgaaacctatggcgactatgccatcgccgcccgttttctcagccagccgccggcggatgccgggcaatacctggtgtttctgcatgccaccacccgcgatgagaagcactggccggaagaaaactggcgcgagctgatctcgctggttgcgccaaccgggctgcgcatcaagctgccatggggcgccgaacacgaacaccagcgcgcgctgcgcctggcggaaggcttcccgcatgtcaaggtgctaccgaagctcagcctggagcaggttgcgcaggtgctggccggcgctaaaggcgtggtgtcggtggataccggcctcagccatctggccgccgcgctcgatcggccgaacattacgctgttcggcccgacagatccgggattgatcggcggttatgggcaaaatcagcagtcgctgatttccccggaaaagaaaatgtccaccatcaatgccgatctggtttgggcaacattgcaaaaggctctttga

SEQ ID NO: 444100 - DNA, 1047 bp, Serratia marcescens
atgaaaatactggttatcggcccttcctgggttggcgatatgatgatgtcgcaaagtctttaccgcaccctgaaggccgagtacccgtcagcagagatcgacgtcatggctccggcctggtgtcgcccgctgctggcgcggatgccggaagtcaatcaggcgctggcgatgcccctcgggcatggcgcgctggcgatcggcgagcgtcgccgccttggccacacgctgcgcgccaatcgttacgatcgcgcctatgtactgccgaattcgtttaaatccgccctggtgccgttcttcgcccaggtgccgctacgttgcggctggcgcggcgagatgcgctacggcctgctgaacgatatccgcgtattggataaagccgctttcccgttaatggtccaacgctatgtggcgctggcctatgataaacagcgtattcacagcgccacagatctgccgcagccgctgttatggccgcagctgcaggtcagcgatgaagagatagccgagactaccgcctcctttaatctgaccgacgcccgtccgttgattggtttctgccccggcgcggaattcggcccggccaagcgctggccgcattatcattacgcccggctggcgcagatgctgatcgaccagggctatcagatcgccctgttcggctcagccaaagaccacgaggccggcgagcagatccgcacggccctggcggacgcgtcgcgcggccactgtatcaacttggccggcgaaacccagctggaacaggcggttatcctgctggcctcctgtcaggcggtggtcagcaatgactccggtttaatgcacgttgcagcggcgttgaacaaaccgttgatagccttatacgggccgagcagcccggacttcactccgccgctgtcggacaaggccaaggtgatccgcctgattagcggctatcacaaggtgcgcaaaggcgatgccgaccaaggctatcatcagagcctgatcgatattcagccgcaacaggtgttagacgcgttaatgccgctactggccgacagcgaggaataa

SEQ ID NO: 444101 - DNA, 954 bp, Serratia marcescens
ttgcgctacctcaaaacacgaagcgccgtactgattggttccctgttgctggccgcggccgctcaggctggcaaactggcgattgtgatcgatgacgtcggctaccggcctcatgaagaaaacgccgtgttgcaaatgccgctgccaatctcggtggcggtactgcccaatgccccccatgcccatctgatggcgacccgcgcccatgcgcagggccgcgaggtgctgatccatatgccgatggagccgctcagcaaacagccgctggagcgcgataccctgcggccgtccatgagcaacgacgaggtgcagcgcatcatccgcaatgcggtgaacaacgtgccgtatgcggtagggatgaacaaccatatgggcagcgccatgacctccagcctgccagccatgcagaaggtgatgcaggcgctggaaagctataacctgtacttcctcgacagcatgaccatcggcaacagccaggccacccgcgccgcagcgggtaccggggtcaaggtgatcaagcggcgggtattcctcgacgacaccgccagcgaaagcgatatccgccaccagttcaaccgcgccattgcgctggcgcgccgtaacggctccaccatcgccatcggccaccctcgaccggccacggtaaaagtgctcaaacaaatgctggcgacgctgcccgccgatatcgtgctggtcaggccgagttcactgctgaacgcaccgcagggcggcagcgctatgccgccgagcaaaccgccgcgtccgacgcagccgaaaaacccgttcaacaacggtatcaagcagtgcaaggtgaaagcgccgaaggagcaggaaaaagtacatgccggcacggcgctggccgtgattggcgaaagcatcgcccagtcgccggtggtgacctttatcaaacagcactggccaagctggccgcgcgcgtcagagaagcagtcataa

SEQ ID NO: 444102 - DNA, 1335 bp, Serratia marcescens
atgagggagaaggcgtattttgcactatcaagggtaacccgaggcgcaaaagccggcagccagctgctgccgcaacgcgttgcaccacggaagttgaccacactgtgcgccagcgtgttgtacgctggcgtcttgctgttgccgttatccggccatgccgccgacgacaacaaaagccagcttaaagacatccagcaaagcatcgctgagaaagaaaaagcggttaaacaacagcaacaacagcgcagcagcctgcaggacaaactcaagcagcaggaaaaaaccattgcgcaggccagccgttccctacgtagcacccaaagtacgctaaattctctgggcaaagacatctccggtcttaacgcctctatcgccaagctgcaaaagcagcagacccaacagcaaaatatcctgtccaaacagctggacgccgcattccgtcaagggcagcacagcgccgtacagctgatcctgagcggtgaagagagccagcgcagcgagcgcatcttggcttatttcggctatctgaacgatgcgcgtcaggaaaatatcgaagagcttaagcaaacccgcgcggagctggcgcagcaaaaaaccacgctggtcgccaagcaaaagcagcaaaagtccctgctgagcgaacagcaggcccaacagcagaagctggagcaggcgcgcagcgcgcgtaagaaaaccctgagcgcactggaaagctcgctggaaaaagatcagcagcgcctgagcgaactgcgtcagaacgaaagccgcctgcgtgacaagattgcccgcgccgaacgcgaagcccgcgcccgcgccgagcgcgaagcgcgtgaggccgcccgcgtacgcgagaaagtgcgcaagaaagagcagcaggcgaagaaaaccggcacccgctataaacctagcgaaagcgaacgctccctgatggcgcgtaccggcggcctgggacgtccgaacgggcaggcctactggccggtgcgcggcagcaccctgcatcgcttcggcgaacagctgcagggcgagttacgctggaaaggggtggtcattgccgcgccggaaggcagtgaagtcaaggcgatcgccgacggtcgcgtactgatggccgactggctgcaaggctatggcctggtagtcgtggtcgagcacggtaagggtgatatgagcctgtacggctataaccagagcgcgttggtgaacgtgggtgcgcaggtgcgcgccggccagcctatcgccttggtgggtaccagcgggggtcagggaacgccgtcgctctatttcgaaattcgtcgccagggtcaggccgttaacccactgccgtggttgggaagatag

SEQ ID NO: 444103 - DNA, 1545 bp, Serratia marcescens
atgtcgagcaacaaaaagcccatggtgctggtgattctggatggttacggccatcgtgaagagcagcaggacaacgccattctcaacgcccgcacgccggtgatggaccagctgtggcaacagcggccgcatacgctgatcgccgcctccgggctggacgtcggcctgcctgacggccagatgggcaattcggaagtaggccacgtcaaccttggcgccggccgcatcgtctaccaggatctgacccggctggacaaagcgatcgccgacggcgagttctacgccaacccggtgctgaccgcggcggtggataaagctgcgcaggccggcaaagcggtgcatattatgggattgctgtcgccgggcggcgtccacagccatgaagagcatattctggcgatggtgaagctggccgcacaacgcggcgccagcgccgtgtacctgcacgcattcctggacggccgcgacacgccgccgcgcagcgccgatgcctccctgcagcgttttagcgcggcgttcgagcagttgggcgtcggccgtatcgcctccgtcatcggtcgctatttcgccatggaccgcgacaaccgctgggaccgcgtgcagctggcctacgacctgctgaccgacgccaaaagcgagtttaacgccgacagcgccggcgccgcgctgcaggccgcctacgcccgcgatgaaaacgacgagttcgtcaaacccacggtcattcaggccgccggcgaagccagcgccgccatgcaggacggcgatgcgctgattttcatgaacttccgcgccgaccgcgcgcgccagatcgcccgcgcctttgtcgacgccgattttaacggtttcccacgcgccagagtggtgcagttcgccgatttcgtgatgctgaccgaatacgccgccgatatcgacaccgcctgcgcctatccgccgacagcgctgaccaacacctttggcgaatggctgatgaagcacgacaaaacccagctgcgcatctccgaaaccgaaaaatacgcccacgtcaccttcttctataacggcggcgtggaacaaccgttcgccggtgaagatcgcattctgattaactcgccgcaggtagccacctatgacctgcagccggaaatgagctcggcggagctgaccgagaaactgctgggcgccattcacagcgggaaatatgacgccatcatctgcaactaccccaacggcgatatggtcggccacaccggcgactatgacgccgcggtcaaggcggtggaaaccctggacaactgcatcgcacaaattgtcaaagcggtggaaagcgtcgacggacagctgctgatcaccgccgaccacggcaacgccgaacagatgcgcgacccgcagaccggccaggcgcacaccgcgcataccagcctgccggtgccattaatttacgtcggcaaaccggcgcacgcggtcaacggcggcaagctttccgacattgcgccaaccatgttggcgctgatgggaatgaaaatcccgcaagagatgactggtaagccgctgttcatcgtggaataa

SEQ ID NO: 444104 - DNA, 435 bp, Serratia marcescens
atgctgcaagaaattatgccattcgttagcaagcatcccatactgagcctggcttggatcgccctgctggttgcggtgattgtgatgaccttcaaaagccgtttctccaaggttaaagatatcactcgtggcgaagctacccgtctgattaacaaagaaaatgccgtggtggtcgacacccgcagccgtgaagatttccgcaaggggcacattgccaatgccatcaacctgacggcgagcgaaatcaaaagcggcagcctgggcgagctggaaaaacacaaatcccagcctattatcgtaacctgcgccaacggcaccacgtcgcgcgcgccggcggaaagcctgagcgccgccggtttcgccaacgtcagcacgctaaaagacggcgttgccggctggagcggcgataacctgccgctggtgcgcggtaaataa

SEQ ID NO: 444105 - DNA, 462 bp, Serratia marcescens
atgcgtaaggtgaccgcattagtcatggcatccatgttggcatcaggttccgccatcgccgctgacgccatatcgccttccacgcatgatgcagcaaccagcaaccccggccagcatcatatgtttgatggcgtcaggttgactgaaaagcaacgtcagcaaatgcgcgatttaatgcgccaggcccgtcacgacctgcctggtgtcaatgtagctgaaatggaagcaatgcataagctggtgacggcaaacaaatttgatgaagccgccgtgtatgcacaggcggagaaggtggctcaggaacaagtgaagcgccaggtcgaaatggcccgggtgcgcaaccaaatgtataacttactgacgccacagcaaaaaagtgttttagaccagaagcatcagcagcgtatgcagcagatggagcaacaactttctggtttgcagcaagcttctgcccagaagtga

SEQ ID NO: 444106 - DNA, 990 bp, Serratia marcescens
atgcgtaaatggggtgtaggcctgacattaatgttgctgacaaccggagcgttggcaaaagatattcaattgctgaacgtttcatacgacccgacgcgcgagttctaccaggaatacaatgccgccttcagccagcactggcagcaacagcatggcgataaggttaccgtgcgtcagtcccatggcggctccggcaagcaggccacgtcggtgatcaacggcatcgaggcggatgtggtgacgctggcgctggcttacgatgtggatgcgatcgccgcgcgcggacggattgataagaactggatcaagcgcctgccggacaactcggcgccttatgcttccaccattgtgttcctggtgcgtaaagggaacccaaaacagatccacgactggccggatctgattaaaccgggcgtttccgtgatcacgcctaacccgaaaacctccggcggcgcacggtggaactatctggcggcctggggttatgcgctgcatcataataataacgatcaggccaaggcgcagacgtttgtgaagagcctctacaagaacgtggaagtgctggattccggtgcacgcggagcgaccaataccttcgtggagcgtggtattggcgacgtgctgatcgcctgggaaaatgaagccttactggcgaaaaaggagctgggtaaggacaattttgaaattgttactccgagcgagtcgatcctggcggagccgaccgtctccgtggtggatcgcgtggtcgacaagcgcggcacccgggacgtggcgaacgcttacctgaagtatctctactccccggtagggcagacgattgcggcgaagaactactatcgtccgcgtgatgccgccgtcgaggccaaatttgccgagcagttcccgaaactgaagctgtttaccgttgatgataccttcggtggctggagcaaggcgcagaaagaacatttcgccagcggcggcaagtttgacgagatcagcagacgctga

SEQ ID NO: 444107 - DNA, 588 bp, Serratia marcescens
atgctgagaaaacttcctctcgtcgcctgtctgctctccgccatgggccatgcctgggctgagcaagcgccggccgccaacgatgcgcctcccaccgcgccgtacctgctggccggggcgccgacgttcgatctgaccgtggcaaaatttcgcgccaagtacaatcgcgacaaccccaagctgccgattggcgagttccgcgccattgacagcagcgccgacgacacgccgttgctgacccgcgccgccagtaaactcaatgaaaacctgtatgcctccaccgcgctggagaaaggcaccggtaaaatcaaaacgctgcaaatcacccacctgccgctgcagggcaatgaagaaaagagcgcacgcgccgtcaccgtcaactatatggcagcgttgatgcgccagttcgaaccggcgttgacggtggagcagagcatcatcaaggtgagcgcattattggaaaaaggcaaaggctcgcgtttttacacccagcaggtcggcgccattcgctatgtggtcgccgataacggcgaacagggcctgacattcgccgtcgagccggtgaaactgacgctggcggaaccgtga

SEQ ID NO: 444108 - DNA, 852 bp, Serratia marcescens
atgagccaaaacaccagtccgacattaaaaggccaatgtatcgcagaatttctcggcaccggcctactgatcttctttggcgcaggttgcgttgccgcactaaaactggccggcgccagcttcggccaatgggaaatcagcgttatttggggcttcggggtcgccatggcgatctatctgaccgccggcatctccggcgcccacctcaacccggccgtaaccctcgcgctatggctgttcgccaacttcaacggccgccgcgtggttccctttatcattgcccaggtcgccggcgccttctgcgccgccgcgctggtctacggcctgtactataatctgttctttgattacgaaaccgcccacaacatggtgcgcggcagcacagagagtctggatctggccgggattttctccacctatccaaacccgcatatttccgttgcgcaggcgttcctggtggaaaccgtgatcaccgccattctgatgtgcctgatcctggcgctgaccgacgatggcaacggcgtaccgcgcggcccgttggcgccgctattgatcggtattctgattgccgttatcggcgcctccatgggacccttgaccggcttcgccctgaacccggcgcgtgatttcgggccgaaaatgttcgcctacatcgccggctggggtaatgtcgcctttaccggcgcacgtgaaatcccgtacttcctggtaccgatcttcgggccgattctcggggccatcctgggcgcattcggctaccgtaccttgattggccgtcacttgccttgcgacgactgcgtcgaagaagagcaagagcagccagccgccaaaacgccgcagcgtaaagcgtaa

SEQ ID NO: 444109 - DNA, 918 bp, Serratia marcescens
atgagctcatctacctccacgaccccagccagagcctggctggaaagtttacgaccacgcaccctgccgctggctttcgcctccatcgttgtcggctccgccattgccgcctggcaaggcagcctgaaacccggcgtcgcgctgttggcgctgttaaccgccgggctgctgcaaattctctctaatctggccaacgattacggcgatgccgtcaaaggcagcgataaagaagaccgcatcgggccgctgcgcggtatgcaaaaaggcctgattacccaggcgcagatgaaacgcgcgctgatcgttaccgtggtgctgatcgccatcgccggctgttcactgatcgcgctggcctgcaaaacgccgagtgacgtagccggcttcctggcgctcggcgcgctggctatcgtcgctgccatcacctacaccgtcggcaataagccttacggctatctggggctgggggatatctcggtgctggcgttcttcggctggctgagcgtggccggcacctattacctgcagacgctgcatttcgacagcatcgtcatgctgccggccaccgcctgcggcctgctggcggcggcggtgctgaacatcaataacctgcgggatatcgaaagcgaccgcgacaacggcaaaaataccctggcggtacggctggggccgaagaacgcccggcgctaccatgccttgctgctgattggcgcggtgctgtgctttgctctgttcaccctgttcaatctgagcggtccgtggggctggttgtttgtgctggcggtgccgctgctgtggcgccatgcgctgcgcgtactgcgcgatccttcaccggccggcatgcgaccgatgttggagcacatggtcaaggccgccctgctggcgaacattttgtttgccgccggcgtagcgctcagttag

SEQ ID NO: 444110 - DNA, 855 bp, Serratia marcescens
gtggcacagaaagactatgtaagccgcgggcgctctggagcgcggcgcaaaacccccagccgtaaaaaaagcagttctccgaaggtgtccaaaaccgtggtagcgcttgcggtcgccttgttggtgatctttgccggcggtctctactttattacccataacaaaccggacgacgaaccgctgtcgccggcccacagcagccgtcctggcaacggcctgccgccgaagccggaagagcgctggcgctatattaaagagctggaaaaccgccagaccggcgtacaaaccccgaccgaaccgacggccggcggcgaggtgaagtccaaaacccagctgacgcaggaacagcgccagctgctggagcaaatgcaggccgatatgcagcagcgcccgacccagctcaatgaagtgccgtataacgatgcagcccaggcggcgcgtaacaacgcgcagcagcaaatgcagcagcagcgtcaacaacagcagcagcaacagcaacagcaggcgcaacaacaacagccggcaagccagccgcgcaacccgttcagcaacggcgccagccagccggcgcagcagcctaaaccggcgacgccgccggcagcgaagacggaaagcaagccggagcagaaacagcgctggatggtgcagtgcggctcgttccgcgccgccgatcaggccgagtctgtccgcgcgcgcctggcgtttgaagggattgaaagccgcatcaccaacggcggcggctggaaccgcgtggtgcttgggccgttcagcagccgcgccggcgccgacaaaaccctttcccgtctgaagggcatcggcatgtcaggatgcattcccctctccgtcaggggttga

SEQ ID NO: 444111 - DNA, 1869 bp, Serratia marcescens
atgataacgataaaaaatacgctgctggcggtggcttcctccgtcacggctttttccgtctgggcgcaagacaacgcagcaatcaataacaacggcgagaatctggtggtgtcggccaaccgcttcccgcaacctgtttcttccgtattggcgccgacctcggtggtcacccgcaatgatatcgatcgctggcaggccaaaagcctgaccgacgtgatgcgtcgtctgccgggggtagatatcgcgcagaacggcggtatggggcagaacagttcactgtttatccgcggcaccaactccagccatgtactgctgctgatcgacggtattcgcctgaatcaggccggcgtcagcggttcttccgatctgagccaaattcctctctcgctggtgcagaaggtggaatatattcgtggcccgcgttcggcggtgtacggttccgacgctatcggcggcgtggtcaacattatcaccacccgtgaaaagaacggcaccacgctgtctgccggcgttggcagcaacggctatcaggcctatgacgctgcgactcagcagccactgggggagaataccgtcgccaccctggccggcaactatacctataccaaagggtatgacgttgtcgcctacggcagtaccggcctgcaaagccaacaggaccgcgatggctttatgagcaagtcgctgtatggctcggttcagcaccagtttaatgaacggctcagcggcttcttccgtggctatggttatgacaaccgcacggcgtatgacggctattattcacccggcgcggcgctggtggacacgcgtaaattgtacagccagacctgggacagcggtgtgcgctatcagcagggtatttacgccacccaactggtaggtagttacagccacagcaaagattacaactacgatccgcgccttgggcagtatgcaagttcagcgcggctggatgatgttgagcaatacaatctgcagtggggaaatacatggcggctagggcaggggacgctgagcgccggcgctgactggcagaatcaaaaaatcaaaccgaataccgcctcggtgacggaagaaaaaagccagcgcaataccggactgtacctgaccggccagcagctgcttggcccggtaacgctggaggcggcggtacgcggcgacgacaacagcgagtttggctggcatggtacctggcagaccagtgcagcgtgggaatttgtggaaggctaccggtttatcgcctcttacggcaccgcatttaaagcgccgaatatggggcagctgtacagcgacttttatggcaacggctccctgaagccggaagagagtaaacagtgggaaggcggctttgaaggggtgagcgggccggtgagctggcatgtatctgcttaccgtaatgacgttgataacctgattgacagcgatccggtgacttaccgttattacaacatcggcaaggcgagaattaagggcgttgaggcaaccgcatcgtttgataccggtccgttaacccatcagttgggttacgactatgtggatgcgcgcaatgccaaaaccaatgagttgctgccgcgtcgcgccaaacagcaggtaaagtatgagctggactggcagatatacgatttggactgggcggtgacctatcattacctgggacaacgttacgataaagactacagcggttacccggcgcgcagcgtgaagctcggcggcgtcagcctgtgggatctcgcggtgtcgtatccggtcacatcacatctgacagttcgtggtagaattgccaacctgtttgataaagattatgagacggcatatggctacgctactccagggagagagtactacctcaccggaagctataccttctaa

SEQ ID NO: 444112 - DNA, 609 bp, Serratia marcescens
atgaaagactcactgtcgcgaccggtgcatcgttggccggtcagaatcacccactgggttaatctgttcgccatgacgtgcatgtttatgagcggctgggaaatctacaacgcctcgccgctgttcgacttccgctttccgcccgccgtcacgctgggcggctggctgggcggcgccatcggctggcatctggctctgatgtggctgctggcgctcaacggcctgtgctatctgctgtggagcctgttcagcggccatttgcgtcacgatctgctgccgttgcgccttggcgcgctgcggcgtgatatcgggctggcgctgacgctgcggctgcaacaccgccacggcaaatacaacgcgattcaaaagctgatgtacctcggcgttgtggcgctcggtctgctgctggtgctctccgggctggcgatctggaagccggtgcagctgtcctggctcgtggcgctgttcggcggttttgacaccgcacgctatgtgcattttttcgccatggcagcggtcgggttgtttgtcatcattcacgtgctgatggtgatcgtcgtaccgcgcacgctgtgggccatgctgacaggaggtaaacgtgaaggataa

SEQ ID NO: 444113 - DNA, 624 bp, Serratia marcescens
atgcttactcaacgccgtattgccggtttactgctgtccggcctgctgatgtgcagcggtattgccgccgcgcaaatgccaggcaaagtcatcgccccgctgcgcggcactatcgatcaggtttccgccaccagcctgcagttgaccgaccgtaaaggggaaaaggtcagcgtgaaactcaacgaccagaccaaagtgctgagcgtatcgaaagggtcgaccgcagatatcaaacccgacagctttattggcaccgccgccgtcccgcaggccgacggcagtttgaaagcgctggaggtgcacgtcttcgccgccagcctgcgcggttccggtgagggccactccccttggcaatccgccgatggcaaagtcgataccatgaccaacggcaccgtcggtaaattggtgaacgccaacggccgcaccctgacggtcaattacaacaaccagcagaaaaccgtcatcgtgccggacggcacgccgattgtgacgctcgatcccggcgatcgcagcctgctgaaacctggcacgcatatcgtgctgttctccgccgctgacgacaaaggtgaacgcgtcgctacccgaatttccgccggtaaagacggtaccgtgccgccgatgtaa

SEQ ID NO: 444114 - DNA, 672 bp, Serratia marcescens
atgcgcatattagtggttgaagacgataccagcaccggcgattacctgaaaaaggggctgggggaggccggatacggcgttgatctggcacgcaacggcaccgatggcctgttccgggcattggagcatcgctacgatgccatcgtgctggacgtgatgctgcccggaattgatggctggcagattattgaggtgctgcgtaagaaaagcgatgtgccgatcctgtttctgacggcgcgcgatggcgtgcaggaccggatccacggccttgagctgggcgccgacgattacctggtcaaaccgttttcgtttaccgaactggtgctgcggctgcgcacgctgctgcgtcgcggcacggtgcgtgagtccgatcactacgcgatcgccgatctgcacatcgatgtgctgcggcgcaaggtgatgcgtcaggagacgctgattccgctgaccaataaagagtttatgctgctgcatctgttggtgcggcgggagggggaggtgctgtctcgcaccatgattgcctctcaggtctgggatatgaattttgacagcgataccaacgtggtggatgtcgccatcaagcggctgcgcgccaaaatcgaccggccatttgcgatcaaactgattcataccgtgcgcggtatcggctacgtctgcgaggcgcgtccatga

SEQ ID NO: 444115 - DNA, 1440 bp, Serratia marcescens
atgagtacgttggcccggcgctggcggacgatgtccctgacgttacgcagcgccatcctgttcgccgtggtggcggcgctggtggtcagcgccgcgggcagctacctgtatggcgcgatgcgtcaggaaatggtcaaccgcagcgatctgcaggtgaccggacgtatcgactattaccggaaattattgggtcggcgctttttagtggagcggctggttgccaataccgggttgttcgaaaatatgctgggcaacgaacaggacgtcctgatcttccagctgcaggggcaaaaaccgttaatcaacgttaacccggccaggctgacgctgccatcggtggtgccgacgccggtcggtcagccgcagcggctgaaggcagtgcgcgccggagagacgccgcagggcgtgccgatccggctggcatcggcgctggtgaagctggaggacggcaaagtcctgcaaatttcggtggcgcatgtgatggccaacgaacagaaaatgctggcgcgttatttgtggcgcgtgctggcggcggtggggatggccttcgcgctcattgcgctgctgggatactgggtgatgcgccgtgagctgcggccactaaggcgcatggcggcgcaggcggcggcgatcgcgcccagtacgctgtcaacccggctgagcgtgcacggagcgccgcaggaactgcggcagctgatagtgtcattcaacgccatgcttgaccggataaacgacggctatcagcgcttgacgcagttctccgccgatctggcgcatgagatccgcacgccggtaggcgctctgatgggccagtgtcaggtggccctgtaccagccccgcagcgtggaagagtatgaaaccctgctctccaccaatatggaggaattggagcgtatctcacgcatggtggagaatattctgtttctggcccgtgccggcaacgcgcaatccgcgctgaattaccgcacgctggatatggcggcggagctgcagcgggtggctgattactttgaaggcttggcagaagagcgtggtattcagctgacttgccaagggagcgggcggctgtgggccgatgccatgctttttcagcgggcgctgagcaatctggtcgccaatgcggtgcgttatgccgatgggaacagccaaatcatactgcgggccgggacggagggggacgcgtgcgtggtacgggtgatcaatcagggggcgccaatcgacgccgcacacctggataaactgttcgaccggttctatcgcgctgacgccgcacgcagcagccaggccagcgggcttgggctgtcaattgtacgcgccatcatgacgttgcacggtggcgaggcctgtgcccagtgttacccgcagccgccggccgcccaaatcgtgttcagcctgctatttccggcaaatccgcaggaggcgcatgacgggagagggtaa

SEQ ID NO: 444116 - DNA, 639 bp, Serratia marcescens
atgctggaagtttggggaagaaagagctcatccaatgtacaggcgcttatgtggtgcattggcgagctgggtttaccgtatcaaagacatgacgtcggccaccggttcggcggcacggacagcgacgaattttatgcgctgaacccgaaccgcaccattcccgtactccgggatggcgacctcccgccgctgtgggaaaccggcgccatcctgcgctacctggcaaaccgttatgcgccggacgaattctggcccgccgacttaatcgccagaacccatgtagaccgctggatggaatggtcaaaactgaacgtagcgctgctgtttaccgcgccgatcttttggcgcgtggtgcgtacgcccgcagctgaacgcgatcccgccgcgatcgaccaagcgctgcaggcctttgagaacaaactgatgattgccgaacagcgcctcgcaggccagacgtttttggctggcgacacattttccgccgcagatatccaattcgggcacgtgctgtatcgttactacgatatagacatcgaccgacaaccactgccaaacctgcgcagctactacgatcggctgacggaacgccccgccttccgcgaacacgttatggtgtcttacgaagcattaagggcttaa

SEQ ID NO: 444117 - DNA, 756 bp, Serratia marcescens
ttgagcagagggaatatatctgcggcgtggcgccgtctggcggtgtgtctgacgcttggcctgctgttggcgggctgctcaggcaaaaataactacaaccgtgattatgataaattgcctaaaggcagctacagcggcagtacctataccgtccagcgtggcgatacgctgtattacatcgcctggattaccggcaatgacgtcagcacgctggcgcgcaccaacaatatccgtccgccttatagtctggccgtcgggcaaaaattaaaagtcagccccggcacgacggcgaaaagcacaagccgcaaatccggcggtcgctcttccggcagcgtgctgacgaagagtacgcctccgccgggcgtctcacgctgctggcgttggccgaccgatggcaagatcgttgcccgcttctcaacctctgacggtggtaataagggtatcgatattgcgggccgccgcgggcagccggtttacgccagctccaagggcaaagtggtgtatgtcggcaaccaactgcgcggttacggcaatctgatcatgattaagcatggtgaagattttatttcggcctatgcgcataacgacactacgctggtgcgtaacgggcaggatgtgaaagccgggcagaaaattgccaccatgggcagcagcggcgccaattctgtccgcctgcatttccagattcgctatcgcgcgacggcgctggatccgctacgttatttaccgccgcaggggcgtgctccttcctgttaa

SEQ ID NO: 444118 - DNA, 1140 bp, Serratia marcescens
atgatcatctccgcttcaaccgactaccgggccgcagcacaggcaaaacttccgccttttctgttccactacattgatggcggagcctatgctgaacacacgctacagcgcaacacggcggatctggccgatatcgccctgcgccagcgcgtgctgcgcaacatgtccgagctaagcctggaaaccaccctgttcggcgagaaactggcgatgccggtggcgctggcgcccgtcggcctgaccggcatgtacgcacggcgcggtgaagtgcaggcggcgcgcgcggccgccaacaagggcattcccttcacgctgtcgaccgtctcggtctgcccgatcgaagaggtggcgccggccatcaaccggccgatgtggtttcagctgtatgtgctgaaagatcgcggatttatgcgcaacgcgctggagcgggcgcaggcggccggcgttaaaaccctggtgttcaccgtcgatatgccagttcccggcgcgcgctaccgcgatgcgcactccggcatgagcggcccgaacgccgccatgcgccgaatcttacaggcgatgacccacccgcagtgggcgtgggatgtcggtatcaacggtaaaccgcacgaccttggcaacgtctccgcctatcgcggtacgccaaccagcctggaggactatatcggctggctcggcgccaacttcgatccgtcgatttcctggaaagatctggagtggatccgcgagttctggcaggggccgatgatcattaaaggcattcttgatcctgaagacgccaaagacgccgtacgcttcggcgctgacggtattgtggtctccaaccacggcggccgccagctggatggcgttctttccaccgcccgcgctctgccggcgattgccgatgcggtcaaaggcgatatcaccattctgaccgactccggcatccgcaacgggctggatgtggtgcggatgattgcgctgggcgccgacagcgtcctgctggggcgcgccttcgtgtacgcgctggcggcggccggcgaagccggagtggcgaacctgctggatctgattgataaagaaatgcgggtcgcgatgacgctgaccggcgccaaaaccatcggcgagatcacccgggattcgctggtcaaaacgctgtaa

SEQ ID NO: 444119 - DNA, 1581 bp, Serratia marcescens
atgtccctgtttttcagtatcgctccgatcatcttattgatatggatgatgacgaaacaccaaggcgtccccgcttatatcgctctgccgttaaccgccattgtggtctatgctttacagctgctgtggttcaacggcgacttgctcctattacatgccaatgtgattaccgcgctggttgcggttttcaccccgattaccattatcgccggcgccattttgctcaataaactgatgcaaatcagcggggcggaaaacgtggtgcgcaactggctggaaaatatcagccccaaccctgtcgcccagctaatgatcatcggctgggcgtttgcttttatgattgagggcgccagcggcttcggcacgccggccgctatcgccgcgccgattctggttgggctggggtttaatccgctgcgcgttgctatcctgacgctggtgatgaactcggtgccggtctctttcggcgccgtgggcaccccgacctggttcggctttgccaacctggggctgagcgacgccgacctgctggagatcggccgccaaaccgcgttaatccacaccgtcgccggcctagttattccgcttctggcactgcgctttatcgtttcctggcggcagatccgtcaaaacctgccgtttatcctgctgagtgcgctgagctgcacgctaccttacctgttgctggcgcaggttaactacgagtttccggcactgctgggcggcgccatcggcctggcattatcggtgttgctggcccgcgccaatatcggcttgacgcgcgacagaaccccgtccgccgctcagccggtaccctttggccaagtacttaaagccatggcgccgacgctgctgctgatcgtgattctaatcgtcacgcgcatccaccaactggggctgaaatccctgcttaacagcagcgccctgctgtggcagggcagcctgggatggttcggtgaactcagcatcagcaaggcgctgattattgaactgcagcaggtattgggcaccagcgcccaggccagttataaaacgctgtacgtgccggccctgattcctttcctgctggtagtgttactcgccattccgctgttcagattaagtgggcaacaggtacatcggatcttcggtgataccacccgcagtatcggcaagccgtttatcgccctgctcggtgcgctgattatggtcaatctgttgatgctgggcggggataacgcgccggtgatgattatcggcagagcgctggccgataccaccggtgccagctggctgctgttttccgcccttctcggcgcactcggctcgttcttctccggttcgaataccgtctccaacctgacatttggcggtattcagcactccatcgccgtcagcagcggtttaaacgtcaacctgacgctggcattgcagtccgtaggcggcgcgatgggcaatatgatttgcctgaacaatatcatcgccgtctgctcaatcctcggcattactcaggccgagggcaagatcatcagaaaaaccatattgcccatgctggtttatggcgcaatcgccgccggcatggcgctgatactggcattctga

SEQ ID NO: 444120 - DNA, 921 bp, Serratia marcescens
atgttgccaacccatgaatacgccaacgacctgatactcttcgcgcttatcgtcgattgcggctcattcagcaaagcggcggaaagcgccggtatcaccagttccgtcatcagtaaacgtatcggcaagttggagaaatctctcggcgcccgcctgctgtatcgcaccacccgtagcctgacgccaaccgaaagcggcgcgatgctataccatcacgccaaaaccctgagcgcgcaaatgcaggaggcgctgtatgcggtcagtgaaaaaagcgaagcgctgaccggcaccatacgaatgtcggtgcccaccatttccggcgaactgctgctcagcgaaagcgtcgccgaattttgcgcacagcatcctgagctcaaggtcgaaatgcgattggaaaatcgctttgtcgatctggtcaacgaaggcatcgatttagcgatacgcaccggcaccatgcccgactccagcctgatagccaggcacattctggactcgcgctgggtgatcgtctgttccccggcctaccttgaacaacacccgcagccgcaaaccaccgccgatctgttggcgcataactgtctgacctatacctatcaagaaagcggcaccgccaactggctggtcaaacagcccggccacgacgatattcaggaactgcaggtcaacggcaatctttccgccaataatgcccgcgccattcgcaaagcggtgatcgccgggcatggcatcgcgatggttccccgctgcatggtgtatgaggatttgcaggatgaaaaactggtggaaatattaagtggccactgcggaaaagtgctcggcgtctatgccgtttacccctacacccgtaatttaccgttaaaaacccgcctgctaatcgaacatatcattggtagttataaaaggatcagccattatttttga

SEQ ID NO: 444121 - DNA, 201 bp, Serratia marcescens
atgaaaaaagtaaccctgccggcagcggaagcggtgattggcggtaagtgcaaaaaaaattgcacggacagttttgaatggattggcaccgatccaaacaaggtgtgcaccctggtgcgttcctgtacggataaatacggtaagatacaccagacatctatcccggcagtcgacgaaaatcagtgccgtgggcctggctaa

SEQ ID NO: 444122 - DNA, 675 bp, Serratia marcescens
atgttgaaaaaaccactttattttatcgtatatacattatttattattattatctcttcactgatcacgacggcttacattcattattttgtgatgggtgcgcatagtgacgatgacgcaccggcgctgacgtttatcagcgatgagcagattaaaaacagtccgttaaccgatgacaatgcgattgtcgagatcttctcttatggctgccactactgtgcggtcaatgaaaacaatgtgaaagaccttgaggcccagctgccggcaggcagcaaacttgtccgcctgcatatcggcaacccgcaaaacagcggtctgtccgcctatgcgccgctgttcgccacgctgtcggtgatgggactggaagataaataccgtgaaagcgcctaccaggcgattatcaaagaacgccaggatctcagcgacccggcgcagttggggcagtggctgctggataacggtatcgatcgaactgactatcgcagcgccagccagtcgcaggaggtcaaggacctgttggcttatatgacggcggtgagcagttactacaaagtgaacgcgacgccgagttttatcgtcaataaaaaatggttggctcagcaggatagcgattttcctacctttagcaaaaagttgctgtcgctgctgaaaaacgatagcccgcaggaaccgtaa

SEQ ID NO: 444123 - DNA, 948 bp, Serratia marcescens
atgcgtttctttgcggtatgggtctacctgagcgcctgtaacctgtgggaccgtgcgatcggccagtggcatcgggtgctttggctgcgcgcccggctgctgtgtctgatactgcggcataccgattaccgtctggcattggcggtgagcgaggccagccgctggctgccgttcgtcaatcgcggactgcgggggcgtgccgctgtggcgcgcgccaatcagcgttccctgctaggcgacgggccgcaggtagactttattcgtcagatgcgtcgccggcaggtgttggagttggcggcgacctacggacgtaatcgtcaactgctggcgcagatggcgtcctgcagcgcccagctgaatcaggttgtctcgccgctgcatgctgccggttccccagtgatactggcgccgctgcacatggtttccgacattctggcggggatggtgggcggcgaggtgtttcccggcaaagcgacggtgatcgtctcgtccggcgccgaggtatatcaggaacaggcgcgcaggcagggcggcgttaatctggactattgctcgatccatgatgataaccgcgccattgccggcaatctgacgtccgcgctgctggaggcggccgaccatcagcgcaatatcattatttttccggatattacgccggattatacggtaaccaccaaccgtgcccgtacggcgaaactcccttgccgattgtttgaccgtcctgccaatgtgcacagcggcgtggtgcgtttggcgcgcgcgctgtccgccagcgtggtgttttattacctctactatgaccgcggcatcaggattcatattttcccgccggtagaggccggtgcactgcagcaggcgttgccgacggttattgagaccgcattgcgacagcgccctgaagcctggatgctctggcatgcgcattcgttgttttttatcaatgaataa

SEQ ID NO: 444124 - DNA, 2157 bp, Serratia marcescens
atggaaaagataatcccgacgcaggtgtttcaaagcgaaaccaacgaatgcggcctggcctgtattgcgatgctggcggaaacacagggaattgatgcgccactggaagcgttgcgcacgcgttttcctgcctcccagcacggcatgtcgctggcgaccttaaccaccatcctcggcgaattggcgattccagcctatccggtatcctttgagcaccaggaactggcggagctgccgctgccggcgatcttacactacggcgccagccattacgttctgttggcctatcgtaaaggcaaccacgtctgcgtgatgaatccggcgatcggtcagcagttactgccgctggaggcgctcaaacaggaaatcagcggctatgcgctggtgctggatcatgaaacgccgccggatgccgcggcgctggccggtgtgaagcgcagccagcgtttcagcgcgctggagtgtatgagcatgcaggaaacctcgcgtctgccgggcatctatcgcctgatgacgctggcgtttctgatatctcttacgctgtttattatgccggtgatggtcagcagcgcgattaatgacgttttttcaagcgccggcgagaccgatttcccctatttttattacctgttggcgtttgttatctccacctcgctggcctttggcgtaaggctgattaccgaacgctttatcaaacggttcgtggtgctcaacagcgtggccggtttttcccggctgttagccaactcgttaaacttttttgataaacgcgcgcccggcgaaatattcagccgttttgctaactggcagtcggccgccgggcaaaagatagagctggataacggcctgcgtaccgactggatcgtcggggcgatcgcgctgggagtgatgtgctatatgagcccgcttctggcgctggtatccgtcgtcggcgtgacgatgatggggctggtcagcgtatgggccatttaccgcgaccgttactatacccagcagctgcaggaaaaaagcgccgaacagagcgactttattctggagaccattcagggattctccaccatcaaatccgccgggctggccagcctgcgcaaaggggcgtttgcccagtatgcgctgtcgctgttcacctgccggcaaaagcagaaagtttatgagcagatcaagggcagtatctatcagctgatcggcagcctggagatggtgttctttatgttgctggctctgcctttgctaaagagcggcgcgttaagcctgggggagttttttgcctacagcttcgtgcgtgagatttttacctcgtatatcaccaaaatcttctttgccattttgcaaaaaaaccagctgcacgtgatagataagcgtgcgcgcgacctattccctgtgggggagacgacgtcggctggggcatcgtcggttccagcggccgtgccgccgtttatccgcagcctggggtaccacgatatcgtgttcgcctatgatgcccagcagccggtgctgcagggcctgtcgttttcgctgcggcggggggaaagcattgccattgtcggggagtccggtgcgggtaaaagtacgctgttgaaagtgatgtgcggcctgattcctccccagcagggcgatatcgtcgtggatgacggcccgattgactatcaccaggcacacgcgctgtttttcctgcagagccaggaggatattttgtttaacgcctctgttctacaaaatatcacgctgtttgatgaagattttgatgaaggccggagagccgagattgagcgctctctgcgcgggcttaacctggaaccggcgatcgccaggctgccgggcggcatgaacgcgctgattcgtgaaagtcacgccggcctgtcgctggggcagcgccagcggctgctgctggcgcgcgccatgtacagcggccgtccggttctggtactggatgagcctaccgccaatctggatgaagagacggctcagcaggtgatggacaccctgctggcgcactgtcgcgagcagggaaaaacgctgattacggtgacgcacagcgaaagcgtgctgccgaagtttgaccggatttaccgtatggcggaaggccggatagagacgatgacgtcatcagcagtgcggccggcaccctcgccgataccgtgcggagaggtctgctga

SEQ ID NO: 444125 - DNA, 1155 bp, Serratia marcescens
atgccgttacgaaaaaatcgcaaagctgctcttgcgctgctgctgttactggcgatggccattgtggcggccatcagtttttacatgcgcagctcggcagagcatatccctgaacccaccgccgtagtcagccgcggcgatatcgaaaaaaccgtattagcgaccggtattttgaaaccgtcgctgcaggttaacgtcggcgcacaggtcaatggtcagttgaccaagctgtatgtcagtcagggggaccgggtgaccaaaggtcaactgctggcagagattgatccgacgctgcaggaaaatgaagttcgtaaatcggaagcacagctgcaaagtgcggtcgcgcagaaacaggcttcagaagcgagcttgctgcagtatcaactggagctaaaacgtcaacgccagctggatcgcgatggcgccggggtgaaaagcgatttggaaaaggcgcaggcgcaatacgccacccaggttgcccaggtgcggatgaacgaagcgcaaatcgtgcaaatggaaatggcgctggagacggccagggccaacctgggctatacccgcattctggcgccgattgatggtgaagtgctgggtattgtcaccaaagaggggcagacgatcgtatcgtcacagagcgcgccaacgattctggtgttggcgaatgccgacaccatgacggtgcatacccgtatctcagaaaccgatattttgaaagtacgtgtcggacaaccgctgtggttctatgtcgtggccgatcccaaacgccgttatgacagcgtgatgggctcggtgcaggaggcaccgaatgaagcactgcgggaggacagtccggcctcatcgtccagtcagcagccgacggcggtgtactacaacggcgtatttgccattgccaaccttgagcgccagctgcgtacgtcgatgaccgcgcaggtatttatcatcaccgaccaggagaaagatgcgttgcggatcccgttggcggcactcgggcagccacagggaaaagaccgttatcaggtacaggtccggcggggcgcaacgcttgagccgcgcacgatcgtcaccggtatcagcgaccggcagtttatcgaggttaaaagcgggctgaaagacggggaaaaagtggtgctgacgcagattgcaggagggcaataa

SEQ ID NO: 444126 - DNA, 1950 bp, Serratia marcescens
atggccgccgctgaacctatcattgcgttaaacgacatttcacgccgtttctcttcaggcactgaaaccgtagcggtgctgaaaaatatctcgctgacgattaacgcgggagaaatggtggctatcgtcggcgcctcgggatccggtaagtcgaccctgatgaatatcattggctgcctggataaaccttcgtcgggcgaaatgcgcattaaatcgctgtcgacacggtcagcgagtggtgagcagttggcacagctgcgcagccagtatgtcggctttattttccagcgttatcacctgatgccctatctgaatgccgcggaaaatgtggctattcccgcgctgtataccgcaatgccgacgaatcaacgtcaggaacgggctgagtacctgttgcagcggttgggattgccgcatcgtatggcatacaaaccggcccagctttccggtggtcagcagcagcgggtcagcgttgcccgggccctgatgaacggtgctgaaattattttggccgatgagccgacgggagcgttggaccgcgccagcggtcaggaactgatgggaatattgcattcgctgcatcagagtggccataccatcatcatcgtgacccacgatcgcgacgttgccagacaggcgcagcgcattattgaaatcagcgacggtgaaattattgacgaccgtctgaatgatggcgtcgcccagagcgagccgcctcaggctctgcctgtggcggcggccaccgggcgcgcgcccctatggcaaagcgtacgcgaggccgtgcgtatggcatggcgttctttgttaggccatcgggtgcgcgcttttttatcgatgctcggcattattatcgggatctcatcggtggtatccgctatcgccgtgggagagggcgcccgacagagcattctggaaaagatcagccaattgggcaccagttcgttagagattcgtcccggccttggctgggataagccgcgtcctgatttcgaacgttcgctgacgatagaggacgtggagatgttggcaaagcagccctatatcgatggtatttcgccgctgattaataaatatattcgcattattcgcggcggaaaggaggtgatggtctcgctctccggcatcagcggtgattattttcatgtgcagggcgtgacgctggtcagcggcaatgcgttaaccgagcgtgatcttgaagagcgcgaaccggtggtggtcatcgatgcagagctggcaaaaaccctgtttccggatggcgaacaaccgctcggcgcgatcgtacaaatcggcgggacgccgtttcgcgtgagcggcatcgcaacgaaaaagggcccgtttatgggcggacgactcaatgcctggatgccgtatacctcgctgcaggtgcgtctggcgggcgatgcgccgttggaatctatctcactgcgggtggccgacggttatccgttggcgcgtgcgcaaaaagacgtggagcagcagttggaggtgttccacggccgccgcgacttctttacccaaagcaatgaccagatgacgcagaccattcagcaggcgtctgattccatgcagctgttgatcaccgcgattgccggcatttctctgctggtcggcggggttggcgtaatgaatatcatgctggtgtccgttaccgaacggacgcatgaaatcggtatccgcctctcggtcggcgcccgtccggtggacattatgcgtcagtttttaattgaggcgatggtgatctgcacgttgggggggatggtcggcatcgccggcgcgacgttggcgggcgttattttctcctggttcaccgatgagttcacgatggtcttcacctggccgccgattgcgctggcctgtggattttccgcgcttatcgggctgggatttggctttttccccgcgcgtaatgcggcgcggcttcaccctacggaggcgctggcgcgcgaatga

SEQ ID NO: 444127 - DNA, 1401 bp, Serratia marcescens
atgaggcagaaaataatcgtggttctgttgagcagcttgacgttgtccggctgtggcgcgttggtaaaaagcgaatatcaacagccaacggtatcggttccggcgcagtggcgtacggagattaccgggccggcttatttggcaaatagcgaacattggtgggatagcttcaacgatccgcagctttcgcagctgataaccaacgtattaagcagtaataacgatctggcgcgagcgggcctgcagttgcagcaggcgcgcctggaagccgggttgagcaagaccaatctgacgccggacgtgacggtgagcggcggcgccagcaacagccaaatgatgcgcggcggcagtgcgagtgaagattatcgctcttcactgaacctgagctatgagctggatctgtggggaaaactggcgcgtacgcgcgagcaggccggctggttggtgcaggcttctgaacaggatcggcaaaacgttgcgctgacgctgattggcaatactgctgactattattggcagattgccaggctcaatcagcagcttgaagcgcagcaagcgatgatgactaacgcacaggagacgctccgcctggtgcgcgcacgtcatgccgccggcgccgccagtcaaattgaactcctgcaggcgcgtcaatcggtgaacgacagggaaaatcaacagcgaagcctgcagcagcagcgcgaagcggcgcgcaatgctctggctattttattcaataactcgccagacgtgcgtcagccggagctgcgtgggctggatatcagccaggaggtaccgatcgccacgagcgtgccgctggcggtaatcggccgcaggccggatgtgcagggggcagagaggcgcttgcgtgccgcgctggccggctctgatgtagcgcggctcaatttttatccgtcgctgtcgttgacggcttcgctgagcgccggcagcgccatatttcagcagtggtttagtcagccgatcagaactctgggcagcagcgtcgcgttgcctttcgtgcagtggaacacgatgaggttaacggtagaaaaagcccaacttgatgtgcagcagcagatcattacgtttcgtagtgcggtatataacgcgctttctgacgtggataacgcgatggcgcaacggttgagttatcagcaacagaggcagcgcctgctggaaaacttacggctcagccaacagcggctgacgttggcggaaagccaataccgcgctggtgcggtgtcgttccaaacattgatcgatgcacaggatgcccgcctgagcagtgaaaacagcctggcggaaatgcaatacaactacctgaatgccacgatgaaattatggctggcattagggggcgcagtgggtaaggacgtaacgacaaagggaaatgctcatgaataa

SEQ ID NO: 444128 - DNA, 1263 bp, Serratia marcescens
atgaataacatgtcttcgccacgccgggtagtggttaccggctacggggcggttacgccgctgggagagaatgcgcagcagagctgggcggcaataatggattaccggttaggctatcaatatcacgatcggtccgctgcggggattcagtcgcgcttctttggactggttgcgtcagaacctgatttgaagtcggtaccggcggcgattcgccgccgcttgccgcgctttgcgcgtttggcgcttggggcggctaaagaagccgtcgagatggccttccagggcgctgcgcccgtcgattcttacgacccgctggagtgcggcgcgattatcggcagcggctgggccgggcaggatgaaagttacgacaattttgatatgtatcagcgcagcggcttgggatcgccatttgcctgtttcctttccatgccgaacgtcgcgactgccgcctgcagtttgctgtgggggctgcgcggctatcagaatacgccaatcgccgcctgtgccaccggtactattgcaatcggtgatgcgtttgaggcgattcgccacgggcgagcatccatgatgttggcaggagcgggcgaatcgctgcgctccgatccggctgtgtgggatattgacgtattgcgcgctttggcgcgagaacaacaggatgccgccaaagcctgctgcccatttagtctggaccgcaacgggtttgtgctgtcggaaggggcggcggtgctgtgcctggaagagcgtgatgccgcactggcgcgtggcgccgttatcctcggcgagataaagggttacggcaactattccgatgcgtttgatttcaccgcgccggccgacgataaggtcgccagggttaaaactatccagcgggcgttggtgcaggccggtattggcgtgcatgacgtggattacatcaatgcgcacgggacgtcgacgccgctgaacgatcttaatgagaccgaggcaattaaactggcctttggcaaggcggcatataccacgccgctatcgagcaccaagtcttattccggccaccttatcgccgccgccggtagttttgaatccattatttgcttacaggcgatgcaacatcagctgatgccagcgacctgtaacctgaaaagtcccgatccggcctgcgatctggattacatcagcgaaggccaccgggaggcgaaattgcgccacacgctaaacctgagttttggctttggcggcgccaatgccgcactggtgatcggcagaggtaacgatgcggtttaa

SEQ ID NO: 444129 - DNA, 804 bp, Serratia marcescens
atgcggtttaactatacgcgtagcgatgcggagcaatgggcggcattttccggagactacaacccgatacattttgacctgcaatgggcgcgtaagattggcagtgagcggctgacggtgcacggcatgcgcgccatgctggatatgaagcaggctctaagcgaggcgttgcggcctgcatcgccggatgcgcattttttccgctttagcgcccgactgcgacagccggtacgctgcgaacttgattatcgcctggacgtcgccaccacggagcatcaggcaagcggcagactgttggatgagtgcaacgatgaatgctgtttcagcgccaaattgatcccttctgcggcgtttgacatcactgacgcacctcttgttcagcggctggaacggcaggaagttgagatgcttcggcggcgctttccaggaactccggaggcagcgctgttgcagtggagctttttggatgcgctgttgttccaacgcatcgtgtcgtcgacggagatcttgtcggccatcaaagagcgattgccgacaatgcaggcgcagacgctgattgatgtttttgcccaactgtcggtagtacagacacatcatgacgtgcattttcacgccagtttgtttatgcccggatcactgggctgcgttgagagcgttttgcactacgccattttgccgccgcttattgtcggtgatggcgacagcggattggtggtgcagatagaagtacagtgctggacgccgcaaggccctctgctggcaactgcggtaacgttaaaaacggcgagttatacgcaacggtaa

SEQ ID NO: 444130 - DNA, 249 bp, Serratia marcescens
atggaaagatatcaacaggtttatgacaccctgtgcgagatgatttgtgatgccaaagatctggattcatctcagctttcccctgatatgccgctgcaccagctgaagctggatagcctggactatgtcgagatgatggtgctggcgaaaagggagtttggcgctacgttgaacgcggaaatgtttattgagcatcccaatatgacgctgggcgagctgtgtcatgctctggccgaacagaaaaagtaa

SEQ ID NO: 444131 - DNA, 762 bp, Serratia marcescens
atgctctggccgaacagaaaaagtaagccgatggataactgggtgttagtgaccggcggaagccggggtatcggccgagcgctggtggaggaactggcacagcgctggaatattgtttttacctggcgcagcggcgagctggccagtaacgaggtggttgccgcctgcaccggcttacccggttgggtggttggttatcagtgtgacggcagtaagcaagacgatgttgaccgcctggcgcctgaattgctggcccgttatggtgccccccatgcggttattcataatgccggcgttacgttagacggattgcatattcagcaacatggggatacctggcgtcaggtaatggaaaccaatcttaatgcggttttctactggaataagcatctgttgccggcaatgatatcgcaaggggaaggcgcgctgttgctgatgtcttcggtcagtgcgattaaaggtaatgtaggacaaacggcctacggtgccagtaaggcggcaatggtggggttggggcgttccttggctcaggaactggggcgctttggcattcgtgtcaattgtctgctgccggggattatcgacagcgatatgacgcgtaatatgccgccggaagcgttaaaggggctacgtaaacaagttccgctgcggcggctggggacagcacaggaagtcgcgagcgtgacggcgtttatgattggtgaagagagccgttatatgacgggacaggcgttggtgcttgatggagggctaaccgcctga

SEQ ID NO: 444132 - DNA, 549 bp, Serratia marcescens
atgaaaaaccgcaaacacctaaccccatccgaagtggagaaattgcttgaggcaacactgagaggtaagaatccagagcgagattactgcttgatttggatgtgttttattcatgggtgccgcgtcagtgagatcaacagttggcggttgtcagacatcgatctggaaggggggaatatttatattcatcgcttaaaaaatggtttttcaaccattcatccagtatacgtgcgtgaaagaaaatgtttgcagcgttggttggcgaagaggaaaacctaccgtggggcagacagcgaatggttatttctttccaaccgtggctcccgactgtctcgccagcggatttactggctgattagaaattatagccaggccgcaaatttggaagtgaacgcacatcctcatatgctacgccatggctgtggatatgcattagccgatcgtggaattgatacgcgcttgattcaggattatcttggccatagaaatattcagaacaccgtattatatacggcaagtaacgccgggaggtttaaagaagtatggtaa

SEQ ID NO: 444133 - DNA, 534 bp, Serratia marcescens
atgaaaaagaatctgctcgctgttgctgtgttggccgcatctgcgttttccaccgcggctctggctgctgatggtcaggttaacttcaccggctccattaccgatgtagcttgtgaaattgacgcgaactccaagaatcagaccgttaacatgggcaagattgccacgaccgcgtttgctggcgcaggctccactgacaaagtcaccgcaggtgacagacgctttagcctgattctgaaaaactgcccagcttctgtaacggcggcgaccgtacgcttcggcggtaaaatggttccgggtgctgacggcgtactggcgctgaccgatatgccggatatggctgaaggcgttggcgttcagatcactgacgaacacaataacgtgatcaacctgggcttggattctgcagtattccctctggttagcaccgctgacaacaaactgaactttatggcgagctactacgcgctggcgagcacggtaactcctggttctgctaacgctgtagcacagttcaccattgtctatcagtaa

SEQ ID NO: 444134 - DNA, 675 bp, Serratia marcescens
atgaaagtttggcagagagcgctggtcgcagcgttattgatgacaatgggtgctcaggctcaggccggtgtgatcatcggtgggacgcgcgtggtatacgacggtgggaaaaaagaatcttccctgagcatcagtaatccggacaaggtgccgtatctggttcagtcctggattgatgctggcgaagacaacgccgttaaggcaccgttcgttattactccacctttattccgtctggacgatggacaaaataacatcctgcgcattgtgcgggctggtggtgcgttgccggaagataaagagtcattatattgggtcaatattaaatcgatcccttccgcaccgaaacaggataatacgctgcaaattgcggtgaaaacacgtatcaaactgatttaccggccgagaggcctggaaggaacgctgaatgacgccgcgcagaaggtgacatggcagcgtaatggcaatgccctgcaggtttccaatccctcgccttattaccttactttttttgacgttaaggtcaatggcgtagcagtaaaagacgccacgatggttgctccgcgttctagcgcgcgtttcaccttgccgtcaggtaattccggcggtgcattgacttggaaaattattaatgactttggtggggccagtaaagcgttcacggccaatttataa

SEQ ID NO: 444135 - DNA, 2559 bp, Serratia marcescens
atgaataacccgaagcgtagcagccctcgagggttcagacaaaccccgctggcttggttgatctcttgccaagtagcgatagtgatgggcttttccggcttggcgcaagcacgtgactactttaaccctgcgctattggaaattgataatcctgaccaacgaggtgtcgacctttcggtgttcgaaatgggggatacccaggcaccaggaaaatatcgcgtagatgtctatgttaaccgtgaaatggtagagacccgcgatattgatttctttctgagtcgagacagccgcggtcagaatagtttgcagccatgcctggacagtgagctgttggaaaccttgggggtgcgtgtcgatgctattcccgccataaagacggctggaaaatgcgttaatatcgagcaggtgataccccaggcttcatccacgttccgtttcggccagcagcgcctggaattaagtattccccaggcggcccttaagacgcaggctcgtggttacgtttcaccccaaaaatggcattccggcataccggcattgctcgccaactatagtttcagcggcgctaacgataaggcgcgacgcggtgatagtcataacagcgacagctactatctgaatttgcgctccgggctcaatctaggcgcttggcgtctgcgtaattactccacgtggaatcgcgacagcaccggggggagccagtggcgttccattaatacctacctacagcgcgatattattgcgttaaaaagccgtttaaccctcggcgatagcagttcggctagcgatatcttcgacagcgtaccgttccgtggtgcccagttagagtctgatgacgacatgctgccagacagcatgaaaggctatgcgccagtggtgcgcggcattgctaaaagcaacgcgcagatcaccatccgacaaagcggctacgtgatttatcaaagctatgtgccgccaggaccatttgaaatcaatgacctctatccaacttcgggtagtggtgacctgaaagtcacgatcaaagaagccgatggcagtgaacagaatttaacggtgccgtttgcctcggtgccggtgctgcagcgtgaagggcgtttcaaatacagcatcgccagcggtcagttccgttcttatctcgataacgtagataagcggccgttcacccaggtgacaggtatctatggtctgccgtggggggcaacaatttacggtggtatgcaagcggccagtaaatatcaggcgttagcattgggttgggggcaaaacctgggcttgctgggggctctttctgccgatgttacacaggcttggaccaagccggaactacaaccaaaagagcatggtcagtcttggcgtctgcgctacggcaagagctttgctgaaacgggcaccagcttcagtttggcaagttaccgttattcgaccagaggtttctacacgatgcaggaaacgttggaaacctataccaacggagcgtcgatccgcttcccgctgcataagaagagccgctctgagctcaccatgaaccagaacctgtgggaaggtgccggggcgctgtcattgagtctgatgaacgaagagttctggaacgataatcgccgcagccaatctgccagcatgggttataacaacagttggtcgggtgtcagttacgggttgtattacacctacataaagaatggttataacagcgacggtaatcgcaccaacaatgaagaccatgtcgtagcctttaacgtcagcgtgccgttaagccgttggttaccaagtagtaatgcgacctatagcgttaacagtagccgtaacggtaaaacttcgaaccggatcgggttacatggttcggcgctggaggacagaaacttgagctatagcttgagccagggctataccagccaggggcagggtgccagcggtaacgtcaacgttgactatcgtggcgggttaggtcagatgaatgtgggttacggctatgaccgtgatactcagcgcctgagctatggcctgcagggcggtatcttgctgcatgaaaatggtctgacgctgtctcagccgctgggtgacaccattgcgttggtcaaagcaccaggtgcgaagggtgtccgtatacaaaaccaaaccggtgtgaccaccgattggcgaggttacgccgtggtgccttatcagtcgccttaccgccgcaacaatatcaatctggataccacaacgttgccggacgatgtcgatatgacattaaccagccaggcggtggtgccgacacgtggtgcagtcgtgcgtgctgagttcaaagcaaacgttggtcagcgtgtgttgatgactctattacgtcaaggtggtgctgcggtgccatttggtgcaaccgtcaccgatctgcttaatccggataacagcgcggctatcgtcggcgatgggggccaggtgtacctgtccggtctggcggatagcggcaagttgaatgtgaagtgggggaatgggacttcgcagcagtgtctggtgacctatagcttgggggctcaagtgcagagctctactatccgtacggttaatgctcagtgtttataa

SEQ ID NO: 444136 - DNA, 1092 bp, Serratia marcescens
atgaaatttagtaatttatttaaaagattaccgcttctcacgaccttcaccgtggggatatttgccgcaccgtctctgttagcagcacctgctcctggaacttgtgagaatacctctgacgggacaacagagtatccgttttcatttgataggaaattcgacagtccggatcagaacgttggcggacaattctttagaaatatctatgaatggaacttaaataagtcttatatcgctaattgtggctgttcaagaatgagagaggcgttttttacagccaaatccacgctgcctgaagatatcggcgtttcggatggtgaaaacccagggttacagtattttaagttgaatgattttttgtcagtggcaagtgaggtgtatattgccggacgagaaaggtcatatttcaaagttccttttaatcagatagggaataaaaactcacaggctgctgatgaggtggcctgtaatgctacaaaaaacacctataaaagtggttctatcggtaaggttcatatttatttccgtcgtccatttgttggtacgcaagttattcctccaacccggttgctggaggtttatatgacatcttcgcgggatgccataagtgctctgccggtagcatacgtgatgatgagcggcaccgttactgtcgatcagcaatgtgtgcttaacgggctaggggctgggcagcctattagcataaactttggtaatattatgtcgacggagtttaaaaccaaaggggcgatgccaaaaggatttacccctcatcgaaaagagctccgcctggcatgtaataacatttctgatggcgtgaaagttaacctttcattccatggcgaacctgaccccaatgtttctacggcgttgaaaacggatagtaacccggatgttgcagttagaatagatgaccctatgggaagtcctatttctcccgcaggggggcgtttgcctataaatatgaattttggtactacggagcaaacaggtagcactgaaattactgtttaccctattaataccaccggtgagttacctaaggtcggtgtgtttaattcatcggcaaccattaaagtgaatatagagtaa

SEQ ID NO: 444137 - DNA, 534 bp, Serratia marcescens
atgaaggaactcaaattgaacgtaattaaaggtagcattgcggcattactgactgcagcgttggggatgagccatactgcattggcggatacccagttaaatattaccggtaccatcaaggcttcaccgtgtaatgtggttaatgataccggcaacggcatctcggtaaacttgggcgataacatccaggcggcgacgttggggcaggcgaatacttttaccgagtggaaatctttcaaactgattctggaagactgtccgacaaccaccacatccgtaacggcaacctttagcggtacgccatcggatgaaagtgctgatttgtataaaaacaccggtgaagcgagaaacgtgcaaattgatttgcaagatgctaccggtggtaccggcttgggtaacggcaagagtctgaagcaatctatcgtgaataatgccacgacttacaacctgcaggctcgtgcctactctactgcgggtagcgcaacgccaggttctatcgtgggtacggtaatggttgcctttacctacgagtaa

SEQ ID NO: 444138 - DNA, 705 bp, Serratia marcescens
atgacggtagctcattcttatcagcgggagagtgcccactcacctggtactaatggaaaaagcggacagggcgtgattgtgatggaagcctgtccgatgacggctcttggtatgcgtaatattctcgcgcaatcctgtacgcagccagaaaatattaaacatgttaataacttggctgctattcctaatctgatgcgtagccagccgacttcattgttgattatggagctgtgcggcgagtctgaatccgtattggacgggttgcgcttgatctctatgtgcctggagcactggccatcgacggcgattgtcgtttgcaccgcgctcgacgacccgcgggtattgcaattgctcacggtttcaggcgtaaaaggattggttttaaagcaggaaccggccattgcgttggcgcagtgtgtccagcaggttttggccgggcgccgtagctatagccataaggtacgccagcttttggctaaccagtccattggtggtaaggctttgactgcgcgcgaactggatgtattggcgtacctgttctctggtaaaagcgtcactgccgcagcattgatgatgcatcgtgatgtacgcaccgtcagtacgcataaacgcaatgccatgctgaagctggggtttcacaatgatggtgagctctttctgcaagggaaatggatggcgaaaaccggcccggtgtttgccaactga

SEQ ID NO: 444139 - DNA, 672 bp, Serratia marcescens
atgcagcctttaacgccaaactctaccagtatcgccttaatggatcgttgcccgctaacgttagttgggttatcgagtttcattgaggatcttaatgccccaagtcagattgtcgtgcaggaaaccagcatgtcggtagtttctgaggcattactgtatcagccaaccgacattcttattactgaactcagtgggttgaatgaaactatcgctgagggacggaaaacattactggaattatgtgtacagctcccgtcattaagagtcatcgtgtacacccgctgtcagtctggtgatgagttaaaagccttgctggaacaggtcaatatcagcgtgattgctcgtgatgatacattgcctcaggtgggtgaatttttcacccgtgtttttgacggcgagcgcgtattgagcccgttaatcggcacatgtttggcgcgtaacgacagcgaagaaatgtctaatctgcatcatttaacgcgttgcgagaatgacgtgctgacctttttatttaatggcatgagtctgcgtcagattgctgaattacagcggcgtagtattaaaacgatcagcgcacacaagtgtaatgccatgcgtaaattacaggtaaaaaatgacagcgaactgttctcactaaagaaaaatatcacccagcagtttgttgtgaatgagtaa

SEQ ID NO: 444140 - DNA, 717 bp, Serratia marcescens
atgacggtagacagccaatcaatatcgcgtattgcactattaatctcctgtcagttaactgcttacgggcttgagcgattgttggcgcatggtatgtcacataagcgagagttttggcgtttagattctctgtccggtacttgccagcggttattacagcatgccgatatgctgattatatcattcagcatacagcagtcagactggcacgcgcgcttactgatgttggaagcgctgcgtaaccttcggccggcaatgccgattgtggtgatcattgatgcccatattccatttttattacagcaacttgatgttctgcatattaacgggattatcagtcagcatgattcattgaatgaaattgacgatgtactgatgcaaatctttgttgaaggcagcccatctcggcacggcctgaaaagttcgctggcaggtcaggccgccgccagtgtgttatctcaacggcttagtacgtcggaactacgggcgctgcgttatttgctcaatggctattcattacaacaaacggctgcaaagatgcagcgtaataaaaaatcggttatcgcattgaaaaataaaggtatgcgcaagttgggaatcaaccatagtgccgggctggttgcgatacgcggcatgttggaaaaccaataccgtcaacggttgccatcgtccaatacgtctattgataaccgtaagccagttacggcaagccgctag

SEQ ID NO: 444141 - DNA, 432 bp, Serratia marcescens
gtgaaacatttgcagataaccaatggacatgcgcgtttgctgatcggcgtcatgatggcggggagcctgttgcttaccggttgccagagtaaaaaaccacgcagcctggtttctcctcctgtcacggttgcgcctgtacccgctcctgttgttccgccgccaccagaaaagaaagagagccgtatcagcctgtgtcagagtgaactggcgtcgctgaaaaaggtgaatcctaaagcctacgcgttacgaaaagcctattttgacagcctggtcaatagcgtgtcggtgtatggcgcggtgcgtggcaatgttaatactcagaccaaggatacccttgatgcgttgtataaatataaaacgaatcaggcgtgttcgatgattgaacgtgatgtgcttgatgcgttgatccgtaaaggggagagcgtgaagtga

SEQ ID NO: 444142 - DNA, 2154 bp, Serratia marcescens
gtgaatcagggtattaagtatggctttttgtttgctctgacgctgccgtttggcgctggagccgcaaacagcttcagtgatgagcaaacgttacagtcgctggatgccatcacccgcagagttgacgatgcgccagcacttttgttactgacgccttcccagttggaggcaattgattcgccaccggaacagaaagcggcacagcaagccaaaagcagtaatcagttggataagagagcggcgaagcaaagcgccgcttctttacgagaactgaagtctcagcaggcgaaaatcaatcagctcaatgccgccttggccaaacagaatcgagagttgaaaaagctgcgagaggcggcacaagcggatggagactcacgtactgaagtggaacggctgaaaaagtcgttgcaggcaagcttacaaaaaacggaaaacatgcagcagcagctgtcggcaatgaatgctgcgaaaagtgataaacagcaggatagcaccaggttacggcaggcgttggagaagagtcagcaacaaagctcagaattacaaaaacaggttgcggcgttaaccgttgcgcaggacgagcgcgtaaaacagcataaatctatgcaggccacgctggatgaaaaccggaagcatgccgaagagttgcaaaagcggctggcggcgttaaccgatcagcgcaaacgcaaggataagggtagcgcagtgttgcagagcgctctggacgacagcaagaagcatggtgaagagctgcaaaaacagctgacggccctgatatctcaagctaaggcgaaagaaaaagatgctgcagcgttgcagagcgcgctggaggaaagcaacaaggggcggggcgagctgcaaaaacagctgacggcgctggccgcccagggtaggacgaaagagaaagataccgccgcgttgcagagcgcgctggaggaaagcaagaaaaacggcgcagagctgcagaagcagctgacggcgctggccgcccagggtaagacgaaagagaaagatgccgccgccttgcagaaggcgttggatgaaagcaacaaggggcggggcgagctgcaaaaacagctgatggcgttggccgctcaaggcaagacgaaagaaaaagatgccgccgcgttgcagagcgcgctggaggaaagtaagaaaaacggcgtagagctgcagaagcagctgacggcgctggccgcccagggcaagacgaaagagaaagataccgccgcgttgcagagcgcgctggaagaaagtaagaaaaacggcgtggagctgcagaaacagctgacggcgctggctgcccagggcaagacgaaagagaaggatgccgccgcgttgcagagcgcgctggaggaaagcaagaaaaacggcgtagagctgcagaaacaattggcgacgctggtggaacaggggaaagcgcaagcaaaagaccacgttgcgttacagcaggaactggctgtactgaagaaagagcgtgccgttcgtaaagacgccgtggcaccgccgaaaacggccgatgagatccgcgattatgcgatcggcagttcattaggcaatgacgtattggcgttactgcaagaaaaaattgctcaggggatcaaaatcaaccaacgcatggcgttttccggcgtgcaggatgctttacaaggtaagaacaagctggggcaagataagatcgccaaggcgttgtatgaaaccgaagtggcgctgaacgagaaagagaagaagttaaaggcggaaaccgaacggcaaggtttacgctacgttgagcagttcaggaagaagaagagcgttaagaaatcctcaagcggtttttattatcgggttgattacctgggcgcagggaaaattgacgatagtgatacggtagccgttgtcgtgaaggaaagcctgaccagcggtaaagtaattaaggatatggatattgctggcacctctatttcgcaaccgctgagcagttatccggccatgttccgtgatgcgattaagcaattgcagaatcatggcacgatgacaatggtggtgccgcctgaactggcatatggtgataagggactggctccggatattcctccgggttcaaccatggtttataacatcagaattcttgatgtattgccagcagacggtgcagctggcaataaaaaatag

SEQ ID NO: 444143 - DNA, 582 bp, Serratia marcescens
atggcttctttgttttcatcaaggaagagtatgaaaaaacgcaaatacctcactcatattgaagtcgaacaaatgatagatgccgttcctcaaggcctcaattctgcccgcgatcgctgtatgttactgatgtgttttatccacggtttacgagtcagtgagttacgcggtttgcgattagaagacattgaccttaataccaaccgcctgcacgttgcccggctgaaaaacggcttttccgtgcagcacccgattcagatccgagaacgcctggccatcaagcaatggctcagccaacgaccacgctatttagaagccgatagcccatggctgttcctatcacgacatggcggacaaatatcgcgccagcagctttatcgcctgatgaaaaactatgggcaacttgccggcattagcgttcaggtacatccgcatatgctgcgccactcctgcgggtttgctctagcggataaaggcgtcgacacccgactcatccaggattacctcgggcatcgaaacattcaaaacaccgttatttacaccgcaagtaatgttgagcgctttcgggtcatacatatttaa

SEQ ID NO: 444144 - DNA, 1656 bp, Serratia marcescens
atggagttgctacgggtggtatatcaccagtatcgttggccgtttctggcggtgatggccctgacgttggctagcgccgcgttgggcattggcattattgctttcattaatcagcatctgatggcggcggcggcggagaatccattggctattttgccgcagtttctcgctttgctgggtatcttgatggcggtcactttaggttcgcagttggcgttgaccacattaggtcaccattttgtctatcgcctgcgcggacaattggttaaaagcattttggataccaatattgagcgcatcgaacatctgggcagtgcctctttgctggccagtttatccagcgatatccgtaatatcaccatggcgttcgtacgtttgcctgagttggtgcagggtgtggtattgacgatcggttgcgcggcttacttgggatggctatcgccggcgatgctggcggtgacggccgtttgggtagcgatcaccattctggtcagttggctgttggtgtctcgagtatatcggcatttaactcaggtgcgggaagctgaagagctgctgtatcaggattaccaggcggcgatcgacgggcggaaggagctggcgttgaatcgtgaccgtgcgcagcgtttgtatcagcagacttaccgggccaactctgatgaataccggcaccacattattcgcgcggacacgttccatctcagcgcggtgaactggtcgaatatcatgatgcttggcgctatcgggctggtattctttatggcgaatggcctggggtggtccgatacggcggtggctgcgacttattcgctgacgctgttgtttttacgtacgccgttgctacaggcggtgggggcattcccgatgctgcttggcgctgaagtggcattcaaaaaagtgaagttgctcaagctggcggagtatcagccacactttacgccgacggtcgccatgccttggcaaacgctggagctgcgcgatgtgtcattccactatgcggcgggtgaacaggcgcaggggtttgccgtaggtccgttgaacctgacgctaacgcgtggtgagctggtgtttttgatcggcggcaacggtagcgggaagtcgacgttggcgaagttgttaaccgggctttatcagccggtgagcggacagataatcattgatggcgtggcgctgcaggcggcggatcaagataattatcggcgcctgttctcagctattttcaccgacttttaccagttcgaccggttacagggcgccgatggcggggagccggatgcggaactggtggcaaactggctcgaaaagctcaatatgcagaacaaactggagtttgacggcgatcgcgtgactaaccctcagctctcccaagggcagcgtaagcggttggcgttgctgctggcggttgcggagcagcgggatattttgctgcttgatgaatgggcggccgatcaggatccgcaattccgtcgtatcttctatcgtgaactgctgccggcattacgtgcgctgggtaaaacggtgtttgccatcagccatgacgatcactatttcgaacatgccgaccggctgttagaaatgcgtaacggcaagctcagcgagctgaccggtagcgagcgtgagcgcgccagccgggattccgtgtcacaaatcgattga

SEQ ID NO: 444145 - DNA, 171 bp, Serratia marcescens
atggataagaaaaaaattgagacggagaaacagcgcgtgtatcgcagcaaaacgaaaattccgccatcatggcagttgaacgaagcgcagcgcgcgtttattgaagacctctggcaggatgatgcgccggaggcggaagcgcctcgcccagtgaaaaaggattcgccttag

SEQ ID NO: 444146 - DNA, 1728 bp, Serratia marcescens
atgaacagcacacaaaaacatgccgtctggcagttaattaaacctttttgggtttccgaggagaaatggcgcgcctggggaatgcttatcgccatcgtcgcgctgtcgctggggctggtctatatcagcgtcctgatcaatcagtggaatcaggtgttctatgatgcactacagaataaaaactatccggtattcaaacagcagctgtggcgctttacctatctggcgctgagcttcatcgtgctggcagtatttaaggtgtatctgacgcaggggctgcagatgcgctggcgcagttggatgacggaaaagtttatggataaatggctggcgcaccaagcctattaccacagcgaacagcaacagctggtcgataacccggatcagcgtattgccgaagatcttaatgttctgacgcgtaacacgctctcgctgtcattggggctattgtccagcctggtgacgctcttttccttcgtcagtattctgtggcacgtcagcgggccgttaagttttgcgctgcacggacacacctttacgctgccgggctatatggtgtggtttgccttgctgtatgcgctgttgggatcggtgattatcggctgggtcggcaagccgctggtgcggctgggctttgatcaggagcactatgaggcgaactttcgtttcggcctgatccgcatccgggaaaaccatgatgccattgcgctgtatcagggtgaaaagcaggaggcccaacagttgggcgaacgcttcgccaccatccgtaataactggtggtctattatgcgcgttacccgccggctgaatatcgccagtaacttttacggtcagttcgccattattttccctctgctggttgccgcgccgcgctacttttccggcgccattcagatggggggactgatgcaaatcgcttcggccttcggccaggtacagggggccctgtcatggtttatcgatgcctttaacgatctggccgcctggaaagcctgcgttaaccgtctggccggctttaacgccgccgtggagcaggcgcatcaccaacctcgaggcatcacactggagcaggataataaacaaccacttacacttagtcggctcagtctgcagttaccagatggtcagccgctggtacaagatatctcgttaacgctgccgcgcggcgagcgcgtattaatcgccggcccttccggctgtggtaaatcaacgctgctgcgcgccattgccggcatctggccttacggcgcaggcagcattcgccgcgatacctcgctgcgcgccctgttcctgccacagcgcagctacattcccatcggcacgctgcgggaagcgctgagttatccgcacccggcacatacctaccatgacgagcaactgctggatgtactggaggtatgccatctgcaaccgctgcaacgctggctggatacggtgaataactggagccagcgcctttctcccggcgaacagcagcggctggcattcgcacgcgcactgctcacccgtcctgacatattgttcctggatgaagcgaccagcgcactggatgacgaaactgaacagctgatgtatgaacgtctggttacgaccttgccggatgttacgctggttagcgtcgcgcatcgcaacagcgtggcgaagtaccaccaaacctgctggcgccttagccgtcagacggaaggaccggcccggatcgcaccagctcctctgcccggaactgcgtga

SEQ ID NO: 444147 - DNA, 708 bp, Serratia marcescens
atgagggcattgttgccgccgctgctggcctgtagcgctatggccagctggccggcgctggcgcagattgatgaaccggatatccacgccgattgccagaaggtggccggctacgccgaactggggcatagcgcataccagaatggcgactatacgaaggcggcaggtatttttcgcgatcaggcggcctggagtgagttttgcggcttcagcgagcgcgctacggcgacggcgtataacaacgtcgcgctggcgctgatgcgcgccgggcagttgttgaaggcgcgcgcctatctgctgctggcgccggacgatgacaaatcacgtcacaatatggcattgctggaacagcggctggcgcaacagccgccggcgaccggcccggccggtgtttactggcagtatgccggccgcggcgtctggagcgaagtgacggtagtgccgcgcggcgatctgtggcaaatcgattatgccggctattacatgccgggcatggggctgtattacggccccaatatgggggaattcgccgacgtattgccgattcagaacgggaaagcgttataccatcaggacgatgaggatgatgagtcggcctgcgatgtgacccttaccttcagcgatgatgccgtggatctgaattcccagggcgactgcggctttgggcataacgttcaggcggcgggacattttattcgggtcgagtaa

SEQ ID NO: 444148 - DNA, 651 bp, Serratia marcescens
atgagcaacgtaacgctgcattacgtgtatgatccgctgtgcggctggtgctacggtgctgccccgctggtcaaggcggcgcagaccattcccggattagcgatcgccctgcatggcggcggcatgctgaccggcggcaaccgccgtcaaatcaccccggaatggcgcaactatgtcattccgcaggataaacgcatcgccgaactcaccgggcagcccttcggcgacgcctatttcaacggcttgctgtgcgacaacacggcagtcatggactccgagccgccgacaaccgcgatcctcgcggcacaacagctggccggccggggactggatatgctgcacctggtgcaacgggcgcactatcaggaaggacgacgcatcgccgatttaccggtgctggaagcgctggcgcgcgaactggggctgccctcggcgccgtttatcgccgagatgcgttttaaccgcggcgcccctaccgcccagcatatcgctgaaagccgggccttcctcgccaaagtgcacggccaggggttcccgaccttcgccctgcaggacagcaacggcgatctgcataccatcgcggctggcaactatctggacaacgttgctggctggaaggaaatactgagcagcgccgccgccttagcgtaa

SEQ ID NO: 444149 - DNA, 885 bp, Serratia marcescens
atgtttaagaaatcacttatcgctctgacgctgaccggcgtcgccgctatcagcacctatgccaacgccgccgatacgctgacgatggaggtctataaccccggggaaaaaagcgtgttcccggtctcttctgaaatcatcagcggcccgcatgaagtggcgctgatcgatgcccagttccagcgcaatgatgcgcagcaactggtcaataaaatcaaggcgaccggtaaaaaactgaccaccgtctatatcagccattccgacccagacttctatttcggtctggacgtgattcaggccgccttccctgaagcaaaaattatcgcgacacctggcaccatcaaagaaatcaaggcgaccaaagagggcaaaattgcctattgggggccgattctgaaagacaatgcgccggcccacgtggttgtcccgcaaccgctggcgggcgacagcttcaccatcgacgggcaaaaagttgaggtaaaaggcctgaacggcccgacgccggcgcgaacctatgtatggatcccggcgttgaaagccgtggtgggcggcgtggcggtggccggcaataatatccacccgtggattgccgataaccaaagcgcagaatcgcgcgcgcactggcagcaaacgctggccagtatccagacgctgcagccgaagcgggtcgttcctgggcactatctgcccggcgccgcgcaaacgctggaatccgtcacctttacccagaactatctgaaggtgctggaggccgagctgccgcaggccaaggatgccaaacagctggtaaccgcgatggaaaaacactacccgacgctgaaagacgtttccagtctggaactgagcgccaaggtgctgaaaggcgaaatgaaatggccgcagtaa

SEQ ID NO: 444150 - DNA, 912 bp, Serratia marcescens
atggatcgcatcactgccgctgaagtttttgtcgccattgtcgagagcggcagcatgattgccgccgctgaggcgctggatatgtcgcgcgccatggtgacgcgctatctggcgcagatggagcagtgggcgggggcgcgtctactgcaccgcaccacgcgcagactcagcctgaccgatgcgggcgagcgcacgttggaacgctgccggcagatgttggcggtcgccggggagatcgatctggtcgaggcggaagccaatgtggagttacgcggtttgctgcgcatcacctgctcgcagtcgctggggcaaaccacgctggcggcggcggtgacgcactacctgcggcgctatccccaggtggcggtggatttgcagatgaacaaccgcgcggtcaacctggtggaggaacgcatcgatttggcgctgcgcatcaccaatgaactcgatccgaatctgattgcccgaccgttatcgcgctgcgcttcggtggtctgcgcgacgcccgactatctggcggcgcatgggacgccgcgtcagccgcaggatctggcgctgcataactgcctgacatactcctattttggcaaaagcctgtggcattttgagcatcagggcgtgaagtcggcggtggcggtcagcggcaacctgagcgccaacgagtcggtggtgctgctggccgctaccctgaagggggccggtatttcattgcagccttactactccgcggcgccgttgctggccagcggcgagctggtggagttgatgccggagtaccagccgcagtcgatggggatttatggtatctacacctcgcgtcgccagctgccggcaaccctgcgcaccatgctggattttctggtggagtggtttgccagcgatgaaaagtggttggcgacgctacgtaagtag

SEQ ID NO: 444151 - DNA, 1158 bp, Serratia marcescens
atgcctgtttctttgttggcgctggcactcagtgcattcgccatcggcactaccgagtttgtcattatggggctgttgcccgacgtggcgggcgatctgcaggtctctatccccgcagcgggatggttaatcagcggctatgccctcggcgtggcgatcggcgcgccgattatggcgctgctgaccgcgcgcctgccgcgtaaaaaaacgctgttgctgctgatggcgatttttattgtcggcaacatgatgtgcgcattgggctatagctacggcttcctgatgctggcgcgcattatcaccgccctgtgtcacggcgctttctttggtatcggtgcggtggtggccgccaatctggtggcccctaatcgtcgggcttccgcagtggcgctgatgtttaccggcctgacgctggctaacgtgctgggcgtgccgctgggcaccgcgctggggcaggcgctgggatggcgttccaccttctgggcggtggcgctgattggcgttgcggcgctgctggcgctgtacagtaaattgccgacggtcagcgatgaggcgccgaccgagctgaaaaaagagctggcggcgttgcgcggcgccggcgtctggctgtctctgctgatgacggtggcctttgcggcgtcgatgtttgccctgtttacctatattgcgccgctgctgaccgaggtgaccggcgtatcgccgcagggcgtcagctggaccctgctgctgatgggcgtcggcctgactctgggcaatattctgggcggccggctggcggactggcggctgggcgtgacgctggcggggatctttctggcgattgcgctgtttgccgcgttattcagctggaccagcggcgcgctgatcccggcggagattacactgttcctgtgggccgctgcgtcgttcgccgcggtgccggcgctgcagatcaatgtggtgacctacggtaagaaagcgccgaacctgatctctaccctgaatatcgccgcctttaacctgggtaatgcgctgggcgcctggctgggcggcctggtgattgcccgggggctggggctgacggcggtgccgctggcggctgcggcgatggcgctggcggggttgctgctgtgcctaattacctttggccgggcgcatcgccgggctgccgggcagtaa

SEQ ID NO: 444152 - DNA, 954 bp, Serratia marcescens
atgtccgccattagtctgcgccaaattgaaatcttccatgcggtgatgaccaccggcaacctcaccgaagcggccgcgctgctgcatacctcacagcccaccgtcagccgtgagctggcgcgctttgaaaagcaggtacagctgcgactgtttgatcggatcaggggtcgcctggtggcgaccgtggagggattacggctgtttgaagaggtgcagcgctcctattacggcctggaacgcattaagaccgcggcggacggcattcgccagtttcaccaggcgcagctttccatcgcctgcctgccggtattttcacagtcgctgttgccggcggtatgcagaccgtttctcgatcgctacccggaagtcagcttcagcgtggtgccgcaggaatcgccgctgctggaagagtggctgtcggcgcagcgccacgatctggggctgaccgagaatacgctgacgccggccggcacggagcgcattccgctgatgacgctgaatgaggtctgcgtgctgccgagcgggcatccgctgctggccaatgaccaactcacgccgcaggacttcggcggcgagaattttatcagcctgtcgaataccgacagttaccggcagctgctggacgcgctgttcagcgagcagcaggttaaccgacgcatggtgatggagacccacagcgcggcttcggtctgcgccatggtgcaggccggcatcggcctctccatcgtcaacccgctgaccgcgctggactatgccgccgccggcggcgtggaactgcgaccgttcagcatcgaggtgccgttcaccgtcagcctgatccggccgctgcaccgcccttcttccacgctggtcagcgcttttatcgatcatttacaccaacaggcggcgtctttccccgcccgtctggcggcgcttactgcccggcagcccggcgatgcgcccggccaaaggtaa

SEQ ID NO: 444153 - DNA, 1257 bp, Serratia marcescens
atgccacgcgctttacatgacacctccaccgcattgaacgccgccaatttactcacgctgccggcccgcttcggctgcccggtttgggcctacgatgcgcagatcgtccgtgaacgtatcgcacagctgcgtcactttgacgtgatccgcttcgcccagaaggcctgttcgaatattcatattctgcgcctgatgcgcgagcagggcgtccgggtggattccgtatcgctgggagaaattgagcgtgcgctgcatgccggctatcagccgggtggtgaagagattgtctttactgccgacgtgctggatcaggcgacgttggcgcgcgtctgcgagctgaaagttccggtaaatgccggttctatcgatatgctggagcagttggggcagcacggtgacgggcacccggtgtggctgcgcatcaacccgggctttggtcatgggcacagccagaaaaccaataccggtggtgaaaacagcaagcacggcatttggtatgccgatttgccgcaggcggtggaagtgattcaacgccatggcctgaagctgctgggcgtacatatgcatattggctcaggcgtggattatcagcatctggagcgtgtatgcgacgccatggtgcagcaggtgattgcgctggggatggatattggggcgatttccgccggcggcggcctgtcgattccgtatcaggccggcgaagaggcgatcgataccgaacactattttggcctgtggaacagcgcgcgcgagcgcattgccgcccacctggggcacccggtcaaactggagatcgagccggggcgcttcctgatggccgaggcgggcgtgctggtagcggaagtgcgcgcggtgaaagatatgggcagccgtcactttgtgttggtcgatgccggttttaacgacctgatgcgcccggcaatgtacggcagctatcaccatatttcgctgctgcctgccgacggacgcgctaccgatgctcaaccgctgcgcgatacggtaattgccgggccgctgtgcgaatccggcgatgtgtttacccagcaggcgggcggcggggtggaaacccgggcattgccgccggtgcaggtgggcgactatctggtgttccacgacaccggcgcttacggttcctccatgtcctccaactacaacagccggccgctgctgccggaggtcctgtttgatcggggtgaggcgcggctgattcgtcgccggcagaccattgaagagctgatcgcgctggaacaggtataa

SEQ ID NO: 444154 - DNA, 1011 bp, Serratia marcescens
atgatcaccatgttggatgtatccattcgcgcgggcgtgtcgaaagccacggtatcgcgcgtgttaaatggcaccggacaggtgaaaaagagcacgcgggatgcggtgttcaaagcgatggatgagttgggctaccggccgaactttctcgcccagtcgctggctaacaaaagttccaacagcatcggtctggtggtgtccaatttcgacggcccctatttcggccggctgctgcgtcaggccgccaaactgatcgaagccagcggcaaacatttggtggtgaccgacggacacgatacgccggaggatgagctgcaggcggtacaactgctggccgaccgccgctgcgacgccattattctctacacccgttttaccgatgaagcggcgctgatggcgctgtttgagcgcctgccggtgccggtgatggtgatcaaccgcgatctgcctctggcgcgcgagcgctgcgtgttcttcgaacagcagcaggcggcgttcgatgcggttacctatctgattgcgcagggacaccgggaaatagcctgtattaccggtccgatcgccacgccgaccgctcaggcgcggctggcgggttatcggcaggcgctggagcaccatcagattgcttttgacgcggcgcgggtggcgcacggcgacagcagcgtacccagcgggtatcacggctgccaaacgctgctgaatgcccgcgtcgatttcagcgcgctgttcgccagcaatgacgacatggcgatcggcgccatgaaggcgctgtgccaggccggcaaacgtctgccgcaggacgtatctatttttggtttcgatgacgaacctagcgccgcctatctgcagccggcgctctctaccgtctatctgccgatcgatatgatgattgaagccgctatcgcccaggcgttccggctgcttaacggcgaagaggtacaacctttgacgccgtttaccggcgaactgaggctgcgtgagtcggtggcgcccggtccctatgccggctag

SEQ ID NO: 444155 - DNA, 324 bp, Serratia marcescens
atgagcatagatctggagcagacggtaatggaattattgatcaatgcgggtgaagcgcgatctcacgccatgacggcaattcaggcggcccgtcagcggcagtggcagcaggcggaggaggcgctggcggcatcacaagccgcctcccgcgcggcgcacgccgtacagacgcaattgatcggcctggatgaaggcgcgggcaagatcccggtgaatctgatcatggtgcacgcacaggatcatttgatgaccgccatgctgtgccacgatctggcgcaggagatcgtgctgctgcgtcaggaagtgttcgccaatccggcatga

SEQ ID NO: 444156 - DNA, 1323 bp, Serratia marcescens
atgtcatttcgggaccggcttatagactctctgggagcctttgccaataaattcaacagttacagatatataatggctatcaaggcatcgtttattacgctgatgccggtaattatcgtcggcgctttttcggtgctgatctcgaatatggtgatggatcccaagaatggtctggcgagcttcgccatgttctcattcctggcggatctgaaaccgatcatgagcagcatcaactacgccacgctgagtttcctcaatatcggcgcggtgtttctgattggcatagaactgggcaagatcaacggctcgcgatcgctgtttccggggctgctggcggtgatctgctttatcgccgtcacgccgaccaacgtcgagctgatggtgaatgaccagatgcagatggtgaaagacgtgctggccaagcagttctccgatacccgcagtctgttcctcggtatgtttatcgccattttatccgtggagatctattccaaactggaaacgctcgatcgcctgaagatcaagatgccggaaagcgtgccgcccaacgtctccgcctcattctcggcgctgatcccggcgatcatcaccgtggtggcgatcgccacgctggggtttgtcttccaccgcgtcagcggcatttatctgtatgacgccgtctatcaggtagtgcagcggccgctggagacggtggtgcagagtctgccggggatcctgatcctgatgtttgtcgcccagctgttttgggtgatcggcatccacggcaatcagatggtgaaaccgatccgcgagccgctgttgctgggcgccatcatggtcaatatgaccgccttcgagcaggggaaagagatcccgaatatcatcaccatgccgttttgggacgtttatatgagcatcggcggttccggcattacgctgggcctgctgtttgcggtgatgatcgctacccggcgcaaagagatgcgtgaaatcagcaagctgtcgctgggaccgagctttttcaatatcaatgaaccggtgatcttcggcatgccgatcatgctgaatccgatcctggcgatccccttcattatcacgccgttgatcaccggcactatcggctacttcgctaccagcatcggttttgccggcaaggcggtggtgatggtgccgtggaccacgccgccgctcatcaacgcctggctgtctactgccggttcgatgggcgcggtggtaacccagctgatctgcatcgtggtcgccacgattatctatctgccgtttgtcaaagtcgccgcccgccgcgcggaacaggcggagcaacccgttattcagaacgcatga

SEQ ID NO: 444157 - DNA, 1428 bp, Serratia marcescens
atgagtcaggtttcaatggagattccccaggattttattctcggcgcggcggcttccgcctggcagaccgagggctggagcggcaaaaaacaggggcaggattcctatctcgatctgtggtaccagcatgaccgtcacgtctggcataacggctacggcccggcggtggcgacggactttatcaaccgctaccgcgaagacgtggcgctgatgaagcagagcggcgtcggccactatcgcacctccatcaactggtcgcgctttctgaccgactatgagcagggcgtggtggatgaagagtatgcgagctatatcgacgcgctgctcgatgagatgaagcagcagggcatcgagccgatgctgtgtctggagcactatgagctgccgggctacctgctggaaaaatatgacggctggcgctccaaacgggtggtggagctgttcgtgctgtacgcccggcgggtgtttgagcgcttcggcggcaaagtcacacgctggtttacctttaacgaaccggtggtggtgcagacgcgggtctatctggatgcgatccgctggccgtatgagcagaacactaacacgtggatgcagtggaaccaccataagaatctggcgaccgccaaagtggtgcaatgcttccgccagatgggctgtgccggcagcatcggcgtgatccttaacccggaggtcacctacgcccgctccggcgcgtcgcacgaccagcgcgccgccgagctgtacgatctgttctacaaccgtgtgttcctcgacccggcgattaaaggcgaatatccggcggagctgctgaccctgctgctgcagcacgacgtcagcgttgactggacggcggaggagatggcgacgatccgcgataacaccgtggacgaggtgggcatcaatctctactacccgcaccgggtcaaggcgccgagtcgcgcatggtgcagcaccacgccgtttcatccggcgatgtattacgagcactttgagttgccggggcggcggatgaaccgttcgcgcggctgggagatctatccgcgcatcgtgtacgacatggcgctgcgcctgcgcgatgagtacggcaacattccgtggtttatctcggaaaacggcatgggcattgagcaggaagaacgcttcaaaaatgccgaaggggaaattcaggacgattaccgcattgaatttatccgcgagcatatttactgggcgctgaaggcgcgcgaagagggagccaactgccagggctatatgctgtgggccttcacggacaacgtgtcgccgatgaacgcctttaaaaatcgttatggcctgatagaaatagatttggacaaccagcgcaaccggcggcagaaaaagtcggcgcactggttccgcgcgctgagcgagagccgccgtctgagcttcaccctcgatgatgaaaaccgataa

SEQ ID NO: 444158 - DNA, 318 bp, Serratia marcescens
atgaaacgtatcgtactggcctgctcggcgggcatgtccacctcgctggtggtgaccaagatggaaaaagaggcgcagacgcgcgggctggagctgaagatttacgccattcccgagcagaacctgcgtgatgagctgcaaagtaacggcggcgatattcttgcggtgctgcttggcccgcaggtgcgcttcaagctgacagaaaataaaaagcttaccgacgcgtatcagatcccgattgcggtgatcgattctgtggcgtatggcacgttaaacggcgcaaaagtactcgatcaggcgctgggtttggtagactaa

SEQ ID NO: 444159 - DNA, 807 bp, Serratia marcescens
atggcatggacagacgtttttcagggtgaaacggtggataaagtcgtgattccgcaggaaaaaaagcagtatcaggaaattggccgagacctgcggcagaaaattcagcagggccatttcgccattggcacgcgcctgcccccggagcgcaatattgccgaaacctacggcgtcagccgtactatcgtgcgtgaagcgctgttaatgctggagttggaaggaacggtggatatccgccagagctccggcgtttatgtcatacgcattcccaatgaaaacgcggaggaagaggatcctatcctgcacggcgaagtcgggccgtttgaaatgctgcaggcgcgtcagctgctggaaagcaatatcgccgcctttgccgccaaaatggccaccaaaacggatatcgaaaatctgcgccgcacgctggagcaggaacagcgcgccatcgtcgccaatgatgaaagcggcgacaacgacaaaatgttccatttgctgattgccggcgccacgcagaaccagatgctgctggacacggtaaaaagcatctggcagcggcgggaggccagcccgctgtggcaacagctgcacagccgcatcgccaccaaaggctaccggctgaaatggctggcggaccaccagaacattttggctgcgctgcgccgccgcgacgtgatggggtcgtatcaggcgatgtggcagcatatggaaaacatcaagggcacgctgatggagctttccgacgtcgatgcgccggaatttgacggttacctgtttgagtcggtgccgatcttccagggcaagctggtgtaa

SEQ ID NO: 444160 - DNA, 1020 bp, Serratia marcescens
atggctacgataaaggatgttgccaggctggcgggtgtttccgtagccacggtgtctcgcgtaataaaccattcccccaaagccagcgaaacctcgcgtaacgcggtgctggccgccatggaacagctgcagtatcacccgaacgccaacgcccgcgcgctggcgcagcagtcaaccgaaaccctcggtctggtggtggccgacgtctcggacccgttcttcggcaccatggtgaaagccgtcgagcaggtggcgtatgccacgcataatttcctgctgattggcaacggttaccatgaggcggaaaaagagcgtcaggcgatcgaacagctggtgcgtcaccgctgcgctgcgctggtggtgcatgccaaaaagctgaccgatgatgagctgagcggctggatgcggcagatccccggcatggtgttgatcaaccgtacgctgccgggatttgagcagcgctgcgtcgcgctggacgatcgctacggcgcctggctagccacgcgtcatctgattcagcagggccatcagcgcatcgccattatctgctccacccaccagatttccgacgccgccgaccgtctgcaaggctatctggacgcgctacaggaacacggcattgcggtggatgagaagctgatcgcctatggcgaaccggatgagatcggcggcgagcaggcaatgactgaactgctcggccgcggcaaaaaattcaccgccgttacctgttataacgacccggttgccgccggcgcgctgtcggtgctgagcgataacagcatcgacgtgccgggccagatgtcgctgatcggctttgatgacgtgctgatttcacgctatctgcgccccagactgaccaccatccactacccggtggtcgccatggcgacgcaggcggcggaactggcgctggcgctggccaacaaccagccactgccggaaatcaccaatatgttcagcccgacgctggtgcgacgccactccgtcgccagccagggcaaggcgtcagagacgcgctaa

SEQ ID NO: 444161 - DNA, 504 bp, Serratia marcescens
atgaaaaaatcattggggaaaggaatacgtttgccattatttaccgctgcggcatcgatattattcgcctccacttttatgcctgccacttcattggcccagagtaagtttaatatgtctgtttttttacagcagaatcctgactttaagcccggcgccgccaactggtcagcagaaggtttgatgccagggatgtcctactacatcaaaacctatactgataatggattaattctggtgcaactttctctggagaaatatagagagtttggcaagctcgccgttttgcatgaatgtgaaaggagaggggttaagtatatccgctgtggtttttcttatcagccgtatagcgccgactcccggcctattagctataacgtaacctatatgctgaccaaccccagttactacccaaatatattaagatgctctattgatggctactttaattatggcgataaagaatgcgttacgagaaatgactggcgtggcctcttgaattga

SEQ ID NO: 444162 - DNA, 2259 bp, Serratia marcescens
atgccgattaaacgttatccgcaacttgcacactggggggcgtataccgccgtggtggaagacgggcggctgattcgctgcgaacctttcgccaacgatccgcacccttcgccgatgctggactccattgttccgatgacctattcgccgacgcgtatccgcaagccggcggtgcggcgttcatggctgcaaaagcgtgagggcagcgaccgcacgctgcgcgggcgcgaggactttgtcgaggtcgactgggacgtagcgctcgatctggtggcggaagagaaccgccgggtgcgcgatcgctacggcgcgtcgggcctgttttgcggctcctacggctggtcctccgccgggcggctgcatcacgccagctcgcagctgcgtcgcttttatttcgccggcggcggcggcgttgaccagatgggcaactacagctggggggcggcgcagttcttcctgccgtatgtgatcggcaactttgcgccgctgaccgggcaggcgaccagctggccgaacgtggtggagcactgcgaactcttcctggcgttcggcggtctggcgctgaaaaattcccaggcctccttcggcggcgcggcggaacactcgctgaagtcatggctggagaagctggcggccaaggggacgccgatcgtcagtatcagcccgacgcgcgacgacactccggcctttgtcaatgccgaatggatcccgatccgccctaataccgacgtggcgctgatgctggcgttaggctatgagattcagcgtaacggcgcattggacaacgactttctgtccagccactgcgtgggttaccctcagctggcggattatctgtgcggcgtgagcgacggcgtcgccaaaacgccgcagtgggccagcgcgatcaccggcattccggccgcgcggattgtgcgtctggcgcagcagctcagcggtgcccgcagcttcctcacctgctcctattcggtacagcgcgcccaccgtggcgagcagccttactggatgatgatcgccctgtcggcgatgctggggcaaattggtctgccgggtggtggcttctccttcggctatggcgcgatgaacggcatgggcaacccgcggctgaacacgccggcccccagcctgccggtcggcgataatccggccgggctggcgattccggtggcgcgtatttgcgacatgctgctgcagccgggcgaaccctattcgttttgcggtgaaacccgggagtacccggatattcacctggtgcactgggccggcggcaacccgttccatcatcaccagcagctgaaccggctggtggccggttggcaaaaaccggatacggtgattgtgcaggacatctggtggactgccgcagcgaaaatggcggatatcgtgctgccggcgaccagcgcgctggagcgtaatgatattggcggctcggcgcgcgatccctacgtgctggcgatgcatcaggcgatcgcgccgcagcatcaggcgcgcaatgattttgatattttcgccgatctggcggatcgtcttggctatcgccagcaatttaccgaggatcgcaacgagcggcagtggattgagcatatttatcagcgctgcggacaggcgcagatccaggccggcgtagcatggccggagtttgacgagttctggcaacggggccatgtgaagctgccggcgccgaagcaggacacggtgtttctggacgcattccgtgccgatccgcaggcgcatgcgctgcgaacgcccagcggcaaaatcgagttgttcagtgaaaaaatcgccggctatcgctatgacgatttcgcgccgcatccgcagtggcagccgccggtcgagtggctgggggctgagttggcgaagcagtggccgctgcatttgatcaccgttcagccggctgaccgtctgcacagccagctggatccgtcgccgcaggcgcaggccaataaaacggcgggacgcgaaacgctgctgatgcacccgcatgatgcggcgcagcgcgcgcttgccgacggcgcgctggtgaaggtggtcaatggtcgcggcggctgtctggccggggtgcggatcacggacggcgtgacgcccggcgtggtggtgatggcgaccggcgcctggttcgatccgggcttcggcgcagagcgccacgaactggaacaggccggcaaccctaatgtgctgacgctggatatcggtacctcgccgctgacgcaggggcctaacgccatgagctgcctggtggaggtctgcgcgccatag

SEQ ID NO: 444163 - DNA, 2157 bp, Serratia marcescens
atgttcatgtctgttatgcgcacgctgtttcgcctgctatttcgcgtgcgtgttgaaggggatgcccggcatcttaatcagcagaagctgctgattacccccaaccatgtctcatttttggatggcgtgctgttggcgctgtttttaccgatcaagccggtgtttgccgtttattccagcgtgtctgacagctggtttatgcgctggctgaagccctacatcgatttcgttttcctcgatcctaccaagccgatggcggttaaacatctggtgcgtgaagtgcagaaggggcggccgattgtggtcttccccgaaggacgcataaccgttaccggttctctgatgaaagtctatgacggtgcggcgtttattgccgccaagtccggcgcgacggtggtgccgatccgcattgacgggccggagttcagcctgttcggccgtatgaaaggcgtgtttaaactgcgcgcgttcccgcagattaccctccacattctgccgccgacgctgctgccgatgccggaagcgccgcgcgcccgcgaccgccgcgtgctggcgggcgaccatctgtatcagataatgctgcaggcgcgcatggcgacccgacagccgcagacgctgtttggcgcgctgctggcggcgcaaaagcgctacggcgccggtaagccctgcattgaagatatcgcttttaaggaagacagctaccgcacgctgattaaaaaatctctgggcgtcagccgtatcctgcagcggtttaccgccgaaggcgagcatgtcggtatgctgttgccgaacgccaccattaccgccgcggcgatatttggcgcttcgctgcgccggcgcatcccggcgatgctgaactacacggccggttccaacggcctgaaaagcgcgatgaccgcggcaaccattaaaaccatcgtcacctcgcgtcagtttttggaaaagggcaagctgacccatttgccggaacaggtgccggaagccaactgggtttatctggaagatctgaaagataccgtcacgctggcggataagctgtggatcctgcgccatctgctgcagccgcagcgcgccatgctgcagcagcaggccgatgatgccgcgctggtgctgtttacctccggttcggaaggccatccgaaaggcgtggtgcactcgcacgccagcctgctggccaacgtggagcagatccgcaccattgccgactttacgccgcgcgaccgctttatgtcctcattgccgctgttccattcattcggcctgacggtcgggctattgacgccgctgatgaccggcagccgggtattcctgtatcccagcccgctgcactatcgtgtggtgccggagctggtgtacgacctgaactgtaccgtgctgttcggcaccgcgaccttcctgaacaactacgcccgctttgcccatccgtatgactttgcccgcgtgcgttacgtggtggccggcgcggaaaaactggcggagagcaccaaacagatttatcaggacaaatacggcatccgcattctggaaggctacggcgtgaccgaatgtgcgccggtggtgtcgatcaacgtgccgctggcgaccaaggtgggcaccgtcggacgcattatgccgcagatggaggcgcgcctgatgccggtggccggcattgaggaagggggacgcctgcagttgcgcgggccgaacatcatgaagggctacctgcgcgttgaacgtccgggcgagctggagccgcctgccgctgaagatgaaaacggcaatctgcagccgggctggtacgataccggcgatattgtcacgctggacgagcagggatattgcaccattcgcggccgggtgaagcgttttgccaaactggccggcgagatgatttcgttggagatcgtcgagcagctggcgctgcgtgcggcgccggacggccatcacgccgcgacggtgaaaagcgacagcagcaaaggcgaagccctggtgctatacaccaccgacagcgaactgacccgcgatgccttgctgcgcgctgcgcgtgagcagggtacgccggagctggcggtgccgcgtgatattcgctggctcaagacgctgccggtgctgggcagcggcaagccggattacgtcaccctgcgtaacatggccgaacagccggagaatgcatcatga

SEQ ID NO: 444164 - DNA, 1041 bp, Serratia marcescens
atgcaataccaccgaattccccacagttctttagaagtgagcgtgctgggactgggcacaatgacctttggcgaacaaaacagtgaggccgatgcgcacgcacagctggattacgcactggctgctggtatcaatctgatagacaccgccgagatgtatccggtaccgccgcgtccggaaacccaggggttgaccgagcgctatatcggcagttggatcaaggcgcgcggcaaccgcgagaaaatcgtgctggccagtaaagtcgccggcccgacgcgcaataacgacagcgccatccgtccgcagcaggcgttggaccgcaaaaatatccgcgccgcgctggacgacagcctgaagcgcctcaataccgactacctcgatttgtatcagttgcactggccgcagcgcagcgccaactacttcggcaagctgaactatcaatacagcgatgaaatggcgacggttacgctgctggaaacgctggaagcgctgaatgagcaggtacgcgccggcaagatacgttatatcggcgtctccaatgaaacgccgtacggcgtcatgcgctacctgcatctggcagaaaagcatgaactgccgcgcatggtctccattcagaacccgtacagcctgcttaaccgcagttttgagatcggtctggcggaaatcagccagtttgaaggcgtggaactgctggcttactccagtctggccttcggcacgctgagcggtaaatacctgaacggcgcccaaccggcaggggcgcgcaatacgctgttcagccgctttacccgctattcctcgccgcaggcgcaacgggcaatcgccgaatacgtcgcgctggcgaaaaagcaccgtctggatccgtcgcaaatggcgctggcctttgtcagacagcagccatttgtcgccagtacgctattaggcgcaacaacgcttgaacagctgaagaccaatatcgacagcttcaacctgacgctggatgaggaagtactgcaacagttggaagaaattcacagccgctttactatcccggcgccgtaa

SEQ ID NO: 444165 - DNA, 450 bp, Serratia marcescens
atggagctgctgttggcagttttgattagtgcgatgctgagcggttggggcgtgagtcactggcggcatcaccagcaggcgctgcggctggagcaggccacccaacagctgctggtgtttttacagcgcctgcaggccgacgccaactggcgcaaccgcacggcattgctgtggtttaaaccgcatgggcgctggtgcctgggcagcggggctgaaccggctgactgtcagcagccggcaaggtggctgttcacgccgccgagcgatgatatacaactgctcgacttcacccgtaaagagctgggtttttacggggtgcgtaacagcgcgcagggcggacatatccgcctgggcaaccgcgccggccaactgcaggtggtgctttccgcccaagggcgcttgcgcatttgcagcatgggggccgcgctgcgcgggatccgcgcatgttaa

SEQ ID NO: 444166 - DNA, 582 bp, Serratia marcescens
atgttaacgtcagcgcgcgggttcaccctgcctgaggtgctgctggccatggcggcgggaagcctgattattttggcggcggcgaaggcctatcctgcgctgcgccagcaaagcgcggcgtttctcggcgcttatcagctggagctaaggctgcggcaggcggcgtttggtattgaaaaagatctgcgccgcgcgggattttgcgccgggacgtgcatcgggcgggcgatgagtatcgcgcggcatgccggggaggcgcccgacagctgcgtcatcgtcgcctatgatttgaaccgcaacggccgctgggaagcgacgggcgacgaggcggagaaattcggctaccgcttacgtgaagggcggcttgagcgccagcgcggcgttagtcagtgtaacggcggcggctgggaaaacctgtttgagcgtgccgaagtacacattgagacgtttaacgttcgtctgctgccggggaaagacgggcggcgcctgctccggctgacgctgggcggtcgttcggcggattcgggggcgatgacgcgctcaatgcggtgggatatcaacgtggaggcgccgtcagcatga

SEQ ID NO: 444167 - DNA, 444 bp, Serratia marcescens
atgaacggacgggattctcagcgcggcagcgtgctggcagcggtgatgttggtgctggtgatggggttgctgctgctgggcgcccagcaaaaacagctggatagtgcgctgctgctggcggttgagcagcggcgctacctgcaggcgtataatcgggcgtcgtctgcgttgaactggggactgacgcaatcctggccgccgtcgttgctgaatgcaggagcgtggcgctgtcagcggcaacctgcgtcggggctacaggcctgcgtcaagcgcgcctcccgggcggacatgatactgctgcgcgggctgggtgagatacccgcagcggaaccgctctggctgtatcagttggccatgccggatgcgcacggacggctgcgggcagaaccgggcggctggctggatttttgcccggaaaaggatgcagcggcctgtgaggattaa

SEQ ID NO: 444168 - DNA, 369 bp, Serratia marcescens
atgcagcggcctgtgaggattaatggcaatagcggggtgggccggcatcagcgcggcttcagcctggcggaagtattaattgcgacactgttattctcggtgtcgctgctcggcctgttacaataccatcaggtattattacaggggctgcagcggcaatggcagtaccggcaggcctggtcgctggcccatcagcagttggagcggctggccgccggcagcgatgctgatgatgtcctggcgcccggctggcggcgcgaggtgtggcagagcgccgtcgacggcgtctgccggcagatcacggtcagagtagatacgccgcagcgtcagcatgctcagcttgggcgctggtattgcggcgatgactaa

SEQ ID NO: 444169 - DNA, 3372 bp, Serratia marcescens
atgtttacggtttatcattccaatcagctggacgtgctgaaaacgctaaccagcgcattgatcgccagagaaccgttggccgaccctttccagcaggaggttgtgctggtgcaaagcccgggaatggcgcagtggctgcagatgcaactggccgagcagttcggcattgccgccaatattgagtttccgctgccggcgacctttatctgggacatgtttacccgcgtgttgccgggcatcccgaaagagagcgccttcagtaaggacgctatgacctggaaactgatgtggctgctgcccgatatgctgacacagcccgagtttgccccgttgcagcactatctgaccgacgacggcgataagcgcaaaattcaccagcttgccgggcgcgttgccgatctgtttgaccaatatctggtgtaccggccgcagtggctggaaagttggcaacgtggcgaattgatcgccgatctgcctgaggcgcagcagtggcaggcgccgctgtgggcacggctggtgcagtatacccaggaactggggcagccggagtggcaccgtgccaacctgtatcgccgctttatcgccacccttgagcaggcggaacagtgcccgtcagggttaccggcgcgggtgtttatctgcggtatttcggcgctgccgccggtctaccttgaggcgctgcaggcgctgggcaggcatattgatattcatctgatgttcaccaacccgtgccgctattactggggcgatatccaggattatgcgtttctggcgcggctgcaaagccgtaagcgacgccgccaccaccaggcacaggaacaggggttattccgcgatcccgagcaggcggcgcagctgttcgacgctgaaggcgagcagctgctgagtaacccgctgctggcgtcatggggtaagctggggcgcgatcatctgtatctgctggcgcagatggaaacgctgcaggaggttgacgcttttgtcgatatcccggcggacaacatgctgcacggcatacagcgcgacatgctggagctggaggattgcgcggtgatcggcaccacgccggaaacttttgaacgcagcgatgccaagcgcctgctggatcccgacgatcgttcactcagtctgcacgcctgccatagcccgcagcgcgaagttgaagtgctgcacgaccaactgctggcgatgctggcggaagacccgcagcttaccgcacgcgatatcattgtgatggtcgccgatattgacagttatacgccatacattcaggcggtgttcggcaacgcgccggcggatcgctacctgccgtttgccatttccgaccgtaaagcgcgccaggctcatccggcgttgcaggcgtttatctcattgctggatttgccgcagagccgctttacctctgaacaggtgctgctgctactggaggtaccggcgctggccgcacgctttgccattcaggaggaggggctgcgcctgttacgccattgggtggctgaatccggcgtacgctgggggctggatgatgacaacgtgcgcgagctggcgctgccgaccaccggccagcacacctggcgcttcggcattacccgcatgctgttgggctatgccatggacagcaacgccggcgactggcagggggtgttgccatacgatgaatccagcgggctggcggcggagctggcgggtcagttggctgaactgctaacgcagctcggcctgtggcgccaacgtctcagcgaaacgcgcaccctggcggagtgggcgccgctgtgccgccagctgctggagagcttttttgccgccgatggcgacacggaagccgcgctggcgctgatagaaaagcagtggcatcaggtactggagcatggtgccaatgctcaatatcccgatgcggtaccgctgagtctgttgcgtgacgagctggcggcgcgtctcgatcaggagcggatcagccagcgttttttggccgggcagatcaatttctgcacgctgatgccgatgcgttccatcccgttcaaggtggtgtgcctgcttggcatgaacgacggcgtttacccgcgcaccctgccgccgctgggctttgacctgatggcgcagcaggtgaagcgcggcgaccgcagccgccgcgacgacgaccgttatctgttcctggaagctattttgtccgcgcaggaaaagctatatatcagctttatcgggcgttcgattcaagacaacagcgaacgttatccctcggtgttggtgacggagttactggagtacctgcagcagagttaccgtctgccgggagatgaggaacgggatgtcgatgccagcgcgagccgggttagcgaacatttacttcgctggcatgcccgtatgccgtttgcggcagagaatttcttgccgggcagcgaggcgcaaagctacgccgccgaatggctgccggccgccgacggacgcggccaggcgcaccccgagttcaaccagccgctgccgcccgaacccaaaacacagatcgcgctggatgagctgcagcgtttttatcgccacccgatccgcgcattcttccagcagcgtctgggcgttagctttgttctggaagaaaccgaactgccggacgaagagccgtttacgctggataatctcagccgctatcagtacaacaaccaactgctgaacgcgctgattgacggcgacgatgcggcaaaattgtatcagcgcatcagggcctccggcggtttgccttacggcgccttcggcgagatttactggcagaagcaacaggaagagatgcaggatttggcggcgcaggtgcgtgaggagcgcaagacaagcggcagtctggaattggatatcgacgtggcgggcgtgcatatcggcggctggctgcatcaggtgcaggaagatggcctgctgcgctggcggccggccgctctgtcggcggtggacggcattctgctgtggctggagcatttgctgtattgctgtgcgggcggtcagggggaaagccgcatgctggggcgcaagaactcagtctggcgttttgccgcgctgccggcggaagccgcgcaagagcaattggcggagctggtggccggctatcagcgcggcctgtgccagccgctgatgctgcttaataagagcggttgggcctggttaagccagtgttatcagccggaaaatcaggtgattgactggaacgaagagacgcagagtaaagcgcgcggtaagctgctgcaggcctggcagggcgaccagcgaattcctggcgaaggggaagacccttatgtacagcgggtgctgcgtcagctggataatgatgccctggcgcaaattttagcggaaacagaacgttacctgctgccggttgccagacataatctgggatag

SEQ ID NO: 444170 - DNA, 2856 bp, Serratia marcescens
atgttgttggtagtcttttgggcaccgtcaggctgggctgagcagggatggcagccgctggcggagaaaatccataaaagtgagcacgatccgcgccattaccaggccatcaagctggctaacggcatgacggtgctgctggtttccgatgagcaggcaccgaagtcgctggcggcgctggccttgccggtcggttccctggaggatcccgacagccaactggggctggcgcactatctggaacatatggtgctgatgggctccaagcgctatccggagccggaaaatctgtctgaattcctcaaaaaacatggtggcagccataatgccagtaccgcgtcgtaccgtaccgcctattatttggaggtggaaaacgatgctctggcgccagccgtcgaccgcatggctgatgcgatcgccgaaccgctgctggatcctggcaatgcggataaagagcgcaacgcggtgaatgccgagctgaccatggcgcgttcgcgcgacgggatgcgcatggcgcaggtgggagcggaaacgttgaatccggcgcacccgagcgcgcgcttttccggcggcaaccttgatacgctgaaggacaagcccggcagcaagctgcatacggaactgacaacattctatcaacgctattattccgccaatctgatggtcggcgtgctctacagcagtcagccgctgccgcagctggcagcgctggcggcgaaaacctttggtcgggtgccggaccatcaggccagcgtgccgccgattaccgtgccggcggtaaccaaggcgcaacagggcgtcattatcaattacgttccggcgcagccgcgcaaacagctgaaagtcgagttccgtattgataacaacagcgcggctttccgcagtaagaccgatacctatatcagctatctgatcggcaaccgcagtaaaaatacgctgtctgactggctgcagcagcaggggctggccgatgccattaacgcaggcgccgatccggtggtagatcgcaacggcggggtgtttgtcatcagcgtctcgctgacggacaaggggctggcgaaacgcgaccaggtcgtggccgctatcttcaactatctgaaaatgctgcgtcagcagggcgtcaaaaaaagctattttgatgagattgcgcacgtgttgaatctggatttccgctacccgtcgatcacccgcaacatggactatatcgaatggctggtggataccatgctgcgcgtgccggtcgagcatacgctggatgcgccttatctggcggaccgttacgatccggaggctattgcgcagcgtctggatgaaatgacgccgcaaaacgcccgcgtctggtttatcagcccgaatgagccgcataacaaaacggcatactttgtcgatgcgccgtatcaggtgaataaaatcaccccgcagcgtttcgaacagtggcagcgcctgggacaagcgatctctttgtcgctgccgacgctgaacccgtatatcccggatgactttaccctcacaacgccatcacaccgctttacccagccggaagtggtggtgaaccagccggggctgcgcgtgctgtatatgccgagccgctattttgccgatgagccgaaggccgacgtgaccgttgccttccgcaacgccgagaccatgaattcggcgcgcaatcaggtgttgttctcgctgacggattatctggccggcatcgcactggatcaactgagttatcaggcttcggtcgggggcctgagcttcagtacctcgccgagcaatggcctgctgtttaatgctaacggctttacccagcgtttaccgcaactgctgacgtcgctgatcgaaggctacgccgggtttacgccgacgcaggcgcagctggatcaggcgaagtcctggtatctgcaacagttggatgccgctgagaagggcaaagccttcgaactggcgctccagccgattcagatggtgtcgcgtgtgccctactcagaacgcagcgaacggcgggaggtgctgaaaaccctgacgctgaaagacgtgcttgcctaccgtgacggcctgttgaaaaacgccacgccggaaatgctggtggtgggcaatatgagcaaaccgcaggttgatcaactggcgtccgcactgaagcaaagccttgcctgccgcggcataacatggtggcacggggaaaatgtccaggtcgctaaaaaacagctggcgaatctgcagcgcaccggcagcagcaccgattcggcgctggcggcggtctatatcccaaccggctatgatgaaatcagcggcatggcgcacagctcgttgctggggcagattattcagccttggttctatagccagttgcgcactcaggaacagctggggtatgcggtctttgctttcccgatgtcggtcgggcggcagtggggcgtaggcttcctgctgcaaagcaacagtaaacagccaaactacctctaccagcgctatcaggatttctacccgaaggcagaaaaacggctgcgcgagatgagcgccgcggactttgcccaatatcagcaggcactgattaatgaactgaagcagcggccgcaaacgctgagtgaggaagcggggcgctttagcaacgacttcgagcgcggcaacttcgcctttgatacgcggcagaagctgatcgcgcagatacagcttctgacgccggccaaactggcggacttcttccaccaggcggtgatacagccgcaggggctggcggtgctgtctcaggtcagcggcagcagccaggataaagccgattatgcggcgccgcagggctggagcgcttacccgaatgcatccgcgctgcagcaaaccatgccgcgccaggtggttaaaccatga

SEQ ID NO: 444171 - DNA, 3558 bp, Serratia marcescens
atgatggcgcaggctccgcaaacgctcgatccgttaacgctgccgctttgcggcgaacggctgattgaagcctcggcggggaccggcaagaccttcaccatcggcgcgctgtatctgcgcctgctgttgggtttgggtaagcaggcggcgttttcccgcccgctgacggtagaggaaattttggtggtgacctttaccgaggccgccaccgaagagctgcgcggccgtatccgcagcaatattcacgggctgcgcatcgcctgtatccgcgggcgtgagcactgcaacaacccgctgttcgctgcattaatggcggagattgacgacctggcggatgcggcggcgcagctgttggccgccgagcggcaaatggatgaggcggcgatctataccatccatggcttctgtcaacgtatgctgacccagaacgcctttgagtccggcattttatttgagcagacgctggtgcaggatgagctgcctctgcgccggcaggcttgcgcagacttttggcgccgccattgctacccgctgccgctggacgttgcgcgcgcggtcagccaggagtggagcgggccggaagccttgctgagcgacctgtccgcctatctgcacggggaggcgccaacgctgcgccaaccgccgcaggaggatgaaacgctgctggtgcgccaccagaagatcgtggcgcgtattgaagccatcaaagcgcaatggagcgcggtggcggccgatctgcatgaccttatcagcagttccggcgtggataaacgcagctacagcagcaagcacttgcctaactggctacataaggtcggagagtgggccgggcaggaaacgcaggattatcaactgccgaaggaactggaaaaattccgccagtcgacgctgctggaaaaaaccaaaaaaggcgaggcgccgcgccatgccctgtttgacgccgttgatggtctgtttgccgaaccgttgacgctgcgcgatttggtgatggcgcgcgcgctgagcgagattcgcacctcgattcaacaggaaaagcgccagcgcgccgaactggggtttgacgacctgctaagccgactggacggcgccctgcaaagtgcgggtggcgatcatctggcgcaggcgatacgtcagcgctatccggtggcgatgattgacgaatttcaggataccgacccgcagcagtatcgcattttccacaagttatatgtggggcaggcggagtgcggactgctgttgattggcgatcccaaacaggcgatttacgcgttccgtggggcggacattttcacctatatgcgtgcccgctctgaggtgagcgcccactatacgctggagaccaactggcgctcttccccgacgatggtcggcagcgtcaaccggctgttttcccggctggaaaaaccgtttctgttcggcgagatcccgtttattgacgtggcggcggcggataagaaccagaaactggcgtttgaactgcataatcagccgcaggccgccatgcacttctggctgcagccgggcgacggtgtcggagtgagcgactaccaacagcaaatggcacgcctgtgcgcgacgcaaattcgcgactggctgaatgccgggcagcgcggagaagcctggctggcggatggcgacaagcgccggccggtacaggcatcggatatcaccatcctggtgcgcagccgggcggaagcggcgctggtgcgcgatgcgctcagcctgttggcgattccttcagtatacctgtcgaatcgcgacagcgtgtttgatacgccggaagccaaagatttgctgtggctgttgcaggcggtgctggcgccggagcaggagcggaccttacgcagcgcgatggcgaccggcctgctggggctggatgcgccgacgctggatgcgctgaatcataacgagcgggcgtgggatacgctggtcgaagagtttgaccaatatcgcacgctgtggctgcggcgcggcgtattgccgatgctgcgcgaggtaatgacgcagcggcatttggctgagaatctgttggtcagccccggcggcgagcggcgtctgaccgatgtgatgcacctgggtgaactgctgcaggaggcgtcggcacagctcgacagcgagcatgcgctggtgcgctggctggcgcagcagattgcccagccgaacagccagtcggacaaccagcagctgcgtctggaaagcgaccgccacctggtgcaggtgatgacgattcacaagtccaaagggttggagtatccgttggtctggctgccgtttgtcggcaactatcgccagcagcagcaggtgctgtatcacgatcgccacagtttcaaagccttgctggatctgaatgccgatgaagagagcatagcctgggccgaggaggagcggctggcggaggatttacgcctgctttacgtcgcgctgacgcgttcggtgtaccactgtagcatcggcattgcgccgcttattcaggggacacgtaaaaagcagggggagacggatttgcatcgcagtgcgctggggtatctggtgcagggcggtcaggcgggggatgccgcctatttgcagagctgtctgcagcaactggctgatgaaagcattgcgttatccctgctggaaccgctggatgagcagccttggcagccgcagagcgagcaggcagagctgttggcagccagagaggtcaagcgacagttgcaggacttttggcgggtgaccagctataccggcctgcagcaacacggcgctgggctgatgcaggatctgctgcctcgtctggacgttgatgctgcgggtgagaaggcggctgagagtgagccgtcactgaccccgcacacctttccacgcggtgctgcgccgggcacctttttacacagcctgtttgaaacgctggattttacccagccgctggattccgcctggctggcggagcagctgcagctgaacggttatgacgcgtgttggcagccggtgctgcagacgtggatggagacgctgctgcataccgtactgaatgacagcggcgccacgctggcgcagctgacgccgcaggctaaacaggcggagctgcagttttatctgccgatcggccagctgttgcaggcatcgcagctggatacgctggtgaagcgctatgacccgctgtcggcatgctgtccggcgctggattttcaacgagtgcaggggatgttgaaaggctttatcgacctgattttctgctggcagggaaaatattacctgctcgactataaatccaactggctgggtgaagacagcagcgcctatacgcagccggcgatggcgcaggcgatggcggaacatcgttacgacctgcagtatcagctgtataccttggcgctgcaccgctatctgcgccaccgtctggcagactatgactatcaacgccactttggcggcgtgatttatctgtttttgcgcggcgtcgacggtcagcatcccggcaacggcatttttgcctgccgtcctgaagctgccttggtggaggggatggatcggctgttcagcggcgacgataaccagggggaatctgaagcatga

SEQ ID NO: 444172 - DNA, 1866 bp, Serratia marcescens
atgatacagctactccaacaggcggtcacgcttggcgtgctgcgtccgctggacatacagttcgcccgggtggtcgccgagccggaacggccggatatgctgctggcggctgcctgcctcagcgcggaagccggtgccggccacgtctgtctacagctggagcagctgttgccggagacgctgttcggcgcgcgtcagcctgagctggcgcaggcggtctggcaggctgccggccagccggacgttgacgaatggcggcgtttgctgctgtcgtctgctgcggtcagcgacggcagcctgccgacaccgctggtgctgcaacagcagcggctctatctgcagcgcatgtggcaaagcgaaggtgaggtggcggcctttatcggcagtgacgatatgctgcaggatattgagccgcagcgcctgcgtccgatcctggaccgtctgtttggcgaagcggaggctacgccggactggcagaaaatcgccgccgccgtcgccgccacgcggcggattgcggtgatttccggcgggccgggcaccggcaaaaccaccacggtggcaaagctgttggcggcgttggtgcagttggccgatggcgagcggctgcgcattcagcttgcggcaccgaccggaaaagcggcggcgcggttgaccgagtcgctcggcagcgccagccgccggctggggctgacggcgcagcagctgagtctgtttcctactgaggcggcaacgctgcaccgtctgctgggtgcacagccgaacagtcagcgcatgcgctatcaccgcggcaacccgctgcatctggacgtgctggtggtggatgaggcctcaatggtggatttgccgatgatggcgcgcctgattgccgccctgcctgaacatgccagagtgatcttcctcggcgaccgcgatcagctggcctcggtggaggcgggcgcggtgctgggagatatttgccgctttgccgagcagggctacagcgaagcgcgagcggcgcagctcagccaattgaccggctgtgcgctgcaggggcagccggcgcaggcggctgcggcagtgcgcgatagcctgtgcctgctgcgtaaaagctaccgttttgacgccaactcgggcattggacagctggcgtttgcggttaacgccggcgatgtcaggggcgcgcgcacggcgctggacggccgctttgacgacgtcgccggctatccgctggcggaaacggcggactaccaggcgctgctggatgcctgcgtggtgggctatcgcgactacctgatgcaggtggcagccggcaccggtgcgcagcaggtgctggatgcgtttgggcgctttcaggtactgtgtgccctgcgggaaggaccgttcggcgtcagcgggctgaatgaacggattgagactgctctgcagcgcgccgggctgatacggcgtacgcccggcgccgcagggcgctggtatcgggggcgtccggtgatgattggccgcaacgacagcgctctggggctgtttaacggcgatatcggcattgccttaccggatgagacaggggagttgcgcgttcacttccaactgccggacggcagcatcaagtcggtgcagccaagccgcttaccggcgcatgaaaccgcctatgcaatgacggtgcataagtcgcaggggtcggagttcgatcatacggtactggtgctgcccaaccactatctgccggtgttgacgcgggagttggtgtataccgccattacccgtgcgcgtaagcgcctgtcgctgtatgctgccgataaggtattgatgggcgccgtgcgtacgccgacgcagcgccgtagcgggctggcggaacgtctggtgatggcagacgatgaacaggggcgctaa

SEQ ID NO: 444173 - DNA, 1254 bp, Serratia marcescens
atgtcaaacgataatcacaatctgggtcgccgtcgtctgttgcagggggttaccgcaacctggttgctgagcgtgagtcgtgtcggttttgccgcgtcgtcgcatgttatcgcggtgcgtgtctggccttcatccacttacacgcgcgtgacgctagagtccaacgtggcgctgaaatacaaacagtttgcgctgaccaatcccgatcgcatcgtggtggatattgagggcgtgcagcttaacagcgtgctgaaaggcatcgcctcccaggtgcaaaacagcgaccctaacctgaagcaggcgcgcgtcggccagttcgataaagacaccgtgcgtctggtgctggagctgaagcaggatgtccgcccgcatatgttcaccctggcgccggtcgctgaataccgcaaccgtctggtgctggatatgtatcccagcaagccggcgcccggtgatgatgactatgatccgctgttggcgttgctggaagattacaataagggcgatctggaacggacgctgccggcaccggccaaagcgccgcaaaccggtaaggcggggcgcgatcggccgatcgtcattatgctcgacccgggacacggcggtgaggatcctggtgcaatcggcaagtacaaaacgcgcgagaaagacatcgtgctgcagattgcccgccggctgagaacgatgatcaagcgcgaaccgaatatgaaagtctttatgacgcgtaacgaagatgtcttcattccgctgaaggtgcgggtggcaaaagcgcgcaagcagcgcgccgatctgtttgtctccatccacgcggatgcctttaccaaccgtgcggcgcgtggctcatcggtgtttgcgctgtcgaccaaaggggcaaccagcgctgcggcgcgctatctggcgcaaacgcagaacgaatcggatcagatcggcggcgtcagcaaaagcggtgaccgctatctggatcacaccatgttcgatctggtgcagacggcgaccatcaacgacagcctgaaatttggcaaggaagtgctgcatcggatgggcagtatcaaccggttgcacaagaatcgtgtcgatcaggccggttttgcggtgttgaaggcaccggacattccttccattctggtggagacggcgtttatcagcaacgtggaagaagagcgtaaactgcgtaccagccgttttcagcagcagattgcggaatctatactggcgggtatcaaggcttatttctccaacggcggggcgaggcgttaa

SEQ ID NO: 444174 - DNA, 657 bp, Serratia marcescens
atgaataccaaactgaacaagctcatgcaattggcgtttaacaactccagcgccaatgaggcagcgcaggcattaaaaatgcttgccgctgcgatgcaggagcagtacataaacccggccagcctactacaaattaagagcgactccgccagcagcgagttggtagctgagttgcgtcatgagctttccattctcaaaacagattacaacggcatgatagaccgttataacaccgttgtacgtgcccataaggcacgcggtgagaaaattacagctctggagctgtcattgtccgaaaatggtattgcagcggcacagcgggccgcagagacgcagcaggaagcatcttctgcatcggaggggtctattgctgaccaaatccgcaaaatgaagagttgcacggcggatctggctaaccacccgaaagcaaaggccacgcgacgcctggctgatgagttggctgcgcagaatgagcagtttaaagggcgttggaactaccaagaacctagccagagcagcaagtatggtgatgcacattatagctatgactacggcgacaccctgcatatgtggatttgtaaatcggaaaccagcgacgggttttcagtaagtctcgcgacctttggtccgcgtggtgaatcgccacggataatctag

SEQ ID NO: 444175 - DNA, 2139 bp, Serratia marcescens
atgcatatttccaaactgaccctggtcaactacaggaacttcacgaacacgtctctgcggtttcacaagggagtgaacacaattatcggggaaaatggttccggtaaatccaacatcctgcgagctatccgcctcctgcttgacgacaatatggtgcgtgctgcctatcgcctagatgagtctgatttcagccgctcactcggccaatggcagggccattggatcatcatcagcatggagttcgaggacataaccaccgatgaatccgttcaggcactcttccttcatggaacagctccagtggatgatggaccgattaataaggccacctataacctgattttccggcctaaaaaagaagtcaggttgaagctggcagccttggaaacgtttgaggaggaacaactctcgaaaatccgtgacacaatcacgatcgatgattacgaaacgattttcacaggacggagctgggctgactttggtaatcctggggtatacaaaagcatagtgggtgatttcgatatttgtgacttcccatcagagacggagtatccagaaatcggagcaaagatacccggcttcctttccgttacgaaagaggtctcgctgactttcatccaagctttgcgcgatgttgttgctgagttccacaacaaccgtaccaaccctttactcaccctactcaagagcaagagtggagagatcaatccagcgacgatagagccaatcaccgagagggtccgcgaactcaacacctcgatcgaaggcttaaaggacgtccagtcagttcgtaatcacattcgtgaaaccatcaaggacgccgcaggtgaaacctactcacctgcgtcactctcgataaaatccgatcttcccgaagaagctgataggcttttccagtctctccgactcttcgtgggtgaatcagaggaagggtacgaaggtgcaattcatgaactgagcctaggcggagccaacctcatctacctgacactcaaactactggagttcaagtaccagcgcgaaaaactggccatggcaaatttcctcctgatcgaggaaccagaagcgcacatccatacacacattcaaaaaaccctgttcgaccgcatcgcatacagcgacgcgcagatcatctacactactcattccacccatatctctgaagtcagtaatgtaagcaatgtcaacatattgggccgccatggatcgttctgcgaagcctatcagcctaccagaggccttgagcctactcagatcaatagtatccagcgttaccttgatgcggtgcgtagtaatctgctcttcgccaaaagcgtgatactcgtcgaaggtgatgtggaagaaattcttataccaatcctaattaaactagttctgggagtaagcattgacgagttgggcatcagtgtcatcaacattcgcagcacaggcttcaagaatgttgcggttctctttcataatctccgcattaagaaacgatgcgccattatcacagatttggaccaggccttctttgacatcaccgaacagacaactgatacggaaggtgtggctaagataaaggccaaagccgctgggtcccagaaagcaggtttaagacggcaggccgatctgactgagttcactgcagaaaatccatggcttttaaccttctacgccaaacacaccttcgaggtagactttgtcgccgccggcaaccatgaggccgttgtccaaaccattccaaaaatctacaaggacgaggaagctaggaataaggcaagacagcaactccaatccggagacctacgacaaatggggcgtcgtacactaacgatggccaagcaagagggcaaggggtggttcgctctcttgctcgctgagtacctcactccccaagtccagatcccagcctacatcatgcaggccattcattttgcacatggcgcatttcctcttccccttattgccagaattctccaacatcgcgccgaatatcgatacggttccgatgtgttaaattcaccagagaaacaggggtttcttctggaggttgagcgttttgcgcaaggggatattggcttagctgagctcaggatagcaatcggacacatgctaccgggagacgctgttgatccattcttagcggagatgcagtaa

SEQ ID NO: 444176 - DNA, 1782 bp, Serratia marcescens
atgttcgtttgggacccaagagacctcaatcctgagcaggcggcagcagtgatcgagccatcaagcatctttctgaacgcttgtcctggcagcggtaaaacccgcaccctgacctacaaaattgcctacgaactatctcgtcgtactgacaagcggatcgttgtagccattacctacacccaccgtgctgcagatgagattcaagagcgtattgaggaactaggagttgacacttcaggcctatggattggtacgatccatgcattctgtctagagtggatactcaagccatacggaatctattcccctgaatttgctcacggttaccgcgtgattgaccctcatgatcgtgagcgtctgctggagaggctatgtgctccgtataaaggtgtcactcattgggattgcgattactacgtcactgagacggggtatcaacttagctgtgtagacatgggaaaacatcatatcattcataaggttttgaaagcgtacttcgaggagctttcagcgaaccggcagatcgacttcgaacttatcctttggcatgcctatagcttgataagggacagagcccaaataacagtgctgctctcgcgtgtattttctcacatccttgtggatgagtatcaagacaccaaacagatccagtatactattgtgacgtctatacttcgcgcaggcagcggacagaccaaaatactcatcgtaggtgatccgaatcaagctatctatggttcactaggtggttatgctatgccagtggatgaattccgtacccgtgcagggatctcaattaaggaatttgcgctcagcctaaactaccgctccagtgagcgaattatcagctacttttcgaactacagcgtacacgcaacaaaaatcaacggcgctggcaaacatgccaagtttcccagccgggtcacctacaatcaaaacgtaactcgcagcgatgttcatgatgagattgtacggttgattcgggcaagtctcgccaatggtcactctcccgaaaacatctgcgttctcgctccacaatgggttttgcttgcatccacgacacgaaaactagtggcgatgttgcctgaccaacaatttgatggcccaggcctcgtccctttcagtaacaacttcgataatttctggttcaaggtctccaagattttactaacggactcctctcccagactgctcgttaggcgaatgcgctgggcaaacgatgtgatcaaagacctcgatagtttcggcgttgacaccaaaatactgactccacgcatcttgctgagggaggttaacgcactcacaatcgatgaaacggacggacttcgctacttggatcaggccttcaacgatctgcttaagaggctcaatatttcccaggaaatccatcctgcgctcttgagccaccgagaggcatttttcagcagttctgcagcacgaatagagcgactgcagaaggatggggctacgtacatcaaccaagtatcattcttcaaaaaagtgtttcgcgagcgaaccggcataacagtctccaccatccatggtgtcaagggtgccgagttcgacgtcgtcatcgcctttggcttactggagggcatggtaccgcacttcaatgaagcgaatggacatatcgccgcaagcaagctcctctatgtattgagctcccgtgctcgtaaaaatcttcacttgatctcggagtcaggacgacagaggggaagatacggagtatatacttcgaccgagttactcgcagcttgcaacttcagttatgacccggactaa

SEQ ID NO: 444177 - DNA, 324 bp, Serratia marcescens
atgactgcaaaaagtaaattcaaaagtcctgcatttgaggctatccacagcgcggcttctggattattcagcgtcgatgctatcccgcaggaaacaatgcgcaactttgataaagcgtgccttaataacgtggatgatctgcaacctattgagatcaaggcgctgcgcgagaagctgaacgtcagccaaccggtttttgccagttacctgaataccagtgtatcaacggtgcaaaaatgggaaagtggcgtaaagcgtcctagtggattggcgctgaaactgcttaccgtggtgcagaagcatgggttaaaggtgttggtttga

SEQ ID NO: 444178 - DNA, 360 bp, Serratia marcescens
atgcgcgtattcaaaactaaatggttcagcaaggcagctaaatcccacgccattaaagatagcgagttatgtcaggctattgaggctgcgatgcaagggaaagctgacgacctcggcgggggagtttacaagaaacgcctgaaccataatcgcgatcgcgccattatcctggcgaaaggtggggagcactggttttacacgttcctttatgccaaacagaatatggcaaacattgataatcgcgaactggccggattccgcgagttagcaaagcactacgctgcccttgcagatgaaaagatcacggcactgattaagagtaaagacctggtggagatttgccatgactgcaaaaagtaa

SEQ ID NO: 444179 - DNA, 879 bp, Serratia marcescens
atgagtaaattaagtcgtgaaatgaaaatgctggctaggcaagtcggcggtagctttaaaaccgttcacgatcgtacccgtatcattgaccggttttgtcgccatctgatggcgcttaatatccaggttcgggatgttcagcatctgaaagctaaacatatcgaaagttatattgccgaccgccagacagcgggtattgctgttcgaacacttcataatgacatgtcggcattgcgcactgtgtttcgcctggctggcagggaaaagctcgtaacatcagcacgcttaaccaataaaacgttgggattaagcggaacaagccgtgcaggcacgaaattagcaatcccggatgagcgatttcaggcagtactgcgcagtgcgcaacactatgaccagggacttgcctgtacccttcagcttgcccggttgctgggattacgctcacaagaagccgtgcaatgctccggttcactgaaaacatgggaaaaacaacttgaacgcaatcaatcaacacttaccatcgtttttggcaccaaaggtggcaggtcgcgtgaaacgcggatcctcgaccgtcacgctgtacaacaggccgtaaatgacgctctgctgattgcgaaaacgcgtaacggcaaacttatcgacaagcccgacttaaaaaccgccatgaacttctggcgctcacataccacacggttaggattgttcggcaattattccccccacagcctgcgctatgcatgggcgcaggatgctcttcgctattacctgtcacagggattttcccgcaatgaagccagagcaatgacgtcaatggatctcggccacggcgatggcagaggccgctacgtcgagcgtgtttacaccaggaaggaggactaa

SEQ ID NO: 444180 - DNA, 225 bp, Serratia marcescens
atgatgccgaatttcaaattgttgcgattatcggatgttatggagaaaaccggcttcagaaaatcatggatttatctcctgataagcaagggcgattttcctcctgcagtcaaaattggttcccgttcggtggcatggctggaaagtgaagtgaatgactggattgctgagcgcgtcggcaaacgtgagggggtacagcaagcggggaaaccagacaatgagtaa

SEQ ID NO: 444181 - DNA, 1080 bp, Serratia marcescens
atgagtaaattgatcactgataccgaaacagaattcagtaccacacttcccctacgcaaagggtccgatggctttgatacccggcaggactacctgattaagggctatttgccagcttcatccgttgccagcgcttacggtgccagcggatcttacaaatccttcttggcggtatcatggggatgccatatcgccaccggcaaagcatgggcgggtaaacctgtcacacagggagccgtcatttatgttgttggcgaaggtgggatcggtgttccccgtcgtatccgggcatgggagcaaacgcttaacggtggtagccctattgatgcattatatcgtgtcgattgcccgatctttcctgccagcccggagagcgtgcaacaggtgatacaagccgccaaagatgtcaaagccgcgaccagtatgccgattcgcctgatcattctggataccctcgcccgctgcttcggtggttcagatgagaacgcagctaaagatatgggcgccttcattcagggatgcgactacatcaaagccgccacacaggctacggtgctgattattcatcactctggcaaagatcaggacaaaggcgcacgcggttcaagtgcattccgggcggcactggatgtggagtttaatgtgcgccgtgaaggtgacggtggcgcgttgattctcagttgcaccaaaatgaaggacgccgaagagccgccacgtcgtgcctatgacctgcattccgtcgatttatacgtggatgatgatggcgatcggatcacgtcactggtgctgaacgatgaaggccgcgaggccatagataataatatcgctggcgaccctgatttatcgggtatttcacgactcacagataaccacgttgccttatggcaggctatccgttctcgcacaggcagcagcgatagctgcacccgtgcgcgggttcgtgacgatatgagagcgatgggttttgacgtagccaaaaaatttactcgctggctggataaactggaaaaagatggcctgatcgcattggatggagaacgcattatgccgttgtcgcaaagagataaaacgagggattaa

SEQ ID NO: 444182 - DNA, 1557 bp, Serratia marcescens
atgacaagcttgcaacaacgcgctgagttacaccgccagatatgggccattgctaacgatgtccgtggctctgtcgatggctgggatttcaaacaatatgtacttggcgcgctgttctatcgctttatcagcgaaaacttttccagttacatcgaagccggtgatgacagcatccactatgctgcgctggatgacagcatcattaccgatgacatcaaagacgatgccatcaaaaccaaaggttacttcatctacccgagccagctgttctgcaatgttgcagctaaagcgaacaccaacgacaggctgaacgccgatttaaacagcatctttgttgccattgaaagttctgcctatggttatccgtctgaagctgacatcaaaggcctgttcgccgattttgacaccaccagtaaccgactgggcaacactgttaaagataaaaacagccgccttgctgccgtgttgaaaggcgttgaaggcttaaagctgggcaactttgatgctcaccagattgacctgtttggcgatgcctatgagtttctgatttccaactatgcagcaaatgccggtaagtcaggcggcgagttcttcacgccacagcatgtctctaagctgattgctcaactggcaatgcacggtcagacccacgtcaacaaaatctatgacccggctgcaggctccggctcgttgctgttacaggcgaaaaaacatttcgataatcacatcatagaagaaggttttttcgggcaggagattaaccatacgacctttaacttggcgcgtatgaacatgtttctgcacaacatcaactacgacaaatttgatatcaagctgggcaatacgctgacggaaccgcatttcggcgatgaaaaaccgttcgacgcgattgtttctaacccgccgtactcggtgaagtggattggcagcgacgacccaacgctgattaacgatgagcgctttgcacccgctggtgtgctggccccgaaatccaaagctgactttgcctttgtgcttcatgcgttgaactacctgtccgccaaaggccgcgcagcgattgtctgcttcccggggattttctaccgtggcggcgcggagcaaaaaatccgccagtatctggttgataacaactatgttgagacggtgatttccctcgcgccaaatctgttcttcggcaccaccattgcggtgaatattctggtgctgtcaaagcataagaccgaaaccagcgtgcaatttattgatgccagcgggctgtttaaaaaagaaactaataacaacattcttaccgatgcgcatatcaaacagattatgctggtgttcgacagcaaggcagacactgaccatctggcgaaatctgtgccgtttgaaaccgtggccgccaatgattataacctgtcggttagcagctatgtggaagccaaaaatacccgcgaaattatcgatatcactgaattgaacgctgaactgaaaaccaccgtcagcaaaatcgaccagttacgccaggacatcgatgcgattgtggcagaaattgaaggcagtgaggcacagaaatga

SEQ ID NO: 444183 - DNA, 1209 bp, Serratia marcescens
atgagcgagctgagttatctggaaaaactgctggatggggttgaggttgagtgggtaacattggggtctatggcagatatcggtactggaagctcaaatcgtcaggatgaaagcgaaaatggaatttatccattctatgttcgctcaaagaatatcttgaagtcagatacctttgaatttgatgaggaagcaatagtcattcctggtgaaggtggaattggcgacatatttcactatgttgaggggaaatatgctctgcatcaaagggcgtatagaattcgtatcacaacaaatgccgtagacacgaagtttttgtattacttcatgtcatctagctttaagcagtacatcttgacaaaaagtgtgggtgctaccgccatttcgataagaaaacccatgctggaaggatttaaagttcccatcccctgcccggacaacccggaaaagtccctggccctccagtctgaaatcgtccggattctggataaattcaccgcccttacagctgagcttacagctgagcttacagctgagcttaccgtgcgtaaaaaacagtacaactactatcgcgaccagttgctgagttttgatgagggtgaggttgagtggaggacattgggagaaactgcaagaatacagcgaggagcatctcccagaccaattgcaaagtatatgactgagagtagcgatggtattccatggattaaaataggagataccacccctggttcgaaatacattgacaatactgcgcagaaagtaacacctgctggtgctgaaaaatctcgaatattgagtccgggagatttcgtaatgtcaaactcaatgagctttggcagaccatacatcttacggataactggggctatccatgatgggtgggcatcaatcagcgattttagcgaaaaattggactcagattttttgtaccactatctttcatcacaaaaagtgcagagctattgggaaagtaaaattaatagtggctctgtcagtaatttgaatgctgacattataaaaacattacccgttcctatacctgatatatccacgcaaaagcaaatagctatgttgctggataaattcgacaccctgaccaactctatcagcgaaggtctcccacgcgaaattgagctgcgccagaagcaatacgaatactatcgtgatttgctgttcagcttcccgaagcctgaaattgccagtcactga

SEQ ID NO: 444184 - DNA, 1257 bp, Serratia marcescens
atggccctgacagacgttgtagcccgtaccgctaagcctcgcgagaaagcttacaaactcgctgatgcacatggactctacctgttgattagtcctggcggttctaagcgttggtatctcaagtaccgtttcgaaggtaaggaaagccgtgttgcttttggcgcttatcctcttatctcgctagcaaaggcccgtgagaagcgtgatgagatgcggttgttactcgctgatggtatcaacccggcggaaaaacgggtcgaggaaaaagaagcatttcaggttgccctgataacttttgagaaagtggcaagagactggcatcggtacattagtcagaatcgctggtcagaaacccatgctggacgggtatggcgcgatatggagcgtaatattttgcctgctatcgggcagcgccacatagcagacctgaagactaaagacttgcttgagccgctgaaagccgtggagcaaaacggccacctcgatttggcgtcacgattgcgtcagcgggtgaccgatattatgcgctatgcggtgcagaacgatctgatagaacgtaatcctgctcaggatctctctggtgcgattgcgccgccgaaggcaacccatcgcccggcgttgaagctggataagctgccggattttcttgcaaggattgaaagttataaagggcgtgcattaaccaccttagccttaaagtttacgctgtgcgtctttatccgttccagtgaactacgttttgcccgctggaccgagatcgactttaaacgcgctatgtggacgataccggctgaacgtgaagcgatccccggtgtaaagcactctcagcgcggggcgaaaatgcgcactgagcatttagtaccgttatcccgccaggctttggcgctgctgaaagaaattaaggcaatcagcggtgggcacgagctgatattcccgggcgatcgtcgtccaactaaacccatgagtgaaaacactgtcaataatgcgctgcgggttatgggatatgacaccacaaccgaactgtgcgggcatggtttccgcactatggcctgtagcgcactggttgagtccgggcagtggtcgcgggatgcggtcgagcggcagatgagccatcaggagcgtaacagcgtgcgggcggcttatattcataaggctgagcatatcgaagaacggcggctgatgctgcaatggtgggcggattatctggatgcgaaccgggaaggatatgtggtgccgtatgagttcaaaaatatatga

SEQ ID NO: 444185 - DNA, 768 bp, Serratia marcescens
atgatcccatccgaacgccgcgattttatctatcgctacgtgcatgaatatcagctggtgcccatcgccgcgctgacggagctgatgagcgtgtcccatatgacggtgcggcgcgatatccgcgtgctggaggaagagggcaaggtggtcagcgtcagcggcggcgtgcgcctgagcgacgcgctgcgccaagagctggcctacaacgaaaaaatgcagctgcaccaccgccataagcgcgccatcggcaaatacgccgccggcctggtggaggatggtcaggtggtctatctggacgccggcaccaccacctttgaaatcgcccgcaacctggcggagcgcttcaacctgacggtggtcaccaacgacttctccattatccaacacctgatgaaccgcccgcagctcagcctgtttcacaccggcgggcaggtggaccagcgcaactactcctgcgtcggcaacagcgccgccatgctgctgcgcacgctgaatatcgacgtggcgtttatcagcaccagttcctgggatctggagcacgggctatcgacgccgcatgaagaaaaagtgctggtgaaacaggcgctgctggaggtggcgcgccggcgggtgctggtctccgacagcagcaagttcggcaagtacggcatgttccgcgtctgtccgctggaggcgctggacgacatcctgtgcgacgccgcgctggcggcagaaacccagcagcaacttaacgatcgcgggctgcgcctgcactgcgtcaacctctga

SEQ ID NO: 444186 - DNA, 963 bp, Serratia marcescens
atgaacattattattaccggcgccgccggcttcctcggccagcgtctggccgccgcgctgctgcaaaacgacgtcctgccgttcgaacggctgatcctggcggacattaatactccgcgcccgccggtagaagacgcgcgcgtgcgctgcgtggcgctcgatctcagccagccgcaggcggcggaatcgctgatcgacgccgattgcggcgtgctgttccatctggccgccatcgtcagcagccacgccgaaagcgactttgacctcggcatgcaggtcaacttcgatgccacgcgccagttgctggaagtggcgcgccgcaaagcgccggcgatgaagtttatcttcaccagctcgctggcggtgttcggcggcgagctgccggcgctgatcgatgacggctgcgcggtgacgccgcagtcctcctacggtacacaaaaggcgatgtgcgaactgctgatcaacgactacgcgcgcaaaggctttgtcgatggccgcgtgctgcgcctgccgaccatcagcgtgcggccgggcaagccgaacaaggcggcctcgtcgttcgccagcggcattatccgcgaaccgctgcacggtgaagcggcggtgtgcccggtatcgccggagctgacgctgtggctctccagtcccggccgcgtggtgcagaactttattcacgccgccaccctgcccgccagcgccttcggcgtctcgcgcaccgtcaacctgcccggcatcagcgtcagcgtgcgccagatgctggcggcactgcgcgaggtcgccggcgaacaggtcagtaatctggtgcgctttgagccggacgaggcgctcaaccgcatcgtcgccagctggccgggcaacttcgacgtgcgccgcgcgctggcgatgggctttggcgccgatgaagattttcagcaggcgatccgcgctttcctgcgcgatgagcaggcgcagggcgagggctga

SEQ ID NO: 444187 - DNA, 1386 bp, Serratia marcescens
atggaattatatattccgattatcggcctggcggtggcggtgttcgtgctggtatttctggtactgcgcacccgggtgcacgcgctgatcgccatgctgatcgccgcctccatcgccggcatctccggcgggctgagcgcggtgcagacggtggataccatcaccaagggcttcggctctaccctcggcagcatcggtatcgtgatcgggttgggggtgatgatgggccgggtgttggaagtctccggcgcggcggaacagatcgcctacagctttatcaaatggctgggtaaaaagcgcgaagagtgggcgctggcaatcaccggctatatcgtcagcattcccatctttgtcgattcggcgttcgttatcctctatccgctggtgaaggcgctggccaaaaagggccagcgtaacctgctgacgctgggcgtcgcgctggccggcgggctgatcatcacccaccatgcggtgccgccgacgccggggccgctgggggtggccggcatcttcggcgtcgatatcggcgcgatgatgctggccgggctggcgctggcggtgccctgcgtggtcggcatcgtgctctatgcccgctggttgggcaagaagtacccggattttcagccgagtatggatgacgaggagccgcaggacctgcgcgttgcccacgataactacctggcagaaaaaggcgccaaggcgctgccggggctgatgctgtcgctgctgccgatcgttacgccgatcgcgctgatctttatcaacgcggtcaacggcatgctggcgaagctcgacggcttcagcggactgacggaaagcctgtgggggcagaccttcgccttcctcggttcgccggtgattgcgctggcgatcagcgtactgctggcggtcagcaccctgatgccgaaggtcgataaacagcaaactctggagcggctggaggaagggctgcagtcggcagggatcatcctgctggtgaccggcgccggcggcgcgctgggcgcggtgctgcgcgaaagcggcaccggcaacctgctggcgcagcacgtcgccagcctgccgctgtcgccggtgctgatcccgttctttatcgccacgctggtgcggctgatccagggctccggcaccgtggcaatgatcaccgccgcctccatctccgcacccatcgtcagccagctgccgggcatcaacatgctggcggcggcgcaggcagccaccatgggcgcgctgttcttcagctactttaacgacagcatgttctgggtggtgaaccgcatgatgggcatcaaggacgtgaagcagcagattatggtgtggtcagtgccgaccaccatcgcctgggcgatcagcctggtgggggtcgtgctgctggactggctgctgtaa

SEQ ID NO: 444188 - DNA, 798 bp, Serratia marcescens
atgaagtacagaataaatgcctttcttgattatgacgccaccgaaggttcactccggctgaatgacggcggtaagtccgatacccagctcaccatcaccgccaacgccctgctgttctttattatccagcatcccggcgttatcagccgcgacgacgttatgaaacgcgtctgggacgataacggcctggtctcttccaacagcaacctcaaccagtatctgagcatgctgcgcaaggcgttccgccgctacggcatcgacaacgtgatcgtcaccgtatcgcgtggccggctggagctgaaccccgagctgcagatagaggtgattgacgacgcaccgctgcaccccgccgtgctggccagcgaacccgcgccgcctgccgcagagccggcaagcgcgccgccgtccgctgccgccggcgaacatgaccactactggggctacagcggcgcggttctggtgttgctggcgctggcgctgttcggctggtcgtggagcaacggccacagcctgacgccgctgcgcttttcacagttggcgcagacgccggtcgaggtgttttccaccgacatgatgctggaccagcgcatgcgcaataattacctgcagaactttaacgcagtgaagaaaaagaaaggcatcaaataccataacggggagcagtttctgttcttttacggcgataagctgcagtccaacggattaggccgcaccttcctcgcgcactgcgtcaaacatcaggataattcgttcagctactgcgataactatttttattattcatggaagccagtatga

SEQ ID NO: 444189 - DNA, 519 bp, Serratia marcescens
atgaaaaaattagtctgggggaaatgctttttcttcggctctgtgctgttgctgctgctggcaatatttatcgccgcccggcacgaagccatctggcgtaacgatctgttaaactgctccaccaaagcgattatgcattttgaagataccgagaccgaatccgtcaacgttaatatccatttcagctttaacgccgacaataaaggttcgatcgtagtagaaggctattccgactccgccgccggctggctctatttacagcgctacgtgcagtttgattacaccagcaagcgcatctcgcccggcacccgctattaccgcatcaaccgctgggtcgccagcaagtcctccatcgaccagtcgccggacgtgatttttgactactttatgcgggaaatgtcagacagccacgacggcctgctgctggcggtggagcaaatcaacccgcgtacggtcttgctcagttcaatcaactcgccgctgtatatctgcacgctgaagcccggcgcagcccgctga

SEQ ID NO: 444190 - DNA, 279 bp, Serratia marcescens
atgggtgatgcattaggtctgatcgaaaccaaagggctggtggcctgtgtggaagcggcggacgccatgtgtaaggcagccaacgtggaattgattggttatgagaacgtcggttccggcctggtaaccgcgatggtgaaaggcgacgtcggcgcggtgaaggcggcggtcgactccggcgtggaatcggcgcagcgcgtcggtgaagtggtgacttcgctggtgattgcccgtccgcacaacgacatcaacaaaatcgttattaaacacaaggcataa

SEQ ID NO: 444191 - DNA, 285 bp, Serratia marcescens
atgggtgacgcattaggattgattgaaaccaaagggctggtggcctgcatagaagcggcagacgccatgtgtaaagcggccaacgtggagctgatcggctacgagaacgtcggttccggcctggtcaccgcgatggtgaaaggcgatgtcggcgcggtgaaggcggcggtcgactccggcgtggaatcggcgcagcgcgtcggtgaagtggtgacctcgctggttatcgcccgtccgcacaacgacattcagaaaatcgtcgcacagtacaaagttgccgaataa

SEQ ID NO: 444192 - DNA, 279 bp, Serratia marcescens
atgaaagacgcactcggattgatcgagaccaaagggctggtgccggcgattgaagccgccgatgccatgtgcaaggccgccaatatcgcgctgatcggctatgagaacgtgggttccggcttggtgaccgtgatggtaagaggcgacgtcggcgcggtgaacgccgcggtggaatcaggccttgaggccgccggccgtatcggccacgtggtctcttcgcgggtgattgcccgcccgcataacgatattgagaaaatcgccgctaaacataaaacctga

SEQ ID NO: 444193 - DNA, 1590 bp, Serratia marcescens
atgacgacattagatccggatttacaatctattcagcaggcgagaaatttaattaataacgccaaacaggcgcaaaaaatattcgccggttattcacaggaaaagatcgacgaaattattaaacagattgcgcaatatgccgctcagcacgcggaagagttagctaagctggcgcatgaagaaaccggcttcggtaattggcaggataaagtattaaaaaatatcttcgcctccgagcacgtctattcgcatattaaagcaatcaaaaccgtcggtattctgcacgacgatcgggaaaccaaggtgatggacgtcggcgtaccgctgggggtcatcacggcgctggtgccatccaccaacccgacctcgaccattttctacaaaacgctgattgccctgaaggccggcaacgcgattatcttctccccgcacccgaacgcccgccagtgcagccagcgggcgattgaagtcgtcaaacatgccgccctgcaggccggtgcgccggccggcatcgtcgacggcctgacccagctgacgctggatgcgaccaaaaccctgatgcacagcaaagacgtggcgctgatcctggcgaccggcggcgaaggcatggtgcgcgccgcctacagttccggcacgccgaccatcagcggcggcccgggcaacggcccggcgtttatcgagcgcagcgccgatgtcaaacaggcggtcggcgacatcatcaccagcaagaccttcgataacggcgtgatctgcgcctctgagcagtcgatcatcgtggagaaatgcatctatcaggatgtgcaccgcgaattgctggcgcagggcgcgtacttcctgaatgacgacgaagcccgccgcctagccaatatcctgctgcggccgaacggcatgatcaacccggaaatcgtcggcaaaaccgcgatctacctcagcgaacgcgccggcttcaacgtaccgccgaacaccagagtgctgatcgccctgcaggacagcgtgtcgcgcagcaacccgtacgcccgtgaaaagctctgtccggtactggggctgtatatcgaagaagactggatgcacgcctgcgaccgcgtggttgagctgctcaccaacgaaggcctgggacatacgctggtgatccacacgcagaaccagcaggtgatccgcgagtttgcactgcaaaaaccggtgcaccgcattctgatcaacacccccgccgcgctgggcggcatcggcgctaccaccaacctgataccggcgctgaccctcggctgcggcgccgtcggcggcggttccacctccgataacgtcgggccgctgaatctgatcaatatccgcaaggtcggctacggcgtgcgcagcatcgacgatctgcgtcagcccgcccggcagagcagcagccaaccggaccacaacaccagtattttcgctgactcacgcttccagcaggggccgcaggccgccgcgcagccgccgtgcgctcaggcagacgaccgtttcggcgcggtaagcccgtcggcggcgcaggcggccaacgacatcaacgaagaaaacgtcgagcacattatcaaagcggtgcttggccgtatgtcccggtaa

SEQ ID NO: 444194 - DNA, 258 bp, Serratia marcescens
atgattctcgcaagggtgaccggacacgtggtggccacacagaaaagcgacgaactgcgcggcagcaacctgctgctggtgacggcgctgggggatgacctgcaggccatcaaagaccggacctatgtggcggtcgacagcgtcggcgccggggaggatgacctggtgctggtggaggagtatttcgcgctgaacaaagagcgctacaaggccatgtcgatcgtcgccattgtcgagaaggttcaccgggagcgttaa

SEQ ID NO: 444195 - DNA, 1212 bp, Serratia marcescens
atgaatgaatttctgattaagccaaaaatccatttcggtgcggacgcactgaacgcgctgcgggatctgcccggccgttcggcgtttttggtgacggatcaggcgatggtgaaactggggatggcggagcaggtgacgcgtctgctccaacagcagcaggtgcgctgccgccagtatgacagcgtcgcctccgatccggatatcgccgccatcgtcagcgggatgaagatgatggacgacgactaccccgagctgattatcgctctgggcggcggctcggtgatcgatgcggccaaagcggtgatgtacacgctgtggcactgtcgccaggagcgccggcgtccacgcccctgcttcgtcgcgattcccaccaccagcggcaccggctctgaggtcaccagcttttccgtcatcaaagcgcacagtgaaaagctggtgctggtggatgagtttatgctgcccgacgtcgccattcttgacccgcagctggtggcgtcggtgccgccggtgattaccgctgacaccggcatggacgtgctgtgccatgcgctggaagcctatgtctcacggcgcgccagcgatttcagcgacgcgttggcggaaaaggtggtgcagctggtattccaccatctgctgccctgctaccaacagggcagcgatatgctggcgcgcgagaaaatgcataacgcctcctgcatggccggtatggcgttcaccaacgcctcgctcggggtcacccacagcatggcgcacgccctcggcggcatgttcggcgtaccgcacgggcgggccaatgcgctgctgatgcatgaggccatcgcttttaacgccgatctggacggcgagtgcgccacccccgccgcccataaatatgccgcactggcgcgcctgctggcgctgccggccgccagcgcgcgcgaaggggttaacagcctgctggtggcaatcgccacgctgaaacaggaaatgaacatgccggccagcctgcacgctgccgggctggacgagcaccgcttccaggtctgcctgaacgaaatggcgcatcaggcgctgcatgacggctgcacgccaaccaacccgcgtgaggccagcctcgccgacctcgaaagcatgctgcgccgcgcttaccacggtgccgccggcaacgacccatcatcaagcttacggactttgcgcgacaacgtgcaaggcgaaggaatcaggagatattga

SEQ ID NO: 444196 - DNA, 3405 bp, Serratia marcescens
atggcacactatgcactgacgccgcgcgtacagcagctggcggaacgctttttatcccagaacagcaccatcagcaccgagcgcgccagcctgctggaaacgctgcatgacgacgtggccggccagccggctcaggttcgccatgcccggcgcttcaatgagctggtgaaaaaactgcccggctatatcggcccggatgagctgattatcggcagccagtcctccgccccgcgcgccgccattttccacagcgaaagcgagctgcgcaccccttccgcctttaccgcaccgggccagtcctcacctgactatctggcggtgattaccaaaggcctgagcgccatcggcgccgaaatggaagaccacgccagaagcatcggcagcgcggtcagccgcggcgcactggatgaagccaaccagtgccgcgcgataatttacgcctgcaacgccgtcgttcatctggcgcagaagctggctgacaaagcggaaaatctggccgcggtggaaaaccacccttaccgtcaggccgagctgcgcgaggcggccgccattctgagaaaagtgccggcgcagggcgcaggcagctttaaagaggcgtgccaggcgttctacctgttccagctggcgctgcacctggaaaacggcagctacgcggtcagcccgggcggtttcgacaagctgctgtacggcttctaccagcacgatatcgctcagggcatcctgacgccggcgcaggcctatgagatcgtcgagtgcctgtggttaaaactgtgcgagctgtcagaagtgcgcgccccttgcgagcaggacggctacccgatgttcgacgccatgctgcgcggcgtaaacatcgacgacccggcgctggtcattaacgaactgtccgccatgctgctggccgcacgccgcaacctggaaagcgtcaacccggcgctgcgcgtccggctgtttggctgccggtcctcctccccgacccagcaccatgccaccgccgccgcgcagccggcaccaagcgccggtcaactgatgccgggcctgacgccgcgcctgcagcgcctgcgcgataattacctggatgcccgcccgagcgtctccatcttccgcgccctggcctttaccgaggtggcgaaaaacaacccgggcctgccgaccattctgctgcgcgccaagtcgttccgcgccgcctgtgaaagcgcgccgatcctgatccagccggacgaactgattgtcggccacccgtgcggcaaaccgcgcgccggcgccttctcgccagatatcgcctggcgctgggtgaaggacgaactggataccatgagcacccgcccgcaggatccgttcgagatcgccgaagaagacaaacagatcatccgcgaacagatcgtaccgttctgggaaggccgctcgctggatgagatctgcgaagcgcagtaccgcgaggccggcgtctggtcgttcagcggcgagaccttcgtcagcgatctctcctaccaccagatcaacggtggcggcgacacctgccccggctacgacattctgctgttcaccaagggcatgaacggcatcaaggccgacgcccagcagcgcctcaacgcgctgagcatggaaaacccggaagatatcgacaagatctacttctacaaggcggcgatcgaaacctgcgacggcgtgatgaactatgccagacgcctcgccgacaaggcgcgcgagctggcgtcgcaggagcacgatccggcgcggcgcgccgagctgctgaccattgcggaaaccaacgacaacgtgccggctaacccgccgcagaccctgcaggaagcgctgcagagcatctggacggtggagtcgctgtttgaagtggaagagaaccagaccggcctgtcgctggggcgtctggatcagtactgctacccgatgtaccaggcggatatcgcctccggccgtctgacgcaggagcaggcgctggagatgatgcaggcgtttatcatcaagtgcgccgagctgatgtggatgtccagcgaacagggcgccaagtacttcgccggctaccagccgtttatcaacctgaccgtgggcggccagaagcgcagcggcggcgacgcctgtaacgaactgacctacctgattatggatgcggtgcgctttgtcaaagtgtaccagccgtcgctggcctgccgtattcacaaccagtcgccgcagcagtatatggaaaaaatcgtcgaggtggtgaaagccggcatgggcttcccggcctgtcacttcgatgattcccacatcaagatgatgctgcgtaaagggttcgactttgaagacgcgcgcgactactgcctgatgggctgcgtggagccgcaaaaatcgggccgcatctaccagtggacctccaccggctacacccagtggccgatcgccatcgaatttgtgctcaaccgcggccgcatggtgctgttcgacagctatcagggcctggataccggcgagctgcacacgctgaaaacctatgaggactttgaccgggcagtgaaggagcaggtggcgcatatcgtcaaactctccgccatcggcaccgtaatcagccagcgcgtgcaccgcgacgtcgcgcccaaaccgctgatgtcgctgctggtggaaggctgtatggaaaaaggcctcgacgtcgccgccggcggcgcggtgatcaaccacggccccggcctgatcttctctggcctcgcgacctatgtcgactcgatggccgccatccgcaagctggtgtatcaggatcgtaaatacaccctggagcagatccgcgatgcgctgctggccaacttcgaaggctatgaacagctgcgccgcgactgtctgaacgcgccgaagtacggcaacgacgacgacagcgtggatcagttcgccctcgatatcaccgagtggacggagcgcgaatgccgtcagtacaagatgctctactcgcgcctgagccacggcaccctgtccatctccaacaacacgccaatcggcgagctgacggcagcgacgccgaacggtcgtctggcctggatgccgctgtccgacggcatcagcccgacccagggcgcggacaaacaggggccgaccgccatcatcaagtccgtcagcaaaatgaacgtggagaccatgaacatcggcatggtgcacaacttcaagttcctcaaagggctgctggacacgccggaaggcaagggcgggctgatcaccctgctgcgcaccgcttcgattctcggcaacggccagatgcagttcagctatgtcgataacgaggtgctgaaaaaagcccagttggagccggagaaataccgcgacctgatcgtgcgggttgcgggatacagcgcctacttcgtggagctgtgcaaagaggttcaggacgaaatcatcagccgtacggtgattgagaagttctga

SEQ ID NO: 444197 - DNA, 948 bp, Serratia marcescens
atggataacatggagcaaaagggtcgcatctttaacatccagaaatactcgatctatgacggagacggtatccgcaccctgatttttttcaaaggctgcaacatccgctgcgcctggtgcgccaaccctgaagggctcagcagccagtttcaggtgatgtactcccgcgacaagtgcgtggactgcggtcagtgcgtcgatgtctgcccggtgggcatccactcgatgatcaaaaacccgcagggcgacccacagcatcgggttgaccgtcagatcgactgcatcggctgccgcaagtgtgaagaggtgtgcatcagcgacgcgctggacattatgggcaaagacgtcacggtgcgggagctgatggacatcatcctgcaggacgtcgacttttactacgcctccggcggcggcgtgacgctgggcggcggcgagctgagcctgcaggcggactttgccgtcgcgctgctgaccgaatgcaaaaaaatgatgatcaacaccgccattgagaccaacggcaccacgccgctggccaactacgaaaagctggcgacctgcaccgatatgttcctgttcgacatcaagcatatcgacagcgaccgccaccgcgaactgttcggcgtcggcaatgaaggcgtgaagcgcaacctggagcgcctggtggagcttggcgcccatatcgtggtgcgtatgccgctggtgcgcggttacaacgactcctacgacgccatcaccggcgcgattgactatgtcaccgcgctggcgcggcacggcaatatcagccgcatcgacgtgctgccttaccaccagctgggcaacaccaaatacgaccggctcgacatgatctatcccattcagcacgaccccagctacagcgagcaagagctggatcaactggcggcgtttttccaacgctttgatttcgacatcagactggtaaggcactaa

SEQ ID NO: 444198 - DNA, 438 bp, Serratia marcescens
atgaagttaagcctgggagtcattgaaacctacggcctcaccgccgccattcaggccgccgacgcggcctgtaaatccgcctcggtcacgctgctgggttacaagaagatcggcgccggtctggttaacgtattcctcggcggcgagatcagcgcggtgaaaagcgccgttgacagcggcgtcgccgccgtcggccagccgacgtttatccgcggccggctggttatcgcccgtccgggcgaacaggtggtggcactgctgaatggtctggcgggcaacgccctgacgccatcagacgacgatgccgccatcgcaccgagcgcagccgccgcagccgctccggccgacaaacgggacgatgccccgcagccgaccgccgaggctaaacaacccgcgcgcaccgaaaaccgggccggcggcaaaaaggatcagaaataa

SEQ ID NO: 444199 - DNA, 630 bp, Serratia marcescens
atgtttaaagcatcgttactggaaaaggtgcgtcacaacctgacgcagccgctaccgtcggagatggcaatcccggttggcgtctccaaccgccatgtccatctgtcgcagccggatatcgaggcgctgttcggcccgggttaccaactgacgccgctgaaggaactgcgccagccgggacagttcgccgccaaagagtgcgtgaccatcgtcgggccgaagggcgcgattggcaaggtgcgggtgctggggccggcgcgggacgtttcgcagctggaaatctccaaggccgactgctttaccctcggggtgaaagcgccggtgcgcgagtccggccagctgcaggcctccggcgacgcaatgttggccggcccggcgggctatgtcgcgctgcgttcgcaggtgatttgcgcccagcggcatatccatatgtcaccgctggacgccgcccggctgggagtgagcaacggtcaggcggtgcgggtcaaaacggcaggccagcgcgcgctggtcttcgaccaggtggtggtgcgcgtgaaagacagctttgcgctggaactgcacattgacaccgatgaagccaacgccgccggactggcctccggcgacagcgtcacgctggcgggctga

SEQ ID NO: 444200 - DNA, 675 bp, Serratia marcescens
atgatgcaagacgacactctcgaccgcatcgtgaatgccgtactgatgcgtatgcggccgcggctgttgctgctgctcaccgccgcagacggctaccacgaaatcattctggcgcgtttgcagcactgtcgtcacttcgcgccgcaggtgctgtttgccgacagggcgcaggctgttcacccggcagacgcctggcggcagctgggccacgttgtcaccctggaggagatggcgcaagtcggcgcgctggaaaacatcgatcgcgtcatcgcacccttcctggatttcgccaccgcagcggaagtcgcccacgacctgtttcagtctgaagccgctcgctgcattcagctggcgcggctgcataacacgccggtgctggcgctggattacaactgcaatccgcacagcgaattaaaccggctcaaagggcttggccgcagcgcagacgcgcactcgctggcggacaatctgccccggctggcgcagcgcggcatacagttctgcagcctggatcagatgctgtcaccggcgccgccgcctgcggccgctactggcgccgatgctgaaaccggcggctatatcaccctcagcgaactcaaacagcgcaacggccgctgcccgccgggcgccaggctgaccgatctggcgctggaataccaacgaggaagccaataa

SEQ ID NO: 444201 - DNA, 363 bp, Serratia marcescens
atgtcatcgaaagcgaagtcctggctctggatgttgttggtgatagcgtccgagacctcagccacctcaacgttaaagatgttcgataacagcgagggcaccaccaaaaccctgctgctgggccttatcgtcgtgctgtattgcgcctgttattacgccctgtcgaacgcggtgaagtacatccccgtcggtctggcctacgccacctggtcgggcaccggtattttgctggtgtcgacgctgggcatggtgttttacggccagcatcccgatatcccggcgatgatcagcatggcgattatcgccagcggcatcgtgattatgaacctgttttctaaaatgggctcggcagagtcagagtaa

SEQ ID NO: 444202 - DNA, 330 bp, Serratia marcescens
atgtttaatattggctttctgtggctggcattgtctatcggcgccgaaatcaccggcacctcgatgattaaaaaaaccaacagctttaagaaattcggcccctctctgctggtgatctgtgcgtactgcctgtgttatttcgcactgacccgggcgatgggctatatgccggtaggggtggcctattcgctgtggtgcggctttggcatcgtcggcgtgaccgcggtatccatgctgctgtataagcaaaaacccgacctgccggccatcttcgctatggcgctgatcatcggcggcggcatcatcatgaacaccttctcgcagatgtag

SEQ ID NO: 444203 - DNA, 504 bp, Serratia marcescens
atgacaaccgcaacacccgtgcgcctgcaggtgcgccccatcacggcggccgataacgccgccatcgcccaggtgatccgcgaggtgtccgccgagcacggcctcactgcggacaagggctacaccgtttccgacccggatctcgatgcgctgtatcagctgtacagccggccgcgcagcgcctactgggtggtggaactcaacggccaggtggccggcggcggcggcgtcgctccgctgccgggcggcgaggcggacgtgtgcgaactgcagaagatgtatttcctgccatcgctgcgcggacaggggctggcaaaacggctggcgctgcaggcgctggacttcgcccgtgaacagggcttcctgcgctgctatctggaaaccaccgccagcctgacgcaggccgttggcctgtatcagcaccttggctttgtccatatcgaccatgccatgggccacaccggccacggcgactgcgaagtcaccatgctcaagatgctgtaa

SEQ ID NO: 444204 - DNA, 1608 bp, Serratia marcescens
atgtcagacaaccgttttgattacatcatcgtcggcgccggctcggccggctgcgtgctggcggcgcagctgatccgccgcacgcaggcgcgggtattactgctggaagccggcggcgacgacaataatctgtttatcaaaatgccggccggggtggcgaagattatcgccaagaaaagctggccctatgaaaccgaaccggaaccgcacgccaataaccggcgcatgcagatcgcccaggggaaagtgctgggcggcagcagctcggtcaacggcatgatctatatccgcggccagcagcaggacttcgacgcgtgggagcaacagtacggctgccacggctggggctaccgcgacgtgctgccttacttcaaacgcgcggaggccaacgaaagcctgtctgacgcgtatcacggcggcgacgggctgctgccggtcagtgaaaaccgctatcgccacccgctcagcatggcgtttatccgcgccgggcaggagctgaacctgccctatcgcaacgacttcaacggcgacagccagcacggcgtcggtttctaccagaccaccacccgcaacggcgaacgcgccagcaccgcgcgcacctacctgcaggcggtgcgtgaccagcagcggctggtggtgaaactcaacgcgctggcgcaccgggtgattattgaagacaacgtcgcccgcggcgtggtgtacagccagaacggcggcgcggaggtgagcgccttcgccgaacgggaggtgattatcagcgccggcgcggtcggctcacccaaactgctgatgctgtcgggcatcggcccgcgcgcgcacctggaatcgctgggcatcacgccgctggccgacctgccggtaggcaaaaacttccacgaccatttgcatatgtcgatcaacgccagcacccggcagccggtcagcctgttcggcgccgaccgcggcctgcaggcgctgcgccacggcgcacagtggctggcgttccgcagcggcgtgctgacctccaatatcctggaaggcgcggcctttgccgacagtcgcggcggcgatcgtcccgacgtgcaggtgcacttcctgccgctgctcgacggctgggacgatgtgccgggcgaaccgctgcccgaaacccacggcattacgctgaaggtcggctacctgcagccgaaggcgcgcggcgaggtactgctgcgcagccgcaacccggccgatgcggtcaagctgcacgccaactaccttggccacccggaagacctggccggctgcgtgcgcgcggtaaaattcggcctgcgttttctgcagaccgcggcgctgaagccattagtcaaagaggtgctgatgccgcagccggactggcagcgcgatgacgcgcagctggaggagtttgtgcgcaacttctgtaaaacggtgtatcacccggtgggcagctgccgcatggggcagcacgccacggattcggtcaccgatctgcagctgcgggtgcatggttttgagcggctgagagtggtcgacggttcagtgatgccgcaggttaccagcggcaacaccaatgcgccgaccatcatgctggccgagaaggccgtcgatctgatcctcggcgcgccggattaa

SEQ ID NO: 444205 - DNA, 762 bp, Serratia marcescens
atgaattacccatcgttacttgccccgattctctcttttctgcactgtgaaaccccggacggctggatcgacgccgcgcgccggccggaaaacctgtcgctgctgctgaccgaccatctggtgtgcgagcttaaggccgcccagaccggcatgtggctgatccgccgctacgtggtggacaaggcgagcggcgatgcgctgctggcgctgctgaagccgtatgagacgtttgtgcatgaagagcagggcgtgccggacgcgctgttcaaccagagccagttcacccggaaactgctgccgaagcagggctccgcctacggccaggatctggtggataaaatggtgctgctgattaaagaagagctgcaccacttttctcaggtgctgggaattatgcagtcgcgcggcattgcctataagaagattaccgccagccgttacgccaagcggatgatccgcgaggtgcgcacccacgatccggcgacgttgatcgataaactgatctgcggcgcctatatcgaggcccgctcctgtgagcgctttgccaagctggcgccgcatctggacgacgagctgcaccgtttctacctgtcgctgctgcgttcggaagcgcgccactaccaggattacctgacgctggcgcagcagatcgccggcgaggaagatatcagcgagcgcgtcgcctacttcggccgtctcgaagcggatctgatcctgtcgccggacagcgagttccgcttccacagcggcctgccggcttaa

SEQ ID NO: 444206 - DNA, 1020 bp, Serratia marcescens
atgagcagcataaaccctttttaccagcggcattttttacgcttgatggatttcaccccggcagagctgcaggcgctgctgcagctggccgccgatctgaaacaggcaaaaaagcagggtcgtgaaacccgccgtctgcaggggaaaaatattgcgctcatctttgaaaaagactccacccgcacccgctgcgcgtttgaggtcgccgcgttcgatcagggcgcgcaggtcacttatctcggcccgagcggcagccagatcggccataaagagtcgatgaaagacaccgcccgggtgctggggcgcatgtatgacggtattcagtaccgcggctacggccagccgctggtggaaacgctggcgcactacgccggcgtgccggtctggaacggcctgaccgatgagttccacccgacccagctgctcgccgacctgctgacggtgcaggaacacctgccgggcaaaccgctgtcggcggtgaagttcgcctacctcggcgatgcgcgcaacaacatgggcaatacgctgctggaggcggcggcgctgacgggtatggatctgcgtctggtagcgcccaaggcctgctggccgcaggcggaactggtggcggagtgccaggcgctggccgaacgccagggcggtaaaattaccctgaccgaagatatcgccgtcggggtgaaagacgccgacttcctgtataccgacgtctgggtatcgatgggcgaaccaaaggaagtgtggcaggaacgcatcgcgctgctcaaaccttatcaggtcaatatggcgatgctgcgccaaaccggcaacccgcaggtcaagttcctgcactgcctgccggcgttccacgacgaccagaccacgctcggcaaacagatggccgagcagtacggcctgtacggcggcatggaggtcaccgacgaggtgtttgagtcgccgcacagcatcgtgttcgatcaggcggagaaccgtctgcacaccatcaaggcggtgatggtcgccaccctgagccgtgaagggtaa

SEQ ID NO: 444207 - DNA, 2988 bp, Serratia marcescens
atggcccatcacgtattggatgcatttatccaacaggtttccacgtttccaaatagcccggcaattatagataaagacgaaaatataatgagttatcaacagctcgatacgctcagcgatcgtctgtgcgccttgctgcaacagtctggcatcggccccggcgacctggttcctctgctggcacagcgtacgccgcagctgattatcggcatgctggcgattgccaagagcggtgcggcttatattcctctggacagcagctatcctgagcaacgcatcaaatacattatcgaacaaagccgctcaccaattatattgtccgatcacaaacataatacgaaaataaatcagtacgacagcgacaaaataattcacatcgatactattccaaacaacatagtattaaatggtcggcaggttgatattccgcagcacacactggcgtatgttatttttacctccggcactaccggcacgccaaaaggcgtgatggtcgaacaccattcgctgtggaatatcatccgctggcacaatcaacaattcgccatggacgccgactgccgcaccacgctgaacgccggcatcggttttgacgtcgcgcaatgggagatttggtcggcgctgaccagcggcgccgcgctgtgcctgcctgcggaagatctgcgcctgcagcccgccgcactgctgcagttttttgccgaccgacggctgacccacgcctttgtgccgacggtgctggtgccggatgtggtgcgcgccgacaagccggcgcaactggtgctgcgctacctgttcaccgccggcgaaaaactcgccccgctcgacccaacgccgctcggcagcccgctgattgactactacggcccgaccgaagcgaccatcttcgccacctataattcgctcacctgcgccgccgatgccgccaccgccagcatcggccgcccggtcaccgacacggaaatctttattctggatgaacagctgcaaccagtcagcggcgatacgcccggcgaactgtttatcggcggcagttgcctggcacgcggctatctgcataacccgcagctcacggccgaaaaatttctccagcccgccgggtttaacggtaaacgcctgtaccgcagcggtgaccgtgcccgctggctggcggacggtcgtattcagttcctcggccggctggacgatcagatcaagatccgcggcaaccgcatcgaactgggcgagattgagagcgtgataatgcagacgcccggcgtcaacgcggcggtcgcgctggtgacgaatccagagcatgccatcgataaaaaaattatcgcctgcctggtggccgacgccgcccagccagcgctgattgaggccgtaaaagcacggctaaaaaagacactcccatcttacttcctgccggccgattacctgctgctgccgcgtttgccgcttaacgccaacggtaaaaccgacaaggcggcgctgctggcacactacgccgccaaccgcactgccggcgacgacgccctgccgaacgccgcacaggaacaggtcgccgccgtctggcgcgagctgctggaactcagcacaatcggtgccgatgacaacttctttgacgtcggcggccattcgctgctggcggcccggctggcggagagcatcggccaacggctcggggtgaaaacctatgtgcgcgatatttatgaataccccaccgtcaccacgctcaccaccgcgctggcgcaacgcgccgggcaggcgcagtcggagctggacagcgaaccggtgcgcgcgttgcaggaagatgcaaaattaacgccggacgtccatatcaatccacactatgaaccgcagcaactgaccgatccgcgcgccattctgctgaccggtgccagcggatttgtcggctcacacctgctggcggatctgcttgccacgcgtcaagcggatatttactgcctggtgcgcgaaggcagcgccgagcaggccggcaaacgcctggatgcggtactgcaaaaacaccacatcgtcctgagcaccgaacagcgcagtcgggtatatgtcgtgcccggcgatctggcggaaccgcatttcgctctgcccgatgagcagtatcagcagctatgccgacagatcgatctgatttatcactccgccagcgcggtgaactttatccagccctactcctacatgaagcgcgacaatgtgcagggcctgaacgaagttatccgcttcgccactcatctgcgcaccaaaccgctgatgctgctgtccaccatctccgtctatagctggggacatctgcacaccggtaaacgggtaatgctggagagtgacgacatcgaccagaacctgccggcggtgctcagcgatcttggctatgtgcgcagtaagtgggtaatggaaaaaatcgccgatctggcggcgcaacaagggttaccgctgatgaccttccggctgggttacgccaccagccacagccagagcggcgtcagcgccgactatcagtggtggggacgcctggtgaaaacctgcctgagcagcggcacggtgcctgagctgcatgacctgcgcgaaggcctgaccacggtggattatatgacgcgcaccattgcgcatatcagccgtaacccacaggctctagggctgaaattcaatctgattcatcaggatagcaacaacctgacgctgcagcagttcttccagcggctggagcactatttcggttaccgcttccgtcagatgccgtaccacgactggctggcgcagtggcagcatgatgaaaacgcgcctctgtacccgctgctcagcctgtttcgcgacaacatgtcgcatggccaggcggcggtgcaactgtatcagaatacctatcagtgggactgcagcaacgtgaagcgctttctgaccggcagcggcattgaggagccgcgcttcacccggcaggagctggaaaactacctgtaccggctcaccggcaaagtgccgatctcgctgacggcatag

SEQ ID NO: 444208 - DNA, 2391 bp, Serratia marcescens
atgcataaaccgctttgttatacgctgcttgcggcgtcgttactttgcccattgggcgcgctggcgcagccggcgggcaaactgccgctgatgccgtggccgcagcaggtggatatcgcccagccgcagggcaaactggtgctgacgccccggctgaacctgaagattgaaggcgataatctgggtgacgcgccggcgcgctggcgtcagcgcctggaactgcagaccggctggacgctggcgccgccgacggcgcagcaggccagcaatattacggtgaagatccaacgtcaggtctcggcgcagccgctgccggacagcgatgaaagttaccaattatcggtgacgccgcagggggcgacgctgaccgccgccacccgcttcggcgcgctgcgcggcatggaaaccctgctgcagctggtgcagaccgacggacacaacaccttcttgccgctggtcagtatcagcgacaagccacgctttgcctggcgcggcgtgctgctggattcggcgcgccatttcctgccggtcggcgatattctgcgccagctggacggcatggcggcggccaagctcaacgtgttccactggcacctgaccgacgatcagggctggcgttttgcctccgtgcgttatcccaagctgcagcaactggccagcgacggccagttctatacccgcgaacaaatgcagcaggtggtggcctacgccgcggcacgcggcatccgcgtggtgccggagatcgatctgccgggccatgcttccagcattgcggtggcctatccggaactgatcagcgcgccggggccataccagatggagcgcgagtggggcgtgcacgcgccgacgctggatcccggcaacgagcaggtgtatcagtttattgatgcgatcgtcggcgagctggcgacgatcttccccgatccctatgtgcatatcggcggcgatgaggtcgatcccagccagtggcagcagtcgaaaacgctgcaggcgtttatgcgccagcatcagctggcggatgcccatgcgctgcaggcctggttcaaccagcggctggaaaagatcctcgaacagcaccggcggcgtatggtgggctgggatgagatctatcatcctgcgctgccgcgcaccattctgatccagtcctggcaggggccggactcgctgggcgccagcgcgcaggatggctatcagggaattttgtccaccggcttctacctcgatcagccgcagagcaccgcctatcactaccgcaatgaggtgctgccgcagccgctgagcgtggaaacaaaggcggcggccggcgagcaggcgcaaagctggcgctttgacattccgcgcctgaagggcagcgcggtgacgggcagctttaccctgattaaaggccggcagggctggcgcggctttatcgactttgacggcaaaacgcgccgcgccctgcatgatattgtctggcgcacgccgcagcaggtgagcttccggctggatacctggatgggcgatacccgtccggtgctgaccctgaaaaaggacacgctcagcggctatacgctgctgggcaacgtacgttatcccaccagcggcagccgactggatgcggcgccggcgggtaaaatgccggtggtgccgggtgccaaacagcaggccaatattcttggcggcgaggcggcgctgtgggcggaaaacgtgcgcgcgccgctgctggacctgaagctgtggccgcgcgccttcgccgtggcggagcggctgtggtcggcgcaggacgtcaccgacgagagcagtatgtaccgccgtctggcggcggtggacgcctggtcggtggtgtccgtcggcctgcagcagcatgcggaaaccgcgcgtgaattcacccgtctggccaacagcgtcgagattatgccgctgcagacgctggccgaagcgctggagccggcgcagtattacacgcgtcagcatctgaagttccaggcgggcaactaccaccagtttgaaccgctgaaccgcctggcggacgcgctgccgccggagagccgggcggtgcgcgagatgcatcagcaggtggaagcgctgctgcgcgatcgcgataaccgcgtggccgccgaggcgctgcgtagccgcctgctgcgctggcagcagaacgcggcgccggtgaaacggctgattggcggcaacgtgctgatgaaagatctggcgccggtggcgcaggacgtcaacgcgctggcggatctggggctgaagctgctggagcgctggcggcagggtaagccgctgggcaagcatgaggcggagcaaatccagcagcagctggatgcggcggcgcaggtgcgcgatgagctgatcatcgccgcggtgtatccgttggaaaccctgctgcgcgggctgacggtacgctga

SEQ ID NO: 444209 - DNA, 678 bp, Serratia marcescens
atgaggcggcatgcgctggtaaccggcgctagctccggcataggcgccgccattgtccagcagttgctggatgacggctggcaggtgaccggtctcagccggcgggacgcggtgcgggagcaggccggctatcgttcccgtcaggtcgacctgtgcgacagcggggcgctggcggcgacgctgtccgatctgccgccgccgcaggcggtggtgcatgcggcggggatgatgcatgctgcaccgctcggcgagctggacgcagcggcgagccggtggttgtggcagctgcacgtactggcggcggaaacgctggtgacgacgctggcgccaaacatgtctgccggcggacgtatcgtgctgctcggcagccggacgtcacggggcgccgccggacgcagccagtatgcggcgaccaaggcggcgatggtggggatggtgcgtagctgggcggcggagctggcaccgcgcggcatcaccgccaacgtggtggcgccgggcgcgacgcagaccccgatgctggagcagcccggccggcaaagttcgccgccgaaactgccgcccatcggtcgctatattcagccgcaggaagtcgcggcgctggtggcttttctgctttcggcgccagccgccgccatcaccggccaggagatggtgatatgcggcggcgcgtccttgtaa

SEQ ID NO: 444210 - DNA, 465 bp, Serratia marcescens
atgatcgccggtaccctgcatgacctgcggctgcccggcttgccggccagcctgtatcgcatcctgaaccagccggcccacagcctgccggcgctgatggccgccgcggacgggcggttggagggcgagggttggttctgccatatcggcgtggcgcataccgccccgccggagagccgtcacacggagtatcaccggcagtatctggatattcaggtggtgctggaaggggaggaaatcatccgtttcgccccccggcgggcggtcggcggcagcgagaaaaaaccggatctgtttatcgtgccgcagccggaactgccgcaccggctgcatctgcgacagggggactttgccgtgttttatcccggcgaggcgcatcaggcgctgtgcgcggtcggccaaccggcgccggtgcgtaaagcggtgtttaaagttgctgttcacctgctggaggctgacggatga

SEQ ID NO: 444211 - DNA, 1197 bp, Serratia marcescens
atgagtcaggaaaccctcaccgttgaacgtaccggacgggtaagccccgtcgcgggcgatgccgggcgtcagagcgcgatgctgccttctgcgtgtccgcagaaccacgccgccaatctgctgccgctgcccaatggcgatctgctgtgcgtctggtttgccggcacgcaggaaggcattgccgatatttctatttacagttcgcgcctgccgcagggccgggagcagtggaccccggcggtcaaactgtcggacgacgcatcccgctcagagcaaaacccggtactgttcctcgatccggacaacgtgctctggctgttatggacggcgcagaagtcgggcaaccaggatacggcctttgtgcgctaccgtcagtcgcacgatttgggcgccagctggggtgagatcgcgacgctgctggagcagccgggcacctttatccgccagccgatcgtggtgctggacaacggcgactggctgctgccggtcttctactgccgcaccatgccaggtgagaaatgggtgggaaacaacgacgacagcgcggtgaaaatttccggcgacaaggggaaaacctggcgcgatgtggtagtgccggacagcaccggctgcgtgcatatgaatatcaccctgctgcaggatggctctctgctggcgctgttccgcagccgctgggccgattttatttatcagagtcgctcggcggacggtggccgcagctggagcgcaccgcagccgacggcgctgcccaacaataactcctcgattcagctgaccacgttgcgtaacggcgatctggcgctggtgtttaacgccatgagcgccagcggcgcgctggaacgcagggcgtcgctgtatgacgaaattgaggatgaggaggatgatgctggcacggaagcggtggttccgacgccggacgacggccgcagcgcgttctggggcgcgccgcgtgcgccgatgacgctggcaatctcgcgcgacggcggccgcagttggccgtatcagcgcaatcttgatgaaggcgacggctattgcatgaccaacaactcgcgtgaaaagctgaaccgggagttttcttacccgagcattaagcagggtgccgatggtcggctgcatattgcctatacctatttccgccaggcgattaagtacgtgtgtgtggatgagcgctgggtcaccggcgaaggagcgccatga

SEQ ID NO: 444212 - DNA, 1416 bp, Serratia marcescens
atgaaagagtttacggctgaaggtaccctgatcatcgtcagcatcgtcgtggtctatatcctgtttaccacctggctgacctaccggctgcgcagtaaaagttccggcgattttatggaaggctcgcgcgccatgccggcctttatcgtcggcgtcctgctgatgtccgaatatattggcgccaaatcgaccatcggcaccgcgcaggcggcgtttgaggatggtttcgccgcctcatggtcagtgatcggcgccgcgattggtttcccgctgttcggcctgctgttggtcaaacggatctataacacggggaaaatcacgatttccggcgcgatcgccgagaaatacggtaactccaccaaaaacattatttcgctgattatgatttacgcgctgctgctggtgaacgtcggcaactatgtgagcggcgctgcggcgatatccacggtattgaaggttaatctgccggttgcggcgttgattaccgcagtggtcagcaccttctatttcgccttcggcggcatgaaggggatggcctgggtcaccctgctgcacagcgccattaaatacttcggcattctggtgattctgggggtggcgctgcatatgaccggcggcattacgccgatggtagagcagatgccggacttctactggacctgggacggcaatatcggcgccagcaccatcgtggcctggctgatcggcactatcggttcgattttctgcacccagtttgttatccaggccatctcctcgactaaaagcgccgcttcggccaagcgcgccacctggattgcctttcttttctgtttgccgatcgccatcgccatcgcgattatcggcgtcgccgccaagttcctgcacccgaatatcgatagcctgtacgccctgccggtatttttgcaggatatgagcccgtggctggccgggttggtgacaacatcgctggtggcgtcgatttttgtcagcgtcagcaccgtggcgctggcgatcgcttcgctgatcgtgaaggacttctatgtgccttaccgcaatccgacgccggagcgcgaattcaaaatgacgcgctggctgtcgctgctgattggtttcctgccgctgatcttcgtgctgctggtgccggaagtgctgaaactctctttctttacccgcgccatccgcctgtcgatttcggtggtggcggtggtggcgttctatctgccgttcttcaagagcgcgcgcggtgccaatgccgggctgatcggcgcctgcgtgatgacctccgtctggtatttgctgggcgatcctttcggtatcaataacatgtatatcgcgctgattacgccggcggtgattatgggcattgatatgctgctgccaggcaaggccgcaggggcgaaagttaaacaaaatattcaaaacgatggagcctaa

SEQ ID NO: 444213 - DNA, 885 bp, Serratia marcescens
atgacaagaaaaattgacggggtgctgacggcgatcgtcacgcctttcgatgcgcggggcgattttgacccggaggcgatgcgcgagcaaatccggcgacagctggcggcgggcaacggcgtcttttgcggcggcaccaacggtgagttttttgtgttgaatgagcaggagaagctggcgctgacgcaaacctgcgtggatgaggtcaatggttcagcgccggtggtggcgcatatcggcgaaatatcgacgcgcgacaccgtccggctgggcaagcaggtggcggcgctcggcgtggacgcggtctcggtgattacgccctattttatcccgctgacgcaggatgaactgatcgggcactatctgcaggtcgccgatgctctggagacgccgattttcctctacaacattcccgcgcgcaccggcaataccctacagcctgagacggtacgtcgtctggcgcagcacccgaatatcatcggtatcaaagacagcgccggcagctatgacagcctgcggggcttcctgcacgccgccgaaggcattccggggtttgaggtgctcaacgggccggactcgctgattcaccagggctttgtcgacggctgttccgcctgtatttccgggctggcgaacgtggcgccggcggaaatcaacgccatctggcgacgttttcaggccggcgatatcgacggctcgcggctggcgcaggaaaacgtcaccgggctgcgcagcgagttgtacagcgtggccttctcgccggcggcggtgaaaaaagcgctgacgctgctgggctatgtggtgggtgaaagccgttatgcggtgtgttttgacgccgatgacgaacggcgcatccgccagattctggatacctatttgcgctaa

SEQ ID NO: 444214 - DNA, 1152 bp, Serratia marcescens
atgaacatcaacagcacccttataagcggctaccaggcattaaatgacatcggctatctgttggcgggaaaacgcagcgttctgctggtcacggataaaaacatcgcgcgcatcacaacggcgcagcagctgatgacgcagctgcgcgccagcgactgcgcgttgaccgtcgtggatgacgtcccgccagagcccagccagcatgatgtcgccgctgtcctgcaggcgctcggcacacgggatatcgatctggtgattggcctgggcggcggcagcgtgctggacgttgccaaattgctctctgtactgtgcgttgccgaagcgccgacgcttgaggcgttgttggccggggaaaaaccgcagcggcgcgtcacgtcgctactgattcccaccaccgctggcaccggatcggaggctacgcccaacgccattttggccattccggagcaggagaccaaagtcggcattatttctccggtcatgctgcccgactatgtggcgttgatcccggagctgaccaccagcatgccggcgcatattgccgcctccaccggtattgacgccctgtgccatctgattgagtgctttaccgccaccatcgctaatccggtcagcgataactacgccctgatcgggctgaaaaagctgttcgccagtctggaaacttcggttgaggcgccggaaaacctggccgccaagctcgatatgctgtgggcgtcctattacggcggcgctgctatcgcccatgccggcacgcatctggtgcatgccatgtcgtacccgctgggcggcaagtaccacattccgcacggcgtagccaacgctatcctgctggtgccgtgcatgcgttttgtgcgtccggcggcggtgagcaagttcgcccaggcttatgacctgcttccgcaggcggactgcacgctgagcgaggaggacaagtcacacgcgctggtgacgtatttttccgccctggttaaacgtttgcggctgcctgccagcctggatgagctgggcatcggcgccgatcatctgccgcatctggttgagggggcgctgaacgtacagcgtctgatgaagaatgtaccgatgtcagtcagcgccgccgacgtgcgcgatgtctacctgacgctgtttccgggattacaggctaaataa

SEQ ID NO: 444215 - DNA, 147 bp, Serratia marcescens
atgacctggaacagagcgctgccggagacggccggtaaatttagcggcgcagacgtcgtcaatctcggcgccgccctgccgtttatccgcgccgcaacggcgcatttgatatcgtctggacagctaaagagaagtctgagagcatga

SEQ ID NO: 444216 - DNA, 762 bp, Serratia marcescens
atgaagggacaaagtcgcctcgatcagattatggattatctgaaaagccataatctggttaccgtagatcagttggtcaccgcgatttccgcctcgccggccaccattcgtcgtgacctgataaagctcgatcgcgagggggtcatcagccgcagccacggcggcgtaaccctgaatcggtttattcctgcccagcccaccacgctggaaaaacagcagcgcaaccagcgggaaaagcaggccatcgcccaagcggcggcgcagtgggtcaaagccggcgatagcctggtgctggatgccggcaccaccatgctggaactggcgcgtcagttgacgcatctgccgctgcgggtgatcaccgccgacttgcgcatcgcgctgtttttatccgagttcaagcagattgaagtcacgattatcggcgggcgcatcgatgaaagcagccagtcctgcatcggcgaccacggccgccgcctgctgcgcggcatcaatccggatatcgcctttatcagctgcaactcctggtgcctggaaaaaggcatcaccgcgcccaccgaagaaaaagccggcctgaagcaggatctgctggccaacgcctcgcgccgcatcctgctggcggacagcagcaaatatggcgcctggtcgctgttttgcgcctcgccgctggcggcgctgacccatatcatcaccgatggccgtctgtcgccggagctgcagcagacgctgcatggccagggctttacgctcaccctggcggagtaa

SEQ ID NO: 444217 - DNA, 948 bp, Serratia marcescens
atgcaaaaccggctgaccattaaggacatcgcccgcctcagcggggtaggaaaatctaccgtttcacgcgtgctgaacaatgaaggcagcgtgagccagcaaacccgtgagcgcgtggaggcggtgatccgtcagcaggggttcaccccgtccaaatccgcacgcgccatgcgcggccagagcgataaggtggtcggcattctggtgtcgcgcctggattcgccgtcggaaaatcaggcggtacgcaccatgctgccgctgctctaccagcacggctatgacccgatcgtgatggaaagccagttcgacagccaactggtgcaggaacacctgcacgtgctggcgcagcgtaacgtcgacggggtgatcctgttcggctttaccggcctggaggccgagatgctgcagccgtggcaggagaaaatggtggtgatggtgcgcgagtatcagggcttctcttcagtctgctacgatgatgccggcgcggtgaacctgctgatggaccggctgcgccagcaggggcaccgcgatatcagctacctcggcgtccggcagtcggacgccaccaccggcgcgcgccgctatcaggcctatctggacgcctgccagcgccacggtctgaccccgcacgcggcgctgggcgaactcagctaccagagcggcttccagctggcggcggaggcgatcgtcccgcagacccgcgcgttgatctgcgcgtctgacagcatcgccctcggcgcgatcaaatatctgcagcagcagcagatcgccgatattcaggtgtgcgccatcggcaataccccgctgctcagcttcctgttcccggagacgatgtcggtggagttcggctacggcagcgcaggtgtgcaggcggcgcagcaactgctggcccagcttagcggcgacgcgccgatccgccgcatcgtggtgccgagcaaactctcttaa

SEQ ID NO: 444218 - DNA, 1665 bp, Serratia marcescens
atgagcaacccaatcccctggtggcaaaacggcgtcatctaccaaatctacccgaagagctttcaggacagcagcggcaacggctacggcgatctggccggcgtgatccagcggctggattatctgcaggatctgggcgtcgacgccatctggctgacgccggtctatctctccccgcaggtggataacggctatgacgtcgccgactactgcgccatcgacccggcctacggcagcatggaaaccttcgaacaactggtggcggccgcgcaccagcgcgatatccgcatcgtgatggatatggtgttcaaccatacgtcgaccgagcatccgtggttccgggcggcgcaggatcgccacagcccgcagcgccagttctatatctggcgcgacggcgctgaggggacgccgccgaataactggcgctccaagttcggcggttcggcctggcagtggcacgccgacagcggtcagtattatctgcacctgttcgccaccgagcaggcagatttgaactgggagcacccgccggttcgcgaggagctgaagaaaatctgccggttctgggcggacaaaggcgtcgacggcctgcggctggatgtgatcaatctggtgtccaagcagcaggatttcccggacgacgcgcacggcgacggccggcgtttttacaccgacggcccgcgcattcacccattcctgcaggaaatgagccgcgaagtgttccggccacgcggtctgatgacggtcggcgagatgtcgtccaccagcctggaacattgccggcaatatgcggcaaacggcggcgaagagctgtcgatgacctttaactttcaccacttgaaggtcgattacgccaacggcgaaaaatggacgctggcggcgccggactacgtggagctgaagcagattttccgccactggcagcagggcatgcacaaccacgcctggaacgcgctgttctggtgtaaccacgatcaaccgcgcattgtctcgcgcttcggcgacgaccatgcgctgcgcgtgccggcggcgaagatgctggcgatggtgctgcacggcatgcagggcacaccctatatctatcagggcgaggagatcggcatgaccaatccgcgctttgcgcgtattgatcaataccgcgacgtcgaaagcctgaatatgtacgccgaactgcgcgccgcggggcgcagcgacgccgagctgctggcgatactggccagtaaatcgcgcgataacggacgcacgccgatgcagtggaatgccggacccaacgccggcttcagccagggcatgccctggatcccctgcgccgacaactacctgcagattaacgtcgaggcggcgctggccgatcgggattcggtgttttacacctatcgccacctgatcgccctgcgcaagcagtatccgctgctgacccacggcgactatcaggatctggcgccggcgcacccggcgctgtggtgctacctgcgcagctggaacggtcagcggctgctggtggcggccaacctgagcgcccggccgcaggcgtgggacgcggccggcgttacagcatccgatctgtggcgcgtggcgatcggcaactacgccgatgcgccgccgctgccgcaaccgctaaccctgcgcccgtttgaggcggtgtggtggctgctggaggagtga

SEQ ID NO: 444219 - DNA, 465 bp, Serratia marcescens
atgaattatcaccagtattaccccgtcgacgtggtcaacggccccggcacccgctgcacgctgtttgtcgccggctgcgtgcaccagtgccgcggctgctacaaccagagcacctggcggcttgattccggccagccgtttactgcggcgctggcggaccagattatcgccgacctcaacgacccgcgcattacacgccagggattgtcgctgtccggcggcgatccgctgcatccggccaatgtgccggagatattacggctggtgcagcgggtacgcgctgaatgccccggtaaagatatctggctgtggaccggctaccggctggcggagctggacgcggcgcagctacgggtggtaaatctgatcaacgtgctgatcgacgggaagttcgtgcaggcgttgcgcgatccggcgctgatttggcgtggcagcagcaatcaggtggtgcataagctgcgctga

SEQ ID NO: 444220 - DNA, 1059 bp, Serratia marcescens
atgtctcaacctttacctgcctccggcagccagacgcgttcatggccgctgtggaaacccgtgctgtttttactggtggtcgccgtcggtctgtactacgtcaaatggcagccttactacggtaaggcgtttgtcgcggcggaaagccactccatcggcggctcgatcctggccgatggcgcgcataacccgtggatggcggcgtggcagtacgcgctgacctactttgcggcggtgtggaaggccgcgctgctgggcgtgctggtggggtcactggtgcaggtgttgattccgcgcgactggctggtgcgtacgctggggcatcagcgtttctccggcacgctgctggggtcgctgatcgctctgccgggcatgatgtgcacctgctgcgcggcgccggtggcggccggtttacgccgccagtcggtatccagcggtgcggcgctggcgttttggctcagcaacccggtgctgaacccggccacgctgatttttatgggctttgtgctgggctggcagtttgccgccatgcgtctggcggccggtgtgatcatggtgctgggcgtggcctggctggtgcagcgtctgaccgcaaacgacgcgccgccggcgagcgaagcggtgacgactctgccggcgtgcgagaacgcgcctcagccgttcctgcgccgctggctggcggcgctgtggacgctgttttggtcaaccatcccggtttatattctggcggtgctgctgttgggcgcggcgcgggtctggctgttcccgcacgccgagggcgcggtggataacagcctgctgtggattatcggcctggcgcttgccggctgtctgtttgtgattcccaccgcggcggaaattccgatcgtgcaggcgatgatgctggcgggcatgggccccggcccggcgctggcgctgctgatgacgctgccggcggtcagcctgccgtcgctgctgatgctgaagaaggccttctccgccaaagcgctgtgcctgacggcggcgctggtggcgctgtgcggcatcctgaccggcatggtcgggatgtttatattctaa

SEQ ID NO: 444221 - DNA, 729 bp, Serratia marcescens
atgacgcagatatctagacatcctaccagttaccctacacgctatcagcaaatcgctgcgcagctggaagaagagctgcgcagccgttaccgcggcggcgactacctgccttcggaacagcagctagcggaccattatcaggtcaaccgccataccctgcgccgggcggtggatcagctggtggagcgcggctggctgcagcgccgccacggcgtcggcattttggtgctgatgcgcccttacgactacccgctgcacgccaaaacccgctttacccagaacctgctcgagcagggcaaccaccccaccagtgagtgcttactcgcagtattgcgcccgtgcaacggccacatcgccagcgcgctgggctgtgaggagggccagcaggcgatccacctgcgtaccctgcgccgggtaaacggcgtaccgatgagcgtgatcgaccactacctgcccgacctcgactggtggccggccctgcagcagttccgccagggatcgctgcatgaatttattgaacagcatatccatcagccgctcagccgccgccagacgcgcatcagcgcccgacaggcgcaggcgaaagagcgccaactgctggaactggccgccgacgcgccgctgctgtgcgtgcgcaccctcaacgtctgcagcggcagcgaccggctggcggaatactccgtcagcctggcgcgcgccgatatgctcgaactgaccatggagcactga

SEQ ID NO: 444222 - DNA, 450 bp, Serratia marcescens
atgtcctctctctcatcacgacaacgctggatgtcggtgctagcgcacagccggccggcccagctgcgcagccactggcaggcgctgaacctgaaccccgagtaccggctgctgcgcgtgccggagattggcctgacgcagctgcaggggcgcatgggcgccaccggccgccgctttgtgctgggtgatatgaccgttacccgcgcggtggtgcagctggaaagcggcggccacggctacagctacgttgccgggcgcgataaggcgcatgctgaactgtgcgcgctggtcgacgccctgctgcaacagccggcataccaggaacggctgcagcaacagctgatcgccccgctggcggcggcgcagcaggaacaacgccagcagcgcgcccgcgaggtggccaccagccgggtcgatttctttacgctggtacggggagagtcgccatga

SEQ ID NO: 444223 - DNA, 582 bp, Serratia marcescens
atgagtttactggatggtttcgccagcccggtggcgcaggcgcagcagacgttccgtctgatcctgaaagcattgagcgagccgggcgtcacggtgcggttgacggacgggccgcagtggccgccgcttaacgccgccaccaccgccgccttgctgacgctggccgacggcgaaacgccgctcctgatcgaaccggcgctgaacagtgagcaggtgctgactaaccttcgtttccacaccggcgcgccgcaggcctcctcggcggcgcaggcggcgttcgccgtttacgacccgcgcctgcaggcggcggatctgcacgcgctgccgcacggcgacgaactggcgccggaacaaggcgcgacgctgatcgtccagctcgacgatctggaaaacggcgcgccgctgcggctgcgcggccccggcattgcccacagccgcaccatcgcgccgccgttgccggaggcgctgcgccgctatctgctggcgcgcccgcagcccttcccgctcgggcttgacgtgattctgacctgcggcgacgcgctgctggccatcccgcgcaccactcatctggaggaatgctga

SEQ ID NO: 444224 - DNA, 1092 bp, Serratia marcescens
atgtacgtagccgtaaaagggggcgaaaaagccattgaggccgcgcatcggctgcaggagcaactgcgacgcggcgacccggcacaaccggcgctgacggccgcgcaggtggagcagcagctcgggctggcggtggaccgggtcatgaccgaaggcggcgtctatgaccgtgaactggcggcgctggcgattaagcaggccagcggcgatctggtggaggcgattttcctgctgcgcgcctaccgcaccacgctgccgcgtctggccgtcagtgagccattactcaccgagcagatgcggctggaacgccgcatttcggcgatttacaaagacctgcccggcggccagctgctcggcccgacctatgactacacccaccggctgctggacttcgcgctgctggcggacggcggcgcgcccgatgcaacgccgcagctcgccgacgatgcgccggcaaccggctgcccgcacgtgttcagcctgctgagccgccagcagctggcgcaggcggaacaggacgacggcagcacgccggcggatatcacccgcacgccgccggtctacccctgcccgcgctcggcgcgcctgcagcaactggtgcgcggcgatgaaggctttctgctggcgctcggctactccacccagcgcggctatggccgcaaccacccgttcgccggcgagatccgcagcggctatgtcacggtggagatcgtgccggaagagctgggcttcgccatcgacatcggcgaaatcctgctgaccgagtgcgagatggtgaacggctttgtcgccccggaacagcagccgccgcactttacccgcggctacggcctggtgttcggccgcgccgaacgcaaagcgatggcgatggcgctggtggaccgcgccctgcagaaggacgagtacgcggaagacggcgacagcccggcacaggacgaagagttcgtgctgtcccacgccgataacgtcgaggccgccggcttcgtgtcccatctgaaactgccgcactatgtggatttccaggcggaactggaactgctgcaacgcctgcggcagcgcggcgagcccacgcaggagacgccccatgagtaa

SEQ ID NO: 444225 - DNA, 705 bp, Serratia marcescens
atgacgatcaaaattcgcgtcgaacatctgagcaagacctttgtgctgcaccagcagcacgggacgcggctgccggtgctgcacgacgccagcctgacggtcagcgccggcgaatgcgtggtgctgcacggccactccggcagcggtaagtccaccctgctgcgctcgctgtacgccaactacctgccggacagcggccatatctggctggaccatcagggagaatggatcgatatggcgcaggcggaggcgcggcagatcctggcggtgcgccgccggacgctgggctgggtcagccagtttctgcgggtgatcccacgtatcagcgcgctggaggtggtgatgcagccgctgctggagctgggcgtggcgcatgacgagtgccgcgagcgcgccagcgcgctgctcagccggcttaacgtgccgcaacggctgtgggggctggcgccctccaccttttccggcggcgaacagcagcgggtcaacatcgcccgcggctttatcgtcgactacccgatcctgctgttggatgagcccaccgcctcgctggacgcacgcaacagcgcggcggtggtcgccttggtcgaacaggcgcgccggcgcggtgccgccatcgtcggcatttttcatgacgaccaggtgcgcgctcaggtcgccgaccggctgcacatcatgcaagcaccgcaggcgctggagacgccgtga

SEQ ID NO: 444226 - DNA, 1137 bp, Serratia marcescens
atgattattaataacgtaaagctggtgctggacgaccaggtggtgaacggctcgctggagatgggcgacggcgtgatccgcagctttgccgacggctacagccgtctgccacaggcgctggacggcgaaggcggctggctgctgccgggcctgatcgaactgcataccgataacctggataaattctttatgccgcgccccaacgtggactggccggcccattccgccatgagcagccacgacgcgctgatggttgcctgcggcatcaccacggtgctggacgcggtggcgataggcgatgtacgcgacggcggccaccggctggagaacctgcaaaaaatgatcgacgcggtgatccacagccagcgcgccggggtaaaccgcgccgaacaccgcctgcacctgcgctgtgaactgcccaacgccggcacgctgccgctgtttgaacagctgatggataaaccgggcgtgtcgctggtgtcgctgatggaccattcgccgggccagcgccagttcgcctcgcgcgccaagtatcgcgaatattatcagggcaaatataacctgagcgatgccgcaatggatgagtatgagcagcagcaggtcgcgctgtccgcccgctgggcgacgccgaaccgccaggccattgccgaacgctgtcgcgaacggggcattgcgctcgccagccatgacgacgccaccgccgcgcacgttgccgagtcctgcgcgcttggcagcgcgatcgccgagttccccaccaccgaggaagcggcccgcgcctcgcaccggcaggggctgcaggtgctgatgggagcgccgaacatcgtgcgcggcggctcgcactccggcaacgtggcggcgcatcagctggcggcgcagggggtgctggatatcctctcttccgactactaccccgccagcctgctcgacgcggcgttcctcctggccgccgacgcgcgcaacggttatgacctgccgcagtcggtggcaatggtcacccgcaacccggcgcgggcattggggttagccgatcgcggcaccattgccgaggggctgcgcgccgatctggtgctggcgcgcgcgcacggcgagcatatctatgtgcagcacgtgtggcgtcagggacggcaggtgttctga

SEQ ID NO: 444227 - DNA, 561 bp, Serratia marcescens
atggcacagcttatctatctgatgggggcctccggctccggcaaggacagcctgctggccgccctgcgcaacgcggcggacaacgcgccgctggtggcgcaccgctatatcacccgcccggcgcaggccggctgtgagaaccacgtggcgctgagcgaacgcgagtttcttcgccggcgcgccaacggcctgttcgcgctggactggcaggcccatcacacccgttatgcgttagggatcgaggtcgatctgtggctgttgcaggggatcgacgtggtgatcaacggctcgcgcgcctatctgccctacgcccgtcagcgctacggcgcgcagctgctgccgctgtgcctgcaggttgaaccggcggtgctgcgccggcgtctggagcggcgcggccgcgaagacagcggacagattgaacagcggctggcgcgcgcggcggcctacagcgtgccgtccgactgcctgcggctggataacaacggcgagctgagcgacacgctggcggcactgctgcaactgctgacggcgctgcggcgcgaggagacaccatgcaactga

SEQ ID NO: 444228 - DNA, 798 bp, Serratia marcescens
atgcaactgacttttctcggcaccggcggcgcccagcaggtgccggcatttggctgcgcgtgcgccatctgccaacgggcgcgccgtgagccgacccggcgtcgtcgcgcatgcagcgccatgctggattatcagggggaaactacgttaattgatgcgggattgacgtcattggagcggcggttttcggcggggcaaattcagcgttttttactgacacattaccacatggatcacgttcaggggttatttcatttgcgctgggggtgtggaagcgccattccggtgtacggcccacccgatgaacagggctgcgacgatctgttcaaacaccccggcattctggactttcagccgccgctggcgccgtttgtcagcgtgacgctgggcggactgcgcatcaccccgctgccgctgatccactctaaaatcacccacggttacctgatccagagcgccgaccgcacgctggcctacctgaccgataccgtcggtctgccgccggacaccctgcgttttctgcagggcgtccgcctggatctgctggtactggactgcagcctgccaccgcaggcacaggcgccgcgcaaccataatgacctcacccgcgcgctggagattcagcaacggctgttgccgcagcgcaccctgctgacgcatatcagccaccacctcgacgcctggctgctgacgcacccgctgccgccggggctggagctggcgtacgatggcctctgcatcgatgtcagtgcgccagacgctccccgtgctgcagccgatcggactccagcaccctga

SEQ ID NO: 444229 - DNA, 642 bp, Serratia marcescens
atggcacgggtattgataacgggcgctaccgggctggtgggcggcgagctgttgcgcctgctgctggcggaccggcgggtgacggcgattaccgcccccagccgccggccgctgccgccgcatgacaaactgaccaacccggtgggcgacgatctgttcgccctgctgacggagctggatcagccggttgacgcggtgttctgctgtcttggcaccacgcggcagcaggccggcagcgacggcaatttccactacgtcgactatacgctggtggtggaaagcgcgctgaccggccgtcggctcggcgcacagcactgtctggcggtgagcgcgatgggtgccagcccgcactccaccttcctgtataaccgcatcaaaggggagatggagcaggcgctgcgcgagcagggctggcagcgtctgacgctggtgcggccgtcgatgctgctgggtaaacgcgctgcgccgcgtttactggagcgcgtagcccagccgctattcaggctgctgcccggcagatggaaatcggtcgacgcccgcgatgtggcgcaaaccctgctggagcaggcgttcagctccggcgacggcgtcagggtgctggagtccgatcggctgcagcacggggagcgtctggcgcactga

SEQ ID NO: 444230 - DNA, 435 bp, Serratia marcescens
gtggaacagagcgaacaacagcagcatatcatccgcttcctcagcaaacagcacgtgctgacgctctgcgccggcaacggcgtggagatgtggtgcgccaactgtttttacgtgtttgacgccgagcgcatggcgctgtggctgatgaccgaactgcatacccgccacgggcagctgatgcagcagcatgctgaagtggtcggcaccattgcgccaaagcccaaaagcatcgcgctgattaaaggcatccagtatcgcgcagaggcgcgcatactgagcggtgatgaagagcaacaggcgcgcgcccgttactgcaagcgtttcccggtggcaaaagccatgtcggccaccctgtggcaactgagcctgcaggaggtgaagatgaccgacaacgttctcggttttggcaccaagttgttttgggcccgcagctag

SEQ ID NO: 444231 - DNA, 552 bp, Serratia marcescens
atggcgcgactttatcaatcacggatgggaaacatggcactatacgggaagtttatagttaatgatgcggattattcaccgctgacgatttatggcatcggcacgtttatggcgttctccggcgacggtaattaccggaacgcgccagggtgtgggatgattcccaacgaggggccaatcccctcgggcaaatactggatcgttgatcgccctaccggtggcattcgtgaaccaatagcaacgtggtttagtgatgtgctaaaccggaatttacgcaatatacctaccggaaaaaatgagtggtttggactattcagggacgacgggaagatagacgatcacacatggataaatggcgtcaagcgagggaattttagactgcatccgggaacgatatcatatggttgtatcacgctaaaacatcactcagactttgcagcaattcgtagtgctctactgaggactaaaacaatcaatatcagaaatatgagattgcgcacgtatggtatcattgatgtgattagcaacggagaatgcaaggtaagcggatga

SEQ ID NO: 444232 - DNA, 339 bp, Serratia marcescens
atgatcatacccgcacttttcctcaccggctgcgtacagtgggaacgcagcgatgccagcaataaaatctggcaggccgaacatgccaaatgcaaggaacgcgcctatcaacaatttccgcccgacgtcgtcagagacgttgaggtcgattacaacgatcaatacgttccctgcaagaaaaacaagaaaacctgtccggacggacatcgctatgaagcacggccaacgctgcgcacattacacagcgataacaacaaagatgcccgcaacgccgccataaaatcctgcatgtacgataaaggctggtatgaaaaggtctactattggccgcgcggctaa

SEQ ID NO: 444233 - DNA, 153 bp, Serratia marcescens
atgactaacgcgctgattacactgatattatgcctgttgttggtgccgctgctgctatggctgatgggcaaggcattatcggcggcgaaagataagccgcatgacagcaaaagcaagccgaaaaccggtatgccgcacggcgacgacgaatag

SEQ ID NO: 444234 - DNA, 1260 bp, Serratia marcescens
atggctgatttgtacggagaaattgtggtgattggcgccggcccggccggattatccgccgcgttggccgccgcgcaaagcggtaaatcggtgctgctgctggacgataatccacatcctggcgggcaaatctggcgcgccggaccagcggttgaactgccggttctggcgcggcgctatcgccaggcggtggcggcgcaaaagaatatccgctggctgcacggctgcaaggtggtggctttgtgcggcacgcggcgactgctgtatgaagatgcgcagcactgcggggtgattgagtatcggcgtctcatcttgtgctgtggcgcgcgtgaactgctgttgccgtttcccggctggaccctgccgggcgtgaccggcgccggcgggttgcaggcgcaaatcaaacaggggctggacgtacgcggccagcgggtggcgattgccggcagcggcccgctgctgttggcggtggcggacacggtgcgcaggtccggcggtcgggtggtgctgttggctgaacaggcgccgctgcggcgcacggcgcgttttgttggggaattatggcgctggccgggcaagctgcggcagtccgtgcggctggttaatgcgcgttaccgcggcgacagccgcgtgctggccgcccatggcgaatcccggctggacagtattgaggtgcaagagcacggacgtgtgcgccgtctggcctgcgatcggctggcctgcggctatggattggtgccgaatatcgaactggcgctgttgctgggatgtcggatcgaacaacaggcggtcgccgttaacgcacagcagcagagcagcgtggcacatatttatgcagcgggggaatgcaccggcgtcgggggcagcgaactggcgctggcggagggggcgatagccggctatgcagccagcggcgcgccgacgccgatgcgggcgttgcgggtgcgtgagcactggcagcgttttgccaccgcggtcacgacgacgtttcgcctggatccctcgctaaagtctctggcgacggcgcaaaccgtgctgtgccgttgtgaagatgtcatgctggggcaggtggccgggcaggcggactggcgcagcgccaaactggccagccgctgcggtatgggcgcctgccaggggaaagtctgcgcgacggcggcgcgttacctgttcgactggccgctgcctccgccccgggcgccgctgacgccagcgcgcatcgaaacgttgctgtgctgcatggcgcgcgaatccgacgtataa

SEQ ID NO: 444235 - DNA, 249 bp, Serratia marcescens
atgagcaagattgccatcacgatcgatggagagcgcttttgggtcagggcgggcatcagcgttgcggcggcgttgagtatgacgccgcagccgcattgccgccgttcggtgaccgggcagccgcgcacgccgttttgcggcatgggcatttgtcaggagtgccgcgtcagtattaacggcgtccggcggctggcctgtcagacgctgtgccaacccgaaatgcatattaccaggagcgacaatggctga

SEQ ID NO: 444236 - DNA, 1116 bp, Serratia marcescens
atgaaatgcgccgacgtgattgtggtcggcgccgggattatcggcagcgcctgcgcctggcaactggcgcggcggggattgcgggtggcgctggtggatgacggccggccgggggcgaccgcagcgggaatggggcacctggtctgcatggatgacaacccggccgagctggcgctttgtgcctattcgctgcgcctgtggcgcgagcaggccgctcagatgccggagcattgcgcctggcgaggctgcggtacgctgtggctggcggaacatgacgatgagctggcgctggcggagcaaaagcagcagcggttggccgccgcagaggcggagagttatctgctcagcgccggcgaactgcggcgacgtgagccgctgttgcgtcacggcttggccggcgggctgcacgttcccggcgacggcattgtatacgcgccgaatgtggcccgctggctggtagagcaggggagagaggcgatcgtgcgctatcgcgacagcgccgtggcgctggagccgcagacggttctactggccgacggcacgcggctgacggccgatgcggtgctgctggcgtgcggcctggcggccaatgcgctgctgtcagagccgctgctgcgggccaaaaaggggcagttggcgattaccgatcgttatccgccgcaggtccgtcatcaactggttgaactggggtacggcgccagtgcgcacgccagcggcggaacctccgtggcgtttaatctgcaggcgcgccccaccggccagttgctgatcggttcttcgcgtcagtttgatgtgccggacgacgtgttggatatgtcgctgctggcgacgatgctgaagcgggcgacgcagtttgtgccgtcgctggcgcagatgaatatcatccgctgctggaccggccagcgcgctgcgtcagcggacgggctgccgctgttgggccctcatccggttcatgacggcctgtggctggcgctggggcatgagggcctgggcgtaaccaccgcgctcggcagcgcggcgcttatcgctgaccgcctgttgcgacagcgcccggcgattgacgatacgccctacctgccggcccggctgctggcggctgaggaggtttccgcatga

SEQ ID NO: 444237 - DNA, 951 bp, Serratia marcescens
atgaccgattccacatccatcaccgcactgcgggcgattgattcccacaccggcggtgaacctacgcgcctgatcgttgatgggtttcccgatctgggcgacggcagtatggcggaacgtaaggcgctgtttgccgaatgccatgaccactggcgcagcgccattattcttgagccgcgcggcaacgacgtactggttggggcgctgctgtgccggccctgctcgccgacggccagcgccggcgtgatctttttcaataatacgggctatctcggcatgtgcggccacggcactatcggcctgatggcgtcgctggcctatctgggccgcatccgccccggcgaccaccagattgagacgccggtgggtacggtcagcgccaggctgcatcaggacggcagcgtgacggtgcagaacgtgccggcctaccgctaccgccgcgcggtgaccatcgaggtgcccggctatggcagcgtctgcggcgatatcgcctggggaggcaactggttctttttgattgccgggcatggcctggcggttgagcgcgacaatattgacgcgctgaccgcgttcagctgggcggtgcggcagacgctggatctggagggcgtgcgcggtgaagacggcggcgtgattgatcatatcgaactgtttgccgatgacgaacgcgccgacagccgcaattttgtgctgtgccccggcaaagcctatgaccgttcgccctgcggcaccggcaccagcgccaagctggcctgcctggcggccgacggcaagctggcgccgggggagatctggcgtcaggccagcgttatcggcagcgagttccgcgccagttatcagccgttggcgcacgggatccggccgtcgattcgcggcgaagcctatgtgtgcgccgacagccggctgttgctcgacccgcgcgatccctttgtctgggggatccgcgcatga

SEQ ID NO: 444238 - DNA, 921 bp, Serratia marcescens
atgagccaaaaagccattaactggagcggcgtgttccccgcggtcagcacccaattccgcagcgatttttctctcgatctggaagccacccaccgggtggtgagcaacctggttgacgacggcgtctccggactggtggtatgcggcagcgtcggcgaaaacacctcgctcagcgcacaggaaaaactggcggtgatcgaagtggcgaaagacgccgcccgaggcaaagtgccggtgattgccggcatcgccgaattcaccaccgcctttgcgcaggatatggcgcagcaggccgccaaagccggcgtcgacggtattatggtgatgccggccctggtgtattcgtccaaaccgcacgaaaccgccgcgcatttccgcagcgtcgccgccgccaccgatctgccgattatggtctacaacaacccgccgatttataaaaacgacgtcacgccggagatcctgatctcgctggcggactgcgacaacatcgtctgtttcaaagactcctccggcgataccagccgctttatcgatctgcgcaacacggtcggcgaccgctttgtgctgttcgccgggctggacgatgtggtggtggaaagtatcgccgtcggcgccgaaggctggatttccggtatgtccaacgccttcccgcgcgagggggaaacgctgttccggctggcgaagcaaaaacgttttgacgaggcgctggcgctgtaccgctggtttatgccgctgctgcacctcgacgcccggccggatttggtgcagtgcatcaagctgtgtgaagaactggtcggccgcggcagcgcggtcacccgcccgccgcgtctggcgctggagggcgaaacccgtcagcaggtggtcgccatcgtcgaacaggcactggcgcagtgtccggcgctgccggacgtcggtctgtaa

SEQ ID NO: 444239 - DNA, 1590 bp, Serratia marcescens
atgcctatcaccaccctcagcggaaagcagtttatcggcggccgccgcgtcgccagcggcacggctgaacttgtcagcctgcgtgccgataacggtcagcccaccggctatcgcttccatcaggccagtcggcacgaggccgcttgcgccgcactcgcggcacaatcagcgtttattgcctacgcgcagaccagcagccaacagcgcgcgtccttccttgacgccattgccgatcaacttgatgcgctggatgatgacttttttaccgtcgtccagcaggaaaccgctctgccgccggcgcgcctgcagggcgaacgcgcccgcaccagcggccaaatgcggctgttcgccgaactgctgcgccgtggcgacgttatcggcgcacggattgacagcgcccagccggaacgcacgccgctgccgcgcccggatttacgtcagtaccgcaccgccatcggcccggtggcggtattcggcgccagcaatttcccgctggcgttctccactgccggcggcgataccgctgccgcgctggccgccggttgtccggtggtgtttaaagcgcacggcggccatatggccaccgcagagctgatcgcacaggcgatcgaacgtgcggtagcacagcaacagatgcccgccggggtgttcaatatgatcttcggcgatcgtatcggcgccgatctggtacagcatccggccattcaggcggtcggctttaccggatcgctcagggggggccgcgcgctgttcgatctggcgcagcagcgcccgcagccgatcccggtgttcgccgagatgtcgagcatcaacccggtgatcgtgctgccgcaggcgctggcgcagcgcggacggcaaatcgcacagcagctggcggcgtcggttactctgggctgcggccagttctgcaccaagcccggtttgatcctcggcgtgcgcagtccggcacttgaacaatttatcaccgcgctgagtcaacagatcgaagcggccgaaccgcagaccatgctcaataccgccactttgcaccattatcatcagggactgaacgaactggaacagcatccaggcatcgcgcacctggccggccggcgtgacgcccctgcccatcaggcctgcgcgcagctgtatcaggcggaaggccggctgctgttgacggcggatgcgcggctgcaggaagaggtgtttggcccggtcgccatcgtggcggcgctggacgacgagcaacagctgcagcaggcgctgaacgcgctgcaagggcaactgaccgccactctgctggccgatgacgccgacctgaccgccgccgcgccgctgctggcctgtttaacgcataaagccgggcgggtgctgtttaacggctaccccaccggggtggaagtttgcgacgccatggtgcacggcgggccttaccccgccaccagcgacgcccgcggcacctcggtcggcacgctggcgatcgagcgttttatgcgaccggtctgtctgcaaaatgcgccgccgtcgctgctgcctcctgccctgcaggatgaaaacccgcttaatttgctgcgtctggtaaacggcgtttaccggcgcgatccgctgtga

SEQ ID NO: 444240 - DNA, 1014 bp, Serratia marcescens
atgacggcaaacgtacgcctgacgctggatcaggcctaccacttagcgcagcgcgcactacgcagcaacgggttcagcgccgaacacgccgacgcggtggcgcagaacgtcaccgccggagagcgcgacggctgcgcctctcacgggctgtatcgcattctcggctgcgtacactcgctgcagatggggaaagtctccgccgatgccgaaccggagcttatcgacagcgcccccgccattatgcgggtcaacgcccacggcgccttttcgctggtggcctaccgccgggcgctgccggcgtttgttgacaaagtaaaacacaacggcatcgccgcgctggcgatcaaccactgcgtacacttctcggcgctgtgggccgatatcgaaccgctgaccgaccatggactggtggcgctggcctgtactcccagccacgcctgggtgacgccggccggcggcagccagccgctgttcggcaccaaccctatcgcctttggctggccgcgccccgggcagccgccttttgtgtttgatatggcgaccagcgccgcggcgcgcggcgagatagagctgcaccggcgcgccggcaaaccgctgccgcctggctggggaatcgacaaagagggccggccatcaaccgatgccgccagcgtgctggccggcgccatgctgacctttggcgggcataaaggctctgcgctggcggcgatggtggaattattggccggaccgttaatcggcgatatgaccagtaaagagtcactggcgtttgataatcagaccggttcatcgccttacggcggcgagctgattatcgccatggatccgcagcgctttttgggggagcagcaggcaacctacctggcccacgctgaaacgctgttcaacgatatgcggcaacagggcgcacggctgcccggcgaacgacgttttcgccagcgcccgctgagcgagcagcacggcatcgaactgccgcaagcgctgtacgatgagattgaggcgctgtgccgttaa

SEQ ID NO: 444241 - DNA, 429 bp, Serratia marcescens
atgtaccagatgattttagtaccggttgatcttgaagagccgcaactgacggacaacgcaatcaagcatgtggagtatctggccaaggtttcgggcgccaaggtacacctgtttcatgcgttgccggacgcatcggcatttgtcactgcctattcgttcggcattaaagaatttgaaaatcaggcggaagttaacgcgatcgacaagctgaagaacatcatttcggaaatggagctgccgctggagcgtctgtcctataccatcagtttcggttcaccgcgtgatgaagtgctgcagctggccgacgagatcggcgctgacctgatcgtggtcggctcacggcgtcccagcgtgaaaacctatctgctcggctccaacgctgcggcgatcgtgcgccatgccaaaacctcggtgatggtggtcagataa

SEQ ID NO: 444242 - DNA, 348 bp, Serratia marcescens
atgaaaaacaaatcattagcgctcttattactggctggtctgaccggctgcagccagctgtcaacgtcgccggaagcgtcagcgccggccgccggcaaaaacgaaaccttatacgtcaacagccgtctggtggattgcgtgggcgtcgcgccgatgaaatgcatgcaggtgcgtcagtcgccggatgcgcagtgggagctgttttacacccagattgaaggtttcgagtttacccccggctatcgctataaactgcaggtaaacgtcagcgagctggataatgtcccggccgatgcgtcttcgctgcgttatgtactggtcaaacagctggaaaaaaccaaagcataa

SEQ ID NO: 444243 - DNA, 915 bp, Serratia marcescens
atgagcaaaacatcttctacttcaggcctgttgctgaaaatcaggccgcaggaagcgatcctgattgttattaccatgatctggggcggtacgttcctggcgattcattacgccatgacggttagcggcccgttcttttttgtcgggctgcgttttggcgcagccgcactggcgttaatgctgttttcattgaacagcctgcgcgggctgacctggtatgaatgcaaggccgggatgctgatcggggtgacgattgctgtgggctacagcctgcagagtattggcttgcagaccatcagcagcagccagtcggcgtttatcaccgcgatgtatgtgccgatggtgccgctgctgcagtggctggtgctcaagcgttttccgggcgtcatggcgtggatcggcattgtgctggccttcagcggcctgatgctgctggccgggccgaacggcagcgaagtcagctttagcctgggagagaccgttacgctgatcagcaccgtggcggtggcggcggaaatcatacttatcagcgcctatgccgggaaggtgaacgtcaaacgggtgaccgtggttcagctggcgaccgcctcgctgctctcttttatgatgatgctgccgagcggcgaaaaggtgccggcctattccgattatttactgtactgcgccgtcggtcttgggatcgccagcgccctgattcagctcaccatgaactgggcgcagcgcagtatttcgccaacgcgggcgacggtcatttacgccggtgaaccggtgtgggccggcgtggtggggcgcattgccggtgagcgtctgccgggagcggcgctgttgggcggggcgttgatcgtgctgggggtgatcgtcagcgaattgcgtattcgacggaagaaaaagcgcgaggcgctggcggagagttag

SEQ ID NO: 444244 - DNA, 576 bp, Serratia marcescens
atgagcaatatagtgcacaatggtaaacccgacgctccccaggtgctgcaatacctcagcagcaacgtgcgcggttatcgtcagcaggcggggctgagtcaaatggcgctggcgacgcagtccggcgtcagccgccgtatgctggcaggcattgaatccggtgagcgcaacgtcagcctggcggtgttggataagctggcggcggcgctcggggtcactttcagcgatctgattcaggcgccggcggcgcgcggcagccatctggtcggcgaactggcctggcaaggcgagcaggcggccagccaggcgatttttaccgccagcgtgccggcgcgtcagcgggtagagctgtggcaatggacgctgatgccgcacgagcagtatcactcacagcccgatgccgaaggctggcgcgagatcgtttatgtaattgaggggtgcctgacgctgctgctggagcagcaaaccctgacgctacacgccggcgatacccacgtcttcaacagcgatcagcagtatacttacgccaaccacggcgaaagccctttacgctttatccgcaacgtaaccttttag

SEQ ID NO: 444245 - DNA, 927 bp, Serratia marcescens
atgaaaactgacgatatcggtgagtccacctcacgcaaaatcggcagaaatatttcgctgggagggctgcgttgctttgaggcggcggccaggctggaaagcttcactctggcggcgcatagcctgagcctgacccatggcgccatcagccgggcggtgagggggctagagaatgaactggggctggcgctgttcgagcggcgtcaccgccgggtctatctgacggcggccggacgtaaactgtggcaggctacccagcaggcgttcgatattcttgaacagagcgtgcaggaactgtatcagcaggcgcaaaacgcacctattgtgctctcctgtgagccgacgctgctgatgcgctggctgattccgcgcataccggagtttctgcgcgcccatccggcgatgcatatacagctggtggccggcggcggggcggtgacttttcaggatggcattacgctggcgattcggcgcaatgattttgactggggagcgaatgtacacagcatcccgctgtttagtgaaaaaattggcccggtgtgcaagccggaaatgctgacgcattttattgaaggcagccaggtagagccgcgtttgcgccacgatgcggcgctgttgcaaaccgccacccgtcccaacgcctgggcagattgggcgcaggcgcaggggatatcgattgagggtatgccacagcagcgttttgagcatttttacttcagcctgcaggcggcggtcgccgggctgggcgtggcgatcgggccgtggcagcaggtacgtgacgatatcagcgccgggctgctggcggcgccgtttggttttcgccacgacggcagcggctacagcctgctaatgccgcagccggtggcaccgggcagcgcggtggaaaccttgctgcactggctgcagggccagtcggcggatgactaa

SEQ ID NO: 444246 - DNA, 621 bp, Serratia marcescens
atgactgaacttattgccgtcgtcaccctgactttactcgccgttatcagccccggcccggatttcgccatggtatcgcgcaacagcctgaccggctcacgcgcctccggactctactgcgcgctgggtatcggtcttggcgtactggtccatgtgggatacacgctggttggcgtcggcctgttgattcagcgttcgctgtggctattcaccgtgctgaaatttatcggcgcggcctacctgatttatctcggcctgcagatgtatcgtcatgcggcgacggcgccgactcccgccgcaacgcctgcgcacaacatcggtgaatggcgcgcactgaaaaccgggtttctgaccaatgtgctgaaccccaaaaccaccattttcatcgtcagtctgtttatgcaggtggttaatccgcaaagctcactgacggtgcagatcggttacgggctgtttatctcggtgacgcatatactgtggtttggcgccgtggcgctgttcttttcctccccggccatcagcacgcgttttctgcgcctgcgcagcggcatcgaccgtctgttcggcgggctgttaatcacgttcggcgcgctgctggcgctgagtaacctgagccgctga

SEQ ID NO: 444247 - DNA, 1371 bp, Serratia marcescens
atggcgttgctctacaaagaaaaaagcatcttctcttttttctatacgttggtgatcgccgcatcggtcggcggcctcggctggttcagtagccgccagtcgaaggtgcagttgcgcacccaggacggctttttgatcatcgtgctgttctggctgctgttttccattatcagcgccctgccgctgtggctcgacgatacgataaacatcagcctggtggatgcgatgtttgaggggatatccggcatcaccactaccggcgcgtcggtgctgaacgacgtctcctcggtgccgaagtctttcctttactatcgcgcgcagctgaattttgtcggcggtttggggattatcgtactggcggtggcggtgctgccgctgctggggatcggcggtgccaaactgtatcagtcggaaatgcccggcccgtttaaagaggagcgtctgacgccacgcctggccgatacggccaaaaatctgtggctgatttatctcggactcgggttactgtgcaccctggcgtttcgcctggccggcatgccctggttcgatgccctgtgtcacgcgctgtccaccgtgtcgctgggcggtttttccacccgtaatgagagcctgggctatttcgacagcgcgccgatcgagctggtcggcggcattttctccgtactggcggccatcaatttcaccctgttcttcgtcgccatcagccgccgcagcctgaagccgctcctccgcaatcccgaactgcgctttttcctgctggttctggccatcatcgtggccattgtggtggccgaactgtaccgctccgggatgtacggcatcaaagacgcgctggtgcacggctttttcctcaccagttcaatgatgaccgataacggcctcgccaccgccgactacgccaaaacgccgaccaacgccatcctgctgctgctcggcgccagtttcttcggcggctgcgtgggctcaacctgcggcgggattaaagcgctgcgctttctgattatgtataaagtgagccgtcacgaggtcaaccagctggtgcaccccaacgccattttcaccatcaaggttggcgacgcctccgtgcacgatcgcgtactgcgatcggtatggagctttttctttctgtacgtgctgttcagctgtctgttcgtctgggcgctgaacctgatgggctatgacatgatgaccgcgttcgctaccgtcgccgcctgcatcaacaatatgggcctggggtttggcgaaacggcggctggcttcggcacgctctccgatcccgccaaatggctgatgtgcgccgccatgctgctgggacgcctggagatttacccgattctgattttatgctcccgcaccttctggcgtttctaa

SEQ ID NO: 444248 - DNA, 1995 bp, Serratia marcescens
atgagccaaaacgacactgaaaacgtggcacgtcgtagccatatcaatcctccggtatttttcatttccgccgcactgatcatcgtcctggtggcgtttgccgcgctctatcccgagctggccgatcgtaaattcaaagcactacaacaaggaatattcaccaacgccagctggttctacatcctggcggtcgcgctgattctgctcagcgtcacctatctgggcctgtcgcgttacggcaacatcaagctggggccggatcacgcccagccggacttcagctatgtctcctggttcgccatgctgttttccgccggtatgggtatcggcctgatgttcttcggcgtcgccgaaccggtgatgcactacctttctccgccggtcggcacgccggaaacggtggaggcggcaaaacaggccatgcgtctgaccttcttccactggggcctgcacgcctgggcgatttacgccatcgtggcgctgatcctggcgttcttcagctaccgtcacggcctgccgctgacgctgcgctcggcgctgtacccgattatcggcgaccgcatctacgggccgctgggccatgcggtggatatcttcgccgttatcggtaccgttttcggcgtcgccacctcgctgggctacggcgtgctgcaggtcaacgccggcctgaaccatctgttcggcctgccgatcaatgaaacggtgcaggtggtgctgatcgtggtgatcaccgggctggcgacgctgtcggtggtatccgggctggacaagggcatccgcatcctgtccgaactgaacctcagcctggcgatcctgctgctggtgctggtcggtatcctcggcccgaccgtgctgctgctgaaatcctttgtggaaaataccggcggctacctgtctgaaatcgtcagcaaaacctttaacctgtacgcttacgaaccgaaatccagcaactggctgggtggctggacgctgctgtactggggctggtggctctcctggtcgccgtttgtcggtatgtttatcgcccgcgtttcccgcggccgcaccatccgcgaattcgttaccggcgtgctgtttgttccggccggcttcaccctgctgtggatgaccttcttcggcaacagcgccatccatctgattatggctgaaggcgcgcgcgatctggcgacaacggtgcagaccgacgtctcgctggcgctgtttaacttccttgagcacttcccgttcgccaatatcctgtcgtttatcgccatggcgatggtggtggtgttcttcgtcacctcggcggactccggcgctatggtggttgatacgctggcttcgggcggttccgacaaaacgccaatctggcagcgtatcttctgggccgcgctgatgggcgtagtggcgattgcactgctggttgccggcggcctgagcgcactgcagacggtcaccatcgccagcgccctgccgttctccatcatcctgctgatctcgatttacgggctgctgaaagcgctgcgggtcgacgcccataagcgcgacagccagaccaccaccaccatcgcaccgaccgctgcgcgcaacccgatctcctggcagcgacgcctgcgcaatatcgcctacttcccgaaacgctcgcacgtgaagcgctttgtcagcgaagtggtgcacccggcgatgacgctggtggaagccgagctggtaaaacagagcaccgaatcctccatcgacgactcgcaggacgaccgtattcgctttgaagtggatttaggcgacgacctgaactttgtgtatgaagtgcgtctgcgcgcctatattcagccggccttcgccctggcggggctgaacgatgaagagcgggacgaagagcacaagtactaccgtgcggaaatccacctgaaggaaggcggccaggattatgacgtgatgggctggacgcaagaacagatcatccacgatattctcgaccagtatgagaagcacctgcacttcctgcatctggtacggtaa

SEQ ID NO: 444249 - DNA, 798 bp, Serratia marcescens
atgcgtttgaaccaacttttctccctgttcgccatactcgtcagcgcgcaaaccttcgccgctacgcccgaatcaatcgacaactgcgccgtcggctgcccgaccggcggcagcaccaacgtgtcaatcgtgcgccacgcctacacgctgaataacaacagcagcaccaaattcgccaactgggtggcctaccacatcaccaaagatacgctggccagcggcaaaagccgcagctggaaaaccgaccccgcgctggagccgcaggacactctggccccggccgactacaccggcgccaacgccgcgctgcaggtggatcgcggccatcaggcgccgctggcctcgctggcgaacgtgtcggactgggaatcgctgaactatctctccaatatcacgccgcaaaaatccgcgctcaatcagggatcctgggcggcgctggaagagcaggaacgcaaactgatcgcccgcgccgacgtcagttcggtgtataccgtcaccggcccgctgtatgagcgcgagatcggcaaactgccgggcaccgacaaatcacacaccattcccagcggctactggaaggtgatttttatcaacaacagcccggaggtgaaccactacgccgcctttatctttgatcagaataccccgcgcgacgccgacttctgccagttccgcaccaccgtcagcgaagtggaaaaacgcagcggcctgattttatgggccggtctgccggatacggtacaggaaaaactgaaggccaagccgggcgtcctgcccgaactgatgggctgccaggcctaa

SEQ ID NO: 444250 - DNA, 678 bp, Serratia marcescens
gtgttaacgcgagattttctgcaacaggcagattgcaaaacggcatttggtacgattgaagagacgctgttgctgacgccggaacagcgggcagaatcgctggcgcacacgctggcgcagcggccggacagcggcccggtctgggtctttggctacggctcgctgatgtggaacccgatttttgaagcggaagaggtgcagcccgctaccctgcagggttggcaccgggcgttctgtctgcgcctgaccgccgggcgcggcacccagcatcagcccgggcgcatgctggcgttgaaagccggcggggagacaagcggcctggctttccgcctgccggaagcgcatctggatgacgagctggcgctgctgtggaaacgtgaaatggtgaccggctgttatctgccgacctggtgtgaactggcgctggacggcggccggaagatcaccgcgctggcgtttgtgatggacgcgcaacatccgctgtttgaagcggacacctgtcatcaggtggtcacgccgctgattgccagcgccagcggcccgctgggcaccaatgcccagtatctgtttgcgctcgaccgcgaattgaaaaaccacggcatgcgtgatgacgccattggcgagctggccagcagcgtgcgtcagtggctgcagcagcatacgccggttgccggctga

SEQ ID NO: 444251 - DNA, 819 bp, Serratia marcescens
gtgactaccgaagcaccccgcacccgcgccccctatttaatcagcgttgcccgcgttcatgacgtaacgccgcacctgcgtcgcatcaccttttatgccgacgatttacagtattacccggccaacgccgccgcggcgcatatcaaagtctttctgccgcgcgccgggcaaagccagcccgatctgccgcgcctgaccgaaaatggcccggtctgggcggcagacgccgtacgcccgctggtgcgcacctactccgtacgcgccattcgcccggagcagggtgaaatcgatattgaattcgccatgcacgaccataacggcccggcggtcagcttcgcccgtaacgccaaagccggcgacatcatcggcatcagcaatcccggcgggccgaaaccgatgctgccggaggctgacttttactgtctggcgggcgatccctcatccctgccggccatcgccgccctgctggaaaatctgccggcgcgcagcgaaggacacgcctttatccgcgtcgacagcagcgccgatgccctcgacctgcgcaaaccggccggttttgagctgagctggattatcggcggcaccgataaaaccgcagcgctgattacccagttctgcgcgcagccactgcccgccggccgcacgcatttctggctggccggcgaggatcaactggtggtcaccctgcgtcgctacctgcgccgcgagcgtcaatgtgagcgtaatcagctttatgcagtaccttactggcgtgaggggctaaatgaagagggttatcatgagacacgccatgaaatcatggacaatattgattcctga

SEQ ID NO: 444252 - DNA, 903 bp, Serratia marcescens
atgaaatatatcgttttaattctgtttattttatgcgtggtttatgtgcattatcgtggtcgggttcgttacggtttctggcgccagctggctgaccattcgaccttcaccgcaccgttgaacgtttttatgtacctcttttcccgcgtgcctaccacgccgtatctgccgcaagagctgttcccggagttacaggcgctgcgcgacaattggcagaccatccgtgatgaaggccgccagctgatggcaatccagcaaatcaaagcgtccgataaatataatgacgcaggctttaactccttctttaaaaccggctggaagcgcttttatctgaaatggtatgaggacagccatccttcggcgatgacgctgtgtccgcagaccaccgcgctgctgcgcacgctgccgtcggtcaaagctgcgatgtttgccgagctgccggacggcagccgcctgccgcgtcaccgcgacccttatgcaggctcgctgcgctatcacctggggctaattacgccgaacgacgaccgctgctttatcgaggtggacggcgagcgctacagctggcgcgacggtgaggacgtgctgtttgacgaaacctatctgcactacgcggaaaacaaaagcgggcagaaccgcctgattctgttctgcgatattgaacggccgatgcgctaccgctggacgcagcgggtgaaccactggctgggacgccatctgatgagcgccgccaccgcgccgaatgaagcgggcgaccgtaccggcggcgtcaacaaagccttcaagtatatttacgccatccgtcgggtaggaaaacggctgaaggcctggaataaaacggtgtattacatcattaaatggctgctgttcggcggtatcgccgtggggattttctgcgcgctgtag

SEQ ID NO: 444253 - DNA, 789 bp, Serratia marcescens
atgggaagacagaaagcagtgatcaaagcacgtcgtgaagcgaaacgcgtaattcgtcgtgacgctcgcagtcatcgccagttggaagaagaaagcgtgacttcgctggtgcaaatgggtggcgttgagtctatcggcatggcgcgggataagcgcgatagctcacccatcgaggcgcgaaccgaggctcagggtcattacttgttagccatagaaaataaacagttgatctttgccaccggcgaagccgggtgcggcaaaacctttatcagtgcggcgaaagcggcggaagcgctgattcataaagaagtggatcgcattattgtcacccgtccggtgttgcaggcggatgaggatcttggctttttgccgggggatatttccgagaagtttgccccttatttccgcccggtgtacgacattctgcagcgtcggctgggatcgtctttcctgcaatattgtctgcggccggaaatcggcaaggttgaaattgcacctttcgcctatatgcgcgggcggacatttgaaaacgcggtggtgattctggatgaagcgcagaatgttaccaccagccagatgaaaatgttccttacccgtctgggggaaaacgtgacggtgatcgtcaacggcgatattacccagtgcgacctgccgcgcggggtagagtcgggcctgaatgatgcgctgcagcgtttcgaggaagatgaaatggtcggtattattcgctttgataaacaggattgcgtacgttccgcactgtgtcagcgtacgctgcacgcctacagctaa

SEQ ID NO: 444254 - DNA, 2151 bp, Serratia marcescens
atgaaacctatttccgggaatacctgcgccgctgcggtggcgctgctgcctgttttatggccggcgatcgccggcgcggcgtcaggggccgatgacgaggcgaccgtggtggttacggccaagcgcagcggcctgtctgaactgagtacgccggcggcggtcagcgtggttaacggcgagcagttgcgcgacgccaaaccgcaaatcaacctgtcggagagccttggcgtcgtgcccggactgcaggtgcaaaaccgccagaattacgcgcaggatctgcagctgtcggtacgcggttttggcgcgcgctcaacctacggcgtgcgcggcgtgcggatttatgttgacggaattcccgccaccatgccggacggacaggggcaaacctcaaatatcgatttggcgtcggccgataaagtggaagtgctgcgcgggccgttctccgcgctgtatggcaacgcctccggcggggtgctcaacgttgaaacgcagaccggccgccagccgaaccgcgttgaggcgggcatgtacgccggcagctatggatcctggcgttacggccttaaggccagcggcgccaccggcgacggcagtcaggccggcgacgtcaactatgccgtatccgcgacgcgttttaccaccgaaggcttccgcgagcacagcggcgcgcgtaaaaatctgggcaacgccaaactgggcgtgcgtctggatgatgccagcaccctgacgctgctgtttaacagcgtcgatatcaacgccgacgatcccggcggcctgacgcgggaagagtggcaggataatccgcgccaggcgccgcgcgccgagcagttcaatacgcgaaaaaccgtgtcgcagacccagggcggcctgcactatcagcgacagttcggcgacagcgatgatctgagcgtgatgatgtatgccggtgaacgggaaactacccagtaccagtcgataccggtatttgtccagcagcgcagtgcccagcagcccggcggggtgattgtgctggcgcgccactatcagggcattgatacgcgctggacgcaccgcggcgccatcgccgccgtgccctataccctgaccggcggcctgaactacgaaaccatgacggaacagcgtaagggctatgaaaactttgccgaggtgaacggcgtgcagcagctgggtgtgaagggcaatctgcgccgtgacgagcgtaacctgatgtggaacctcgacccgtatctgcaaagctcctggcaactgacgccgcgcctgacgctagacgccggcgtgcgattcagcaccgtcaactttgactccaatgaccactttattacccccggcaacggcgatgacagcggcaacgcccgctatcaccagtggttgcccgccggcgcactacgctatgcgctggcggacggctggaatatttatgctgccgccggacgcggttttgaaacgccgaccatcaatgagctctcttaccggccggatggcacagccggcatgaacttcgatctgcagccggccgtcagcgatacgctggaagtgggcagcaaaacccgcatcggcaacgggctgctgaccgcggcgctgttccagaccgatacccgtaatgagatcgtcaccgccaacagcagcaacggacgcagcagctacaaaaacgccggccagacacgccgccgtggcctggagttggcgctggaccagcaatttggcgaggcgtggcggttaaacatggcgtggacgctgctggacgcgcgctatcgtgacgatatttgcggcgatgccgcctgctcggcggataagtttatcggccgcggcaaccgtattccgggcatcgcccgcaatatgggttacgcctcgctggcgtgggcgccggaacagggctggtatgccggcgctgaagtgcgttatatgagcgatatccaggtgaatgacgccaacagtgcccaggcgccgtcttatactaccgttggtctgaacagcggttaccgttatccgctgggcaactggctggtcaacgtttttggccgggtcgataacctgtttgaccgtgactacgtgggctcggtgatcgttaatgaaggcaacgggcgcttctatgaaccggcgccggggcgtaattggggcggcggcgtaagcgtttcctattcgttcgaataa

SEQ ID NO: 444255 - DNA, 2277 bp, Serratia marcescens
atgacaacgcatttagcctattggctgcgacgcttgagccccgatagcatgcggacggctgccgggacgctgttgagtctggatgatatgccgctgaagtgtgcaccgtcgtggccggatagtcagtcggacggtaatcagagctgcggtttttcgtcccaggagtcaccttttgccaggattacggatatgacggaatgtgagtgctcagcgctgttggatcaattcaccctggatattactgcgaaagcgcaaaccagacagctcgatccggtattgggccgtgatgccgaactgcgtcagatcgttgatgtgctttcccgccggcgtaaaaacaacccgatcctggttggcgaaccgggcgttggcaaaagtgcgctggtggaagggctggcgcagcgtattgtggaaggcaatgtgccggacggtctgaaaaatatgcgtatccgcagattggatgtggcgctgctgcaggcggggcctggcgacctttctgctttcacgctgcggctgctgcagctggttgacgccatacgccgttcgccgcagccgatactgttgctgattgacgaggtgcatacgccggtgggcgtcggcgagtcggccggcagtgaagaggtgctcaagatattgaagccggcgctgatgcagggagagctgcgcctgattattaccgccaaccggcaagagtatcagcagcatgtcgagtgggacacggcgctggggcactgcctgcagaaggtcagcgtcgatgaaccggatgatgagaccgcctgcctgatgctgcgggcgctgaaagagcgttacgcccaacaccacggcgtctacatccaggactcggcgctgaaggcggcggtggtgctgtcgcgtcgctatctgtgcggccgtcaactgcccgataaggcggtggatctgttggatatcgccagcgcccgggtgcggatgagcctggaggtcgaacctgcgccactgacgcagatccgcgcggaactggcggcgctggcgatggagcaacaggcgattgaacaggacgaggcgcagagtgacgaggtcgatccggcgcggctggcggatatctgcgaccgttgccagtggctgctgcagcagcaggcaagtctggagcagcagctgcggcaggagcagctgctggcgcggcaactgctgacggcccggcaggcggagcgcagcgatgaatgcatggtgttgcagcagcagttggcggcgctgcaggcgtccgttcctctgttgtcgctggatgtggacgcccgcatggtggcgacggtcatcgccgactggtgcggcattgagctaagcagcctgttaaaggatgagcgcagctgtttgctgcagcttgaacagcgcctgaccgagcaggtgatcggacaggagtcggcaatgagcgcgctggcgcagcgactgtataccgccttaacgcagctgcggctggagaatgggccgctgggggtatttttactgctggggccggctggcgtgggcaaaatggcgagcgcgcgggcgctggccgagaatctgttcgcggacgatgcctcactgttgaccctcaatatggcggagtatcaggaagcgtgcgcggtgaagcatctgatcggggggcatggcgagcaggcggaggaggaggggacgttaaccgaagcggtacggctgcgtccttacagcgtagtgctgctggaagaggtggaaaaggcccatggcgaggtgttgaagttgctttgtcagctgtttgagcgcggttctctgcgtgacggccaagggcggctgattgattttcaccatacggtgttcctgatgagcagcgagctggggcgcgagcagctgcatcagcaactggcaacgcagcccgatgcgacggacgccgagctgagcaccgcgctgcagccgatcctgcgcgcgcgctttcagccggcgctgctggctcaggcgcaagtgcttatctaccgtccgctggacgtcgaggcattgcggcggattgtcgccagcaggctacagcagattatgcagcggctgcggcagcgttacgatctgcgctgcgttgtcgatgacagcctgagtgatgcgctggtgtcggccggcctgcaggcggagggcggcgtgcgccatatcgacagcgtgttgaatcagcagattttgccgacggtctcacgccagttgctgcagcgcctggaggagcatcgcaagccgcagcagctgcaactggcttatgacgcacggcagggcgttgtgctgaattttgacgttggtacgggctatcagtgctga

SEQ ID NO: 444256 - DNA, 756 bp, Serratia marcescens
atggatactttcactcgcctagccgctgcttacccggaatgctggctggggttactgatgctgtcgggctgggccgtcggcagcgtgatgagccgggtggcgcggcagctgccgccgttactggaacaccgctggcggcaagctgcgctgcggcagttgaatttacctgcggcggatgaggaggtagggttatggcggcgtgtgggcaaacgtacgcccggaagtggccgctcgccggctgcgctggcgcatgcgctgctgtttatgttggtgggactgtggcagccgccgggatggccgctgttggcgctgctgctgttttgcgcgctggtattaacgctgtcgattattgatttcaatacaatgctgttgccggatgtgttgacgctgcctctgctgtggctgggcctgttgtgcaatctgaacggctggtttgtaccgttggagcaggcggttatcggcgccgctgccggctatatggcgctgtggctgctgttttggctgttcagactgggcagcggtaaagaggcgctgggctacggcgattttaaactgacggcggcattgggcgcctggtgcggctggcaaagcctgccgaacctgctgctgctggcggcaggcggcggcctggcgtataaactgttgcgatacggctggaataagcatagcgcgcaacagccgctggcgtttggcccctggctggggatgagtggactggtaaatttgctgttttttattgtgccgataaattattaa

SEQ ID NO: 444257 - DNA, 2220 bp, Serratia marcescens
atggattcgtcgtatcaccctgcccgcatgccttccggcgcggcagaacatgtgtgccgcacgctcggcgcactgcaacgctcatcgccggatggcgacaggctgtccgctagcgcctatcaacgtattctgctgtactgcggcgtgcgccccgatctccccggctggcgtcattttctgctgggtgcgctcacgctgctcggcctgctggcgctggtctgcgggatcattttctttatcgcctggaactgggcggccatgcccaagatggcgaaattcgccctggtggaaggttggattctggcactggcgatcgtcgtctgctggcgctggcgacagacgctggcgcgtatggcgctgctggctgtcgggctgagtttcggtgggttgctggcgctgtacggacaaacttatcagaccggcgccgacagctgggaactgttccgcgcctgggcgctggtgctgctgccgctggcgctgctggggcgtcagaacggcctgtggatctgcacctgggcggtcgccaatctcgcctttcagttctactacgccaaccaggcgttactgctgattggcgacaacgcctggcaacgcttcccctggtcagcagacggcttgctgtacgcctacctcgccgctcagttgctgtgcctgatactgcgcgaggccctggccggcgccgcgcgccgccggcagccggcgtcgtggctggccaagcgctggccgtcgcgcctgatggccggctacctgctgctgacactcaccttctgggtggccggcacggtgctggactggagcaacgcggacaaccgtctgataatcgtaccctgggcgctgttgctcctgataggttacgtcttttaccgccaccgccgaccggacctgtgcatgctgaccctcggcatggccagcctgatggtggtgggcggcgtagtgattctgcagctgctgtacttctcttgggagaccgaagctctgctgcttatcgcctggggggtcggccacccgatgttgatctgcggcctgatggcgctgtggctgacgctgtgcggagcgtgcctgctgcgctggcggcgtgagatgtacccgcaacaggcgccggatatcgcaccggatgaggtcggcgcgctgctgcaggcgctgcaacagcgccagttgctgaacgcccggcaggcagcggccgtggcaaatttcgatcattccgaacggctgccctggtatctgcgcttcgcgctgacgctgggtggctggctggcggcgatgattatcctgatgctgctcgttctggtgctgtatgcggttggcctgcttggatcgctcaacggcgcttcactggcgttctactcggcattgctggccgtgccggccgctctgtggctgcgcaaaccgacgatcggtcagcagcagattggtatggcctgggccatcgccgccacctacggcttttatctggcgattatgttgatcggcgacgactatgcgcaacccagcatcatgctgaaaatgctgtgtttcctgccggtactggcggtcatggcgtgggcgatgccaaacgcgctgtatcgcctgatggcggtctgcctcggggtctttctgctggtacagtcgctgggctattttagcagccgctatctgccgtcggcgctggctatcggcctgacggcgctgctggtcgcactgctgctggccggctggctgcaacaggttatccgcaacgcatcgcggccggcgacgggcgacggcgcatggcgctacggcattcccgccgggctgatggcgctgtgtctggccgctatccaccacaatctgctgagcgatattttcggcccgtcctccggcagcaccatgctggcgaccatgctcggcatcggcatcgccgtggggttgatcggcagcgcgctggcctatacgcagcgcaccgccgccgacgcggtgccggtctacctgcctgcggcgctgttctgcggcgttatcgccctgttctctcccggcctgggtctggggctgctgctgttgctgaccgcgcgttatctgggcagccggttgctgctggcgacggcgggcggctatctgctgctgtacctgagcgactggtactacttcctcggcatctcgctgttgcacaaagcgctgctgctgatggtcagcggcgtcgtgctgttgctgctggcaatgtgggtcaaacaatggcaggcgcagggaggtaaccatgcagactaa

SEQ ID NO: 444258 - DNA, 534 bp, Serratia marcescens
atgcagactaaatccgtcatcaaatggctgaccgccgccgtagtgctggcggcgctgctgctggtcaatctgtcgatttaccaaaaagaacggctgctcaaacagggccgcgtggtcatcctgcaactggcgccggtcgacccgcgctcgctgatgcagggcgactatatggcgttggactatgcgctggccgcgccgctacgggcgcaggtacgccagctgcagcaagcctgctgggtcggtggctgccaggcgccggcgaccagtggccaactggtggtcgaactggatgcgcaacggcacgcggtcaacgcgcatttttatcgcggggaaccgctgaagccacagcaaatcctgatgcagtaccatctgtcccccaccgggctgcagatcggcacgccgagctactttttccaggaagggcacggcgatagattcgctcaggcgcgttacggcgagtttcgcgtcgatcgggacggcaccgcgctgctgacctatctgcgtgacgccgacggccggcgcattctgccataa

SEQ ID NO: 444259 - DNA, 474 bp, Serratia marcescens
atgaacatccaaatcaatggacggatgataccgctcgacgatagcctccgcgacactcccctgctttacatcctgcgtaacgatctggcgttgaacggcccgaaatacggctgcggcctgggcgaatgcggcgcctgcaccgtactgatcgacggcgtcgccgcccgctcttgttccgttaacgccgccagcgtggtcggcaaatcggtcaccacgctggaaggcatcggcaacgccgaacatctgcatccggtacagcagggctttattgatgaacaggcggcccagtgtggctactgcaccaacggcatgatcatgacgctggtggcgctgtttgaacgcgaaccgcaggccgacgaacagaccatcaagcaagaactggccttcaacctttgccgctgcggcacgcatattgaaattctgcgggcggcggaacgcgccaaacagattctggccgagcggggtaacgcgtga

SEQ ID NO: 444260 - DNA, 2253 bp, Serratia marcescens
atgaacagcatggaaatcacccgccgccgtttactgcaggccggcgggctggtgatggtcagcagcctgttgccggtgtcattcgacgccctgtcggctacgccggccccacgcccggcctcaccgccgcccgaccgcgtcgacagttttattgcgctgtccgccgacggtaaagtcaccgcctttaacggccacgtcgatctcggcaccggggtgaaaaccgccctcagccaaatcgtcgccgatgagctggacgtcgatctggccgccgtcaccatgattctcggcgatacccgccgcacgccgaatcaggggccgaccatcgccagcgccaccattcaggtcacctcgataccgctgcgtcaggcggcggcgcaggtacgccaacatctgctgcagctggcggcgcgggcgttcaacctgccggaaaaccagctggccgccgagcgcggctatgtgttcgagcgcgccaaccgcgcgcgccgtctgagctacggcgaactggcgcgcggccaggatctgcacctgccgctggataccacggcgccgctgaaggaacacgcccaaagccgctatgtcggccggcccgtagcgcgcgtagatattcccgccaaagttaccggcggactgagctacgttcacgacgtgcgcgtgccgggcatgctgcacggccgggtgattcgcccgccgtatgccggcgccgacagcagcgcgccgctcggcaaggcgctggtgtccgtcgatgcggcatctatcgcccacctgccgggcatcgtcaagctggtggtgattaacgattttatcggcgtgatcgccgagcgcgaagagcaggccatcgcggcgatgaaccagctgcgggtcacctggcgcgactggcaggggctgcccgatctggccgccggcctgcacgatacgctgacgacgcacccgaaacaggaccgtatgctgcaggacgacgccggaatcgagcagattatcagcgcgctgcccacgccggtgaacgccgattatctgtggcccttccatctgcacgcctccatcggcccttcctgtgcggtcgccgacgtgcgcgacggccaggcggagatctggtcaggcagccagaatccgcacgacctgcgcaaggacatcgccaaactgctggatctgaccgacgaacaggtgcatatccagcgtctggacgcctccggctgctatggccgcaacggcgctgacgacgtaagcgccgacgccgcgctgctgtcgcaggcggtgggcaaaccggtgcgggtgcagctgatgcgcgaacaggaaaacggctgggaaccaaaaggcaccgcgcagctgatccgggtgcgcggcgggctggatgccgcacatcaggtggccgcctatgattttaaaacctgctatccctccaacaacgccgtgacgctggcgctggtgctcagcggcaaggtcgccaatcaggctgacgtccagcaaatgggcgatcgcaccgccatcccgcagtatcgctacccgcatatgcgcgttgtggcacaggatgctgcaccgatcgtgcgcgcctcctggatgcgcggcgtgtcggcattgccgaacgtgttcgcccatgagtcctggatcgatgagctggcctatctggcgggcgacgatcccatcgcctaccgcctgcgctaccttgacgatccgcgcgcgctggcgctgatcgacgcgctgaaaaaacaggccgactggcagcccggccgcgcgcaccgtcatccggcgcccgcctcgcaggagtgggtcagcggccgcggcttcgcctacgcccgctatttccacagcaaattccccggcttcggcgccgcctgggccgcctgggtgtgcgacgtcatggtcagccgccgcaccggacaggtaaaagtgaagaaggtgtttgtcgcccatgactgcggccgcatcgtcaatccggccggcgtgcgtcatcaggtgcacggcaacgtgatccagtccaccagccgcgtgctcaaggagttcgccacctttgacggcgccggcaccacctcactggaatggggcggctatccgattctgcgctttgacgaactgccggaggtggatgtgcaactgctggataaccccgatcggccgccgatgggggccggcgagtccgcctcggtgcccagcgccgccgccattgccaatgcgctgtttgacgcgttgggcgtccgcctgcgggaagtgccgttcacccccgaacgcattctgcaggccctgaccaccgctcactga

SEQ ID NO: 444261 - DNA, 1299 bp, Serratia marcescens
atgaagagtaaaagcaaaaaagttctcggctggggcgctgcggttgtcgccatcgccgcagttggcgccggcatcgccagctggcagccgtccatcgccccgctgaaggagacggatcaccagacgttcagcgccgaacagatcgcccgcggcgaaaagctcgcggcgctcggcgactgcgccgtctgccatacccgccccggcggtgaacgcaataccggtggcctggcgatgacgatcccgttcggcaccatctactccaccaatatcacgccggatcgcgaaaccggcatcggcagctggagctatccggcctttgagcgcgccatgcgccacggcgtcgatcgcgacggccactatctgtacccggcgttcccgtacacctccttcacccgcaccagcgatgaggatctgcaggcgctgtacgcctggctgatgtcgcagccgccggtgcgctaccagccgccggaaaccaggctgaacttcccgttcaatatccgacaggggatcgccgcctggaactggctggttctgcagcccggcgccatgcagcccgatccggcgcacgaccaggcctggaaccgcggcgcctacctgaccgaagggctgggccactgcagcgcctgccactcgccgcgcaatattctgtttgccgaacagggcggcaaggcgcatctgtccggcggcgtcgccgaaggctggaacgcgccggcgctgaccgcgcactccaacgcgccgattagctggaattacgccgatctgctgggctttatgcgcagcggctattccgccaatcacggcgtggccgccggcccgatgggcccggtggtgaatgagggactgtcgcagttgccggaagaggatctgcaggcgatggccgtctatctggcctcgttcaatcagccgcagccgggcgacgacgcggccacggtgaaacagcagctgctgcaccgcgaggcgcaggcaaaaacgctggcctcggagggcgcacgcctgtattccggcgcctgtatggcctgccatgcgcagtcggaaggagcgccgctggccggggtgcgtccggcgctggcgctcaataccaacctgaacgacgccagccccgacaacgccatccgcgtggtgctgaacggcattgccgcccccgccacgccggcgctcggcaccatgccggcgttcgccggccacctcagcgaccggcaaatcgccgtgttgctgaactacctgcgcaccgagcaggcgggcaaagccgcttggccggatctgcaacagcgggtgaccgcgctgcgcaacgcgcagtaa

SEQ ID NO: 444262 - DNA, 1263 bp, Serratia marcescens
atgagcgaaacgctgactgcgcagacgacggacatgcaggccgccgagcgcgtgatgacgcgcgccgaccggctggcggcgctcagcgaaacgccggacggcctgacgcgcgtctacctttcgccgcagcatctgcaggccaaccggctggtgggccgctggatggcggaggcggggatgcaggtctggcaggacgccgtgggcaatatctgcgggcgttacgagggcgaacagcccggcgcgccggcgctgctgctcggatcgcatctggacacggtgcgcaatgccgggcgctatgacggcatgctgggggtgctgacggcgatcgaagtggtgcaggcgctgcagctgcaggggcgtcgtctgccgctggcgctggagatcgtcggctttggcgacgaagagggcacgcgctttggcattacgctgctcggcagccgcggcctgaccggcaactggccggacgattggctggcgcagaccgacgcgcagggcgtcagcgtggcgcaggcgatgcgcgacgccgggctggatccggcgcagattcatcaggcggcgcgcgccgccggtgaaatcgtcgcctatctggaactgcatatcgaacaaggcccctgcctggagcaggcggggctggcgctgggggtggtgcaggcgatcaacggcgcgcgccgtctcaactgctgctttactggcgaggccggccatgcgggcacggtgccgatgcagcagcgtaaagacgcgctggccgccgccgccgagtggatggtgtttgtcgagcgcactgccggcctgcagggcggcaacctggtggccacggtcggcgatgtgcagtgcgcgcccggcgcggtgaacgtgatccccggcgaggtcaggctgtcgctggacattcgcggcccgcaggatgcgccgctggcggcgctgctgcagacgctgctggccgaggccgaggcgattgccgggcggcgtcggctgcgttttgacgcccaggcgtattatcacatcggcgccaccccgtgcgacgcgcggctgcagacggcgctggagcaggcggtgcggcaggtgcaggggcgttcactgtcgctgccgagcggcgcggggcatgacgccatcgctatggcggaacgctggccggtcggtatgctgtttgtgcgttgcaagggagggatcagccatcacccggcggaagcggtgacgacgccggacgtggcgttggcgattgctgcctaccgtcaggtggtgacggatctggcgcagggagagtaa

SEQ ID NO: 444263 - DNA, 1242 bp, Serratia marcescens
atggctatcgctcaatattcgcaaatcaatccgccgccgcgcctgctgatggggccggggccaatcaatgccgatccgcgcgtactgcgcgccatggcgagccagttgatcggtcagtacgatccggcgatgacccactatatgaatgaggtgatggcgctgtatcgcggcgtgttccgcaccgaaaaccgctggacgatgctggtggacggcacctcgcgcgctgggattgaagcgctgctggtgtcggccatccgccccggcgataaggtgctggtgccggtgtttggccgttttggtcatttgctgtgtgaaatcgcccgccgctgtcgcgccgaggtgcacaccatcgaggtgccgtggggcgaggtgtttacgccggatcagattgaggacgccatcaagcgcgtgcgtccgcgcctgctgctgacggtgcagggggatacctccaccaccatgctgcagccgctggcggagctgggcgctatctgccgccgttacgacgtgctgttttataccgacgccaccgcgtcgctggcgggcaatgcgctggagagcgacgcctgggggctggatgcggtgtcggccggcatgcagaagtgcttgggcggcccgtccggcacttcgccgattactctcagcccgcgcatggaggcggagatccgccgccgcaggtgcgtggaggcggggatccgcaccgcggcgcaccaggacggcgaggaggagatgatctactccaactactttgatctgggcatggtgatggactactgggggccggagcggctcaaccaccataccgaggccacctcggcgctgtttgccgcccgcgagtgcgcgcgtctgattctggaagaggggctggataacggcatcgcccgccataagctgcacggcgatgcgctgctgaaaggcatccaggcgatggggctggaaaccttcggcgatctgcgccacaagatgaataacgtgctgggggtggtgatcccggcggggatcgacggcgatcgggtgcgtcagctgctgctcaatgacttcggcattgagatcggcacctccttcggcccgctgcacggcaaggtgtggcgcatcggcaccatgggctataacgcgcgtaaagactgcgtgatgaccaccctgagcgcgctggagtcggtgctcaatcacctgaagttcgccactacgcagggcgcggcgctgcaggcggcgtgggatcactacggcagcggggatgcggcatga

SEQ ID NO: 444264 - DNA, 738 bp, Serratia marcescens
atgccgctcatcaccattaatcaggtgcagaagtattacggtgacaaccacgtgctcaagggcgtcgatctggatattgcgatgggggaagtggtgtcgattatcggccgcagcggctccggcaaaagcacgctgctgcgctgtattaacgggctggaaggctaccaggagggcagcatcaaactgggcggtatgaccattaccgaccgcgacgcgcaggcgcgggaaatcagccgctcggtcggcatggtgttccagagcttcaacctgttcccgcatatgacggcgctggaaaacgtgatgctggcgccgcgccgggtgctgaagaaaagcgcggcggagtgccgcgaactggctgcccgcatgctggagaaggtcgggctgggcgaccggctggatttctcccccgccagcctgtccggcggccagcaacagcgggtggcgatcgcccgcgcgctggcgatgtcgccgaaggtgctgctgtgcgatgaaattacctcggcgctggacccggaactggtcggtgaggtgctgaaagtgctggagcagctggcggccgagggcatgacgctgattctggtgacccatgaaatgaattttgcccgcgaagtgggcgaccgcgtggtgtttatgcatcaggggcgcgtctgggagcagggcgacggcaacacgctgttcgccaatccgcagacccctgagctcaaacagtttatctcctccgtgcgcggtcttaactaa

SEQ ID NO: 444265 - DNA, 660 bp, Serratia marcescens
atgatggcctcttttaccgactgggatatcgtgcgcaacctgctgctggccggccgctggacggtgctgctgtcaatgacggcgtttatcggcggcgcgctggtgacgctgccgctgttgctgctgcgcctgaacggcggccgccggctcggattgctgattcgcggctacagcgccctgtttcagggcacgccgctgctgatgcagctgtttctggcattcttcggcgttgcgctgttcggcgtggacgtctcgccgtggacggcggcggcgctggcgctgacgttttacaccagcgcatttttgctggatatctggtacggcagcattcgcgccctgccgaaggggcagtgggaagccgcgcgctgcctcggcctgtcgttcggccagacgctgtggcgggtggtggcgccgcaggcgctgcgcatcgccatcgcgccgacggtgggcttcgccgtgcaggtggtgaagggcacggcgctggcgtcgatcatcggatttgtcgagctgaccaaggccggcaccatgctgaccaacgtcacctaccagccgttcaaggtcttcgcgctggtggcgctgggctactttgttttgtgctatccgctgtcccgctacagccgctatctggagaataaattcaatgccgctcatcaccattaa

SEQ ID NO: 444266 - DNA, 666 bp, Serratia marcescens
atgacgcaacaattggatttttccgcactctggccgtactggccggagctgctggcggggctgtgggttaccgtacagctgacgctgctggcgacctgcggcgggctggcgctcggcatcgtcggcgcggccattcgcagcgggcgcgccggctggctgagccgcctgtggggcgcctatgttgagctgatccgcaatacgccgtttgtggtgcagctgttctttatcgtcttcggcctgcccaacctggggctgaaaatgacggcgggcgaggcggcgctgctggcgatggtggtcaatctgggggcctacagcacggagattgtccgcgccggcattcaggtgacggcgaaaggacagtgggaggccggacgggtgctggggctgagccgcggccagacgttcttgcgggtggtgctgccgcccgcgctgcagcgtatttatccggcgctggtcagccagtgcattatcgtgatgctggggtcgtcggtggtgtcgcaggtctcctatgaggaactgaccttcgccgccagcctgatccagtcgcgcactttcctcagcttcgaggtgtatctggtgaccaccggcctctatttgttgctgtccgtcgccatgcgtcagctgatgatggcggcggggcgtaaatggctgggggtggcggcatga

SEQ ID NO: 444267 - DNA, 786 bp, Serratia marcescens
atgagaagaatcatcatcgcactggccggcgccgcctgtctgctggctaacattgccgcggcgcaggccgaccagtggcagcggattgagcagcgcggcgctatccgcattgcggtgccgcaggactttccgccgtttggttcggtgggcaccgatttgcagccgcagggctatgacattgatatggcgcgctacctggcgcagcagatgaaactgaagttgcagttggtgccggtcagcagcgccaaccgggtgccttatctgcagaccgataaggtcgatctggtgatttccagcctcggtaaaaatgccgagcgggaaaaggtgatggattttagccgcgcctatgcgccgtttttcctcggcgtgttcggcccgaaaacggcaccgctcagcgatgccgccgcgctggccggtcacagcgtcggcgtgacgcgcggcgcggtagaggacatggtgctgagcgccattgcgccggcggcggcgcagattaagcgctatgaagacaataacaccacgctgtcggcgtatctgtccggccaggtgcagtatgtcgccaccggcaacctggtggtggcggccatcagccggcaaaacgcggccaaagcgccggtggcgagctttatgctgaaagattctccctgttttatcggcctgagaaagggcgagccggcgctgaaggccaaggtcgacgcgctgattgaacagggcatcaaggacggcacgctgaatgcgctgtccgagaagtggctgaaagcgccgctgccagccagcctcacgctgtaa

SEQ ID NO: 444268 - DNA, 840 bp, Serratia marcescens
atgcaacagcttgatgaacgtttaaaggcgcagtacgccgccctgtcgccgcaggagcagcgcgtggcggattttatctttgaccactttaacgacctgatcagctataacagcgcggagctggcgcggctgagcggggtgtcgaaggcgacggtcagccgtctgttcaagcggctcggctatgacaaatacaaagatatgcgcgatgagctgcgcaccctgcgccagagcggcatgccgctgaccgacaaccgcgacgcggtgcagggcaacacgctgctggcgcgccactataagcaggaaatggccaacctgacccagtgggtcaacgccatcgacgcgcagcagttcgccgaggcgatcgacgccctggcgaacgcgcgccgcatcattattatcggcatgcgcaatgcctatcccgcggccctgcacctgcgccagcagctgctgcaggcgcgcgggcaggtgctgctgctgccgcagccggggcagagcctgagcgaagagctggtggacgcctcggcgcaggatctggtggtgatggtggcgttccgccgccgtccgcgcattgtccgcccgctgctgcagcagttgcaggcggacggcgtgccggtgctgctgctgtgcgagccgcaggcgcacagcctgtttccgctgacgcgctggcagctgtgcgcgccgctggacagcgtgtccgcctatgacagctatgccgccgccaatagcctgatcaacctgctggcgaatgcgctgctgcatcagctgctggacagcgggcgcccgcgtattcatcagatcgccaccctttaccagcagttggacgaactggaacagcgttaa

SEQ ID NO: 444269 - DNA, 1584 bp, Serratia marcescens
atgcagagtaatgtagcgacccgcgggatggcggttacgccgcaccatctggccagccagagcgcgctggcggtactgcgggaaggcggcagcgctatcgaagcgatggtggccgccgccgccactatcgcggtggtctacccgcatatgaacgggctgggaggcgacggtttctggctgatcgtgccgccggacggtgaaccggtggcgatcgacgccagcggcgccgcaggatcgctcgccactccggcggcctatgccgatctgaaacacattccccatcgcggcccgcgcgcggcgctgaccgtcgccggcaccgtcagcggctgggatgaggcgctgcgcgtgtccgccgagctgtgcggacgttcactgccgctgccgcacctactggcggacgccattgactatgccgcgacgggcattcccgtcaccgcctcgcaggccgccgccagtgaggcgaaatacgccgaactgtgtgaccagccaggctttgccgacgcctttttgcccggagggatgccgccgaaggccggcagccgttttcaccagccggcgctggcgaccaccctgcggcagctggcgcaggacggactggacagcttttaccgcggtgcgctggccgagcggttggcggccggcatggcgcagctgggtatgcccgtcacgctggcggatttacagcggcaccgcgcgcgccgcagccggccgttgcggctgcagcaccgggagggagaggtctggaacctggcgccgccgacccaggggctggcgtcgctggcgatcctcggcatcagcgatcgattggcgatggccgacgcggacgaagcaacaaccatccaccgtctggtcgaggcaaccaagctggccttcggcctgcgcgacgcgcatatcaccgaccccgacagtctgaccggcgacagccaggcgctgctcgcaccggcggcgctgcaggcgctggcggcgcgggtggacgaacggcaggcagccccgtggggcgcgggcaaaggcccgggcgatacggtgtggatgggcgtgatcgacaacagcggcctcgccgtctcgtttattcagagtatctatcacgaattcggcagcggcgtggtactgccggacagcggcatcgtctggcaaaaccgcggcgccgccttcagcctggatccgcagcatttgctggcgctggcgccgggcaagcagccgttccacaccctcaaccccgccgccgcgcgcctgaacgacggccgcgtgatggtgtacggttcaatgggcggcgacggtcagccgcagacgcaggcggcgctcttcacccgctacgtactgcaaaacgcgtcgcttcaggagagcatcagccgaccgcgctggctgctggggcgcacctgggggcaaagctccgagtcgctcaagctggaaggccgcttcccgccggaaatcattacgcgcctgcgtgcgctggggcatgaggtggaggtgcttgccgacttcaccgaggccatggggcacgcaggcgccattgtccgccacccggacggcctgctggaaggggcattcgacccgcgcagcaacggcagcgccgccggcttttaa

SEQ ID NO: 444270 - DNA, 189 bp, Serratia marcescens
atgactcatttacccccggactggcgcgcctacctcgcccagatggaacagatcctgatgctggagctggacgatgagcggcgcgcagaactacagcgccagtttatccgcattgccgcgctggcggagccgctgatggcgtttccgctcgatgaacggctggaggttgcaggagtgtatcaggcatga

SEQ ID NO: 444271 - DNA, 1398 bp, Serratia marcescens
atgaaattacatcagttaagcatccgcgatattcagcgggcgctcggcaacggcgaactcagcgcacaggagatcgcccgccgcacgcttgacgatatcgcccgcgtcaatccgcagatcaacgcctggaccacggtcaccgcgcagcggatgctggcggaggcggcgcagattgatacgctgcggcggcaacaccagccgctgccgccgctggcaggcgtcccttatgcggtgaagaacctgtttgacgtggcggagcacaccacgctggcaggcgcgcagctgttcagcgagcggccgccggccgcggccgacagttgggcggtgcgtcagttgcggcaggccggcggtctgctgtccggcatgctgaatatggatgcctacgcctacggcttcaccaccgaaaacagccactacggcgccacccgtaatccgcacgatctgcagcgcatcgccggcggttcatccggcggttcagcggcggcggtcgccgccggcacggtgcacttctccctcggctccgacaccaatggctccattcgcgtgccggcctcgctgtgcggcattttcggcctgaaaccgaccttcggccggctgtcgcgcgcgggcactcagccgtttgtcgccagcctcgaccatatcggcccctttgcccgccgctgcagcgatctggcgacggtgtacgatgcgctgcagggccgtgacccgaaggacgcctttcaggcagagcgcccggcgcagttgaccgccatgcagctgacgcgcggtatggagggcctgcgctgcgcggtgctcggcggttatttcaccacctggtgcgatgacgacgcccgcgacgcgctgcggcgtgccgcccgggcgctggaagcgcatgatgagctgatgttccccgaagcggaactggcccgctccgcagcctttatcctcagcgcctccgaaggcggcaaccagtatctgcccgccctgcgccgcgagccggcgcgcttcgagccgcattcacgcgagcgcctgctcgccggggcgatgatccccgccgcctggtacgtgcaggcgcagcgcttccgccgccatgcgcagcagcagtttatggccctgttccgccatgccgacgtgctgctggcgccggcgacgccgtgctgtgcaacgccgatcggcgcgcaggagatggacattaacggccagccgctgccgatacgcgccagcatgggcatgctgacgcagccgatatcgtttctcgggctgccggtggtcagcgcaccgctgcgcaccgccgccggacgccccatcggtttgcagctgattgccgcgccgtttaacgaacaagcctgcctgcgcgccgccgccgcgctggaacagctgggcattgcggtggccgatgccgcggaggtagccgcatga

SEQ ID NO: 444272 - DNA, 387 bp, Serratia marcescens
atgatcacgcccccagagattaaccatcccctgacgctggccgaagtgaccgccgcgtttgaccgctatgagcaggcgctggtcagcaacgatatcgccgtgctggacgagctgttctggcacagcgaacgcacggtgcggctgggcgccggcgagaatctgtacggcatcggcgatatccgcgctttccgcgcggcgcgccccgccgccgggctggcgcgcaggctgcaaaatacccgtatcgtgacgttcggcgaggattacgcggtctgcagcaccgagttcacccgtgagggcagcacgcgcatcggccgtcagcagcagacctgggtgcgtttcccctgcggctggcggattgtggccgcgcaggtaagtttaatggagtaa

SEQ ID NO: 444273 - DNA, 945 bp, Serratia marcescens
atgaatcaacagccagacacccttcacccggactacccgcgcgatatgcgcggctacgccggccagccgccgcatgccgcctggccgggggaggcgcgtatcgccgttcagtttgtgctgaactttgaagaaggcgcggaaaaccacgtgctgcacggcgatgcgggttccgagcagttcctgtccgatatcatcggcgccgccagctatccggatcgccatatgtcgatggattcgctgtatgagtacggcagccgcgccggtttctggcgtatttatcaggagttccgtcggcgtgaactgccgctcaccgtgttcggcgtggcgatggcgctggcgcgcaatccggagattgtcgcggcgatcaaggccgccgactatgacgtggtcagccacggctggcgctggatccactatcaggatatggcgatcgacgacgagcggcgtcacctgcagcaggcggtgcaggtactgaccgatctgttcggcaaagcgcccaccggctggtataccggccgcgacagcccgaatacccgccggctggtggcggagcacggcggctttgattatgacagcgactactacggtgacgatctgccgttctggagcgaggtgacgtgcggcgacggcacgcgcaagccgcatctgatcgtgccgtatacgctggatgccaatgatatgcgctttgccaccgcgcagggttttaacaccgccgagcagttctatacctacctgcgcgacagcttcgacgtgctgtatgaggagggggcgagctcgccgaagatgatgtcgatcggcatgcactgccgcctgctggggcgtccggggcgtttccgtgcgctgcagcgttttctggactatatccagcagcacgatcgcgtgtggatctgcacccgtcagcagatcgccgaccactggcggcgagtgcatccctggcggggatag

SEQ ID NO: 444274 - DNA, 744 bp, Serratia marcescens
atgtccgcagtatgtatacaagtgatcaaccccaataccgaccccggcatgaccgaaaccattggcgcggccgcccgcgccgctgcagcgccgggcaccgaaattctggcggtgtgcccggcggagggcgtgccgtcgattgaaggccattttgatgaggcggttgccgcgatcggggtgctggaacagatcaaggccggccgcgagcgcggcgtcgacgggcacgtgatcgcctgtttcggcgaccccggcctgctggcggcgcgtgaactggcgcaggcgccggtgatcggcattgccgaggccgccatgcatatggcgacgttggtcgccacgcgtttttccatcgtcaccacgttgccgcgcacgttgattatcgcccgccatctgctgcgtcagtacggcttcagcgaacactgcgccgcgctgcacgccatcgacctgccggtgctggcgctggaggacggcagcggacgggcgcagcacatggtgcgtgaacgctgtattcaggcgatgcggcaggacggctgcggcgcgattgtgctgggctgcggcggtatggccagcctggcgcgggagctgacgcaggagttgcgcatgccggtgatcgacggcgtcggcgcggcggtgaaaatggtcgaatcgctggcggcgctggggctgtcgaccagtaaatacggcgatctggcctggccggagcgtaaggcgctcagcggaaaatttcagtcattacatccatgctaa

SEQ ID NO: 444275 - DNA, 717 bp, Serratia marcescens
atgaaaagcgaaaaccgcctggaaacggcgtccggcctgtatgacaaggatgagtccatctatcaggcgttgatgaacgccatcgttgaacatcagctgccgccgggcagcaaactgccggaagaggcgctgtccgaggtgttcggcgtcagccgcaccggtatccgcaaggcgctgcagcggctcgcggcggtgcaaatggtgcagctggcgcccaagcgcggtgcatacgtcgccagcccgacggcggaggaggcgaaagatattttccgcacccgcaccctgctggaggtggcgaacctgccggacgtgctggcgcgctgtcagccgccgcatctggcggcgctggaggcgattatccgcgatgagcagcaggcgcacgaggagcatgacggcccggcggctatccgcctctccgccgcattccatattcagctgcaggcgatctccgccaatgcggtgttgaccgagatggtgacgcggctgtgccagcgctcctcgctggtgattgccgcctggggcgcgccgtggcggcaaggctgccgctgcaatgatcatgaacggctgattgcactgctgcggcagcgggatttaccggcgctcagcgccgccgtcgaacagcattttgaccatattgtcgccagcctgcgttttgaacgcgcggaactgggtcatcccgattttgtccggctgttcgccgcctataaggagcaatga

SEQ ID NO: 444276 - DNA, 1470 bp, Serratia marcescens
atgccaaacagacaaactacgcgtcagggttacagcccgcggctgtgcaatgaggatctggcgccgacccgcgatcagaactggagctggtacaatatcttttcgttctggatgtcggacgtgcacagcatgggtggttacgtggtcgccgccagcttctttacccttgggctggcaagctggcaggtgctgctgtgcctgctggcgggcattggcattgtgcagctgtgcgccaatctggtggcgaagcccagccagatggcgggcgtgccctatgcggtaatctgccgccaggcgttcggcgtgttcggcgccaatatcccggcggtgatccgcgggctgatcgccttcgcctggtacggcatccagacctatctggcggccaacgcgctgatgctggtggcgctgaagttctggccgtcgctggcggcgctcaccgccgattcgctgctcggcctctcttacctcggctggatctgctttgcgctgatgtggctgctgcaggcgatggtattctggcacggcatgaacgccatcaagcgctttatcgatattgccggcccggcggtgtacgtggtgatgctggcgctggcgggctggattgtttatcagaccgggccggacggcatctcctttaccctggccggcaaatccctgaccgccggcgagcaggcctggcagatgattaccgccaccgcgctggtggtctcctacttctccggcccgctgctcaacttcggcgacttctcacgctacgcgaagaatatgaatgaagtgcgccgcggcaaccgctggggtctgccgttcaactttctgctgttctcattggtgacggtggtgatcgtctccggcacccagtcgctgttcggccatatgatcaccgacccgattgaaacggtcagccgcgtcggcaacgatctggcggtggcgatcggcctgctaaccatgatcaccgccaccatcggcatcaatatcgtcgccaacttcgtttcgccggcgttcgacttttccaactgcgcgccgcaaaaaatcagcttccgcaccggcggcatgatcgccgcggtgggatcggtgctgctgaccccgtggaacctgtttaactcaccggagctgatccactacacgctggacgtgctgggcgcatttgtcggcccgctgttcggcattctgctggcggacttctacctgattaaacgtcagcagctgtcggtggaggacctgttcaacgacacgccggcaggtaaatactggtatcgccacggctttaacccgaaagccatcgccgccctgctgccttccgtcaccgtcggcgttatcctcagctttattccgtcgctgcatgcggtcgccaatttcagctggtttatcggcgtggcgctgggcgcgctggcctaccgctggctggcgcgcgatgagcagcaggccgccgcgccgcgcttcagcgccaaggcgctgctgccgaaggagtaa

SEQ ID NO: 444277 - DNA, 429 bp, Serratia marcescens
atgattgaaatagttaacgacaggaaaatattacgggtgactccctttgagcgggagaatacgccagatatacctcaatatgactggatacagacttacgtggagtacgaactgcctgagcttaaagctcaatatcaggcatcttttaatgttggcgagcttaatatccttaaaaataaactcacagagttacatataaatttagtgaatggcggtaaagctcaggaggtggtttttgatagcacagaaaaccagttgaatctgatattcacgccatcaccttcagggcaaggcgtgctgctgacattaaccctcaggccggaaaaccctgctgaaagtgtagttatcagtgatagtctgggaatggatgaaagttactttcccgcactcatttccgggctggatgaaatcattaattggccgagttga

SEQ ID NO: 444278 - DNA, 675 bp, Serratia marcescens
atgacagttggatttattgccgatgagccaggacgcttttacaccttccagtcaaaattaccttccggtgaatacttcgagttcagcccccgtaaccctcccctgaatgctaagcccattgtagatgatgaaagcgggatgtgtattggctattccgtggcgcaggctcccggtttgtggcggatttatgatgctgatggcgtgttcgtcagactggaagaggcgccattagaagctcccctgattgacccaacagacctcgctttaattgcctttggtgcattccgcctttttcgggttggtaaagcattgttggagagtggcgtaaaaacggctgtaacggtaaaacttagtcaggctaccattagcatcttgcgtggtcgcctgaaaatgggcttatcaggtcgcgcccttaagatgatggcaacaccggctaagcatatgcttaatcccgcacgatacgttcctttgcaactacaggaaaaagttattcgctacggtaaaagaatgcctgaccctaaaaatacgcctggtctttttctttataaatcagagttttataaactcatagagaatcgagccaagaaaggcacctatttccataaaaaatacacgttagaggttctcgtgcgtgagaaggattggacaataactcactttttatacaaggaatag

SEQ ID NO: 444279 - DNA, 333 bp, Serratia marcescens
atgagcaatctgagcagccatattctggatatttctaccggccggccggccgccggcgtcgccgtgcatctggcgcgttatgaacacggcgactaccagccgctggcgagcatgtttaccgacgccaacggccgcatcgccgcctttactccggcggcgctgccggcggggcgttatcgcctgacggcagacatcggcgactggtttacggccgccggacggcagacgccctatgtccacgcgcaaatcgagctgatgctcagtgaggagcagcactatcacctgccgtttttaatcgcccccggcggttggtcaacctaccgcggcagctga

SEQ ID NO: 444280 - DNA, 501 bp, Serratia marcescens
atgaacgcgctcgaacgctttaaccgtttaccgcttgatgaggccattgcgctgctcagcccctgcgtggcgatcccggactgggcgtcggcgctggtgcaggcgcgcccttatgccgatcgcgccgcgctgctggtgcgggcgggggaactgatgcgtcactggggcgacgccgagctgcagcaggcgatgagcgcccacccgcgcatcggcgagcggccgacgggcagtcaggcacacgccgccctgtcgcggcaggagcaggcgtcggtggatcgccatgatgcagagcttgccgaggcgctgcgcacggccaatacgcagtatgaagcgcgctttggccgggtctttctgatccgcgccaaaggacgcagcggcgcggagattctgcaggcgttgcgcctgcgtctgcacaataacgaggcgcaggagcggcaggcgtcactggcgcagctgcgtgaaattaccttactcagactggaaggagtgatcggcgcatga

SEQ ID NO: 444281 - DNA, 1383 bp, Serratia marcescens
atgtcagacgaaaaaaacagcacgctgctttacggtcttgaacagcgcattccgccgctgccggcattttttagcgcgttgcagcacgtgctggccgggctggtcagcattattaccccgccgctgctgatcggcgccacgctggggctggaggcgtggatgccctacctgatcagcatgtcgctgctggcctccggcatcggcacgtttctgcagtctaatcgggtatgggggattggcgccggcatgatctgcatgcagggcaccagctttgcgtttcttggcgtgtcggtggccggcggtctgtgggtgaaacagcaggggggcgggcctgaggatattatggcgatgctgttcggcgtcaattttgtcgccgcgctggtgccggtagtcgtcagccgttttattgaaccgctgaagaaaatctttacgccggtgatcaccggcagcgtgattgcgctgatcggcatcagcctgattaaggtgagcgtgattaactggtgcggcggcgagggggcaaaggattttggcagcatgagcaatatcggtctgggagggctgacgctgggggtgattgtgctgctgagctgcgccggtaaccgctggctgcggctggcgtcgatcgtagtgggcatcgccgcgggctgcctggcggcggcgctgaccggcaacttccatccggcgccgatcggtgaaacctggttccggctgccggcgctgttcccgttcggcttccaattcgacagcgcgatctttttgcctatcgcgctggtgtcgctggtgtgtattctggaggcggtcggcgatctgacggccaacagcctgatctcccggcagccgatcgataacgccgccttccgcagccggctgaagggcggcattctggccgacggcgtgagctgtatgatcgccgcgatgctgtgcgccttcccgaacaccacctttgcgcagaacaacggcgtgattcagatgaccggcgtcgccagccgctatgtcgggcgctatatgggcgttattctgatcctgctggggctgttcccgccgtttggcgagctgctgcgccagatccccacgccggtgctgggcggggcgacgatggtgatgttcggctgtgtggttgccgccggcatccgcatcatcacccagaacccgctgacgcggcgcaccatgctgatcgtcgggctggcgttcggcatcggcctcggtattgaggcggtgccggcgtttctgacccatttcccgccgctggtcggcaacctgttcggttcggcggccaccagcggcggtctggtggcgattatccttaacctgattatgccggaagagaaacatgacgcagtcgttagcaacaggagtcacgatgaacgcgctcgaacgctttaa

SEQ ID NO: 444282 - DNA, 1155 bp, Serratia marcescens
atgaaagcattggtcattggcgccggcatcggcgggctcagcgcggcggtcgcgctgcaacaggcgggcattgagtgtgaggtttttgaagccgtaacggagattaaaccggtgggcgcggccatttccatctggcctaacggggtgaaatgcatgcagcatctggggatgggagagattatcgaaacctacggcggcccgatgcgttcaatggcctatcaggagtaccgcagcggcgcgattatgacgcgctttagcctggcgccgctgattgaacgcgtcgccggccgcccctgcccggtatcgcgcgccgagctgcagcgggagatgctggacttctggggccgtgaccgcgtgcagttcggcaaacgcgtcaccgaggcgcaggaagatgccgacggcgtaaccgtccgcttcagcgacggctccagcgcgcgcggcgatgtgctgattgccgccgacggcagccgttcggcgctgcgtccggcggtgctgggctatgcgccggagcgacgctacgccggctatgtcaactggaacggactggtggagattgatgaagccattgcgccggccgatcagtggacgacctttgtcggtgaaggcaagcgggtgtcgctgatgccggtggccgacggacgcttctatttcttctttgacgtgccgctgccggccgggctggcggaagaccgcagcacgctgcgcgccgatttacgccgttacttcagcggctgggcgccgcaggtgcagcggctgatcgccgcgctggatccggccaccaccaaccgcatcgagatccacgacattgaaccgttcgagcggctgacgcgcggcaggatcgcgctgctgggggatgccgcccacagcaccacgccggatatcggccagggcggctgcgctgccatggaggacgcggtggtgcttggcgacgcgttccgcacccaccgcgatatcgccgcagcgctgcagcagtacgaaagccggcgctgcgaacgggtgcgcgatctggtgctcaaggcgcgtaagcgctgcgatattacccacggcaaagatatggcgctgacgcaggcgtggtatcaggagctgcagcaagagagcggcgagcacattatcaacggcctgtgcgacaccatccagggcggcccgctcggctga

SEQ ID NO: 444283 - DNA, 1353 bp, Serratia marcescens
gtgaacaaggataaacaccttaaaatcggcggcgacccgcgcgcgctgccggactacgccgtgctgcgcgatgaattgatgaaactgtcccacccggcgcggccggacgttgaatggcgcacggtggagtcgctgtgcctacggctgtttgaacataacggcgtggatctgcaaaccgcagcctggtatacgctggcgcgggtgcatattgccgggctggcgggcatgcaggaagggctggcgctggtcaatgtgctgacggcctaccagtggtcggtgatgtggccgaccaatgtgcatacgcgggtggagattattaccggcctcaaccagcggctgcagaatgtgttccgcacgctagcgctggacgaccgcgatgagttggaacggctgtatcagctggaaaagagcctggaacggctggcggagacgctggcgcgccatgagctgcaacaggccagccgtacggaagggatgcagttgcggatccggcaggcgattgcccggctggaaaatatgccgcgcgatgcatggcagcagccggccgtcgcgctgccgccgcaggcggtggtcagccacgccgatgagccggccgctgcggagcctctggtcttggtggtgccgccggagccggcggaggagagggcggcaacagcgccgcgcgccgtgcgccccgtcagggcgtttctggccggcgcctgtagcgcgctgctggcgggcgggctgctgctgtggggctggcacagcctgagcgcgccgtcagcggtagagcaacagctggccgcctcgctgacgccgctgccgggcgcgctgagcagggagcagctaggcgcgctgcgtcatctttcattaacgtcgccgccgcaggccgatgcgttaacggagcaaacccgtcagcaactgcagtggctgatggcgttgccgccggactggccgctgcgttatggtcagcaactgattgaacaggcgcaggccttgtggccggataatcccgaggtggcggaaatgcagcaggcgtggcggcagcatctggaggctaacgcgctgccggcaacctcgctcctcggctggcgcgacgggatgcagaaattgcagcagctgaccagccggctgaacgggctggatgaaaagcacggtaaatatatgaccgtcagcgagctgaaatcgtcggtgttcgccatcacccaggcgtttaaccgccatccgccggcggaagaacgcctgcggcgctatagcgccggccgctcagaggcgcagcgcaaacaggcggcaatggcgcttgagcagctgcagacgcgctactttttacaacagtccgccggcgcggaaaagaggccgggcgaggtgcggtaa

SEQ ID NO: 444284 - DNA, 456 bp, Serratia marcescens
atgacacaggcccacaacgccccctctttatacgacatgctctacggcaattttaccggcggcctcgacctgcccctggtcagcgaagaaaaccaggtgattttgtcggtactggataatctgcagcgcatcctcaacgcccgggccggcacgctggcccatctgccggactacggcctgccggatatgagcaaaatcctgcagggcatgcccggcacggcgcatcagctgatgaccacgctctctgaggtgctgctgaagtatgagccgcgcctgaagagcatcagcgtcgtcatgctggaacagacggcgcccggcgaactgcgctacgccatcgacgccgagctgaaaggcctcgggctggtgcgctacggcaccgaatttatgccggagggcaaagtcttgctgcggcatctgaagcaacaacaacgcattaataccacgcccgcttattaa

SEQ ID NO: 444285 - DNA, 546 bp, Serratia marcescens
gtgttgcgtaccaatttgactaaaaccgcttgtcttctgctgcccgtcatggcgttcggccttgcagggtgcggcctgacccagagcgttaccgatggcgccaaatcgaccgtgacgtccattttttataaaaaaataaaggtgttgcatctggattttgttgcccgtgaggcgctgaataccgatgcgcgcgagagcaattccgcgtcacaaccgctgatgattcgcgtttatcaactgcgggatcgtaaagccttcgacacgctggtctaccggcaactgctgaaggaggatgaaacgctgctgaccggcgatctgctcgcccgccgcgatgtggtgctcaaaccgggcaatgccgccattcttgatatgccaatggatgccgcagcgaaatttgtggccgtcgtcgggctgttccgccagccggatacggagaaaaacagctggcggctggtgttgccacgcgaagcgctggatccggatacggcgcgcgttttagcggcggatggcaacagcctgacgctgctgtcggagcgggagacatag

SEQ ID NO: 444286 - DNA, 1086 bp, Serratia marcescens
atgggaagagaaacacaatcgccgcattcccggctgactccccgcctggaagccgaactgacgcgaataaatttttatcgtttctgccagctgctggaaaagcgccatccgcagcgtccgccgttaggggcgaccagtaaaccgggtgacgatccgctgcggctggtgccccatccgggcatggggtttccggccagtgaactgaaagccgttgaatatcatgaagaggatgcgcatgcgccgccgaaggtgcgcaccacctttatggggctgtacggcgtcgattcaccgctgccgaccgcctatctggacgatattacgcagcgcagggaagggcatgaggcgctgcaggggttccttgatattttcaaccacaggatcctgactcagttttaccgcatctggcgcaagtattcctacccggccacctttgagtccggcggcgccgacgccatctctcagtcgctgctggggctggtggggctggggatcccgggcacggcacatcatattgccaccccggtctcgcgctttctggcgctgttgggcgtactgcgcctgccggggaaaacccaggagggtctgcaggcgctggtgcagctgctggcgccgcacacccgcgtgcgcgtcagtccttattgcctgcgggcggtggtggtcgagcggtcgctcggctttgcggatgatgacgattttttgctggacggcaaccaggtactgggtgaagaagcgatggacaccagcagccagttgttgattgaactggctaccgactgcgagcgggaggttctgggctggatgccggacggacagctctatcaggattttctggtgatgctgcgggtttatctgggctggcgctttaaggcccgcatccggcttgccgtcagcaccggcctgctggcggcgccggcgctgggcgaagcgccgctctggctgggaatgaacggcgtgctcggtgtggcagacgagacgcttcccgcagatattccccggacttttaccacggaactcggctgttacagcggcctgcagccggcagtcacaatacaaggaaaccgacgtgttgcgtaccaatttgactaa

SEQ ID NO: 444287 - DNA, 1755 bp, Serratia marcescens
atggatgacttaaccctgcgttattacgacgccgaaatgcgctacctgctggaagccggcgaagagtttgcccaggctcaccccgaacgcgcggcgatgcttggcctggaccgggccggcgcgcgcgacccttacgtcgagcgtctgtttgagggctttgcctttctgatggggcggctgcgcgagaaactggatgatgacctgccggagctgaccgaagggctggtcagcctgctgtggccgcattatctgcgtaccatcccgtcgatgtcggtggtggagttcaccccggactggcgggaaatgaaagagaaaatgggcattgccaaaggttttgaggtgctctcccggccgattggcgaaaagggcacgcgttgtcgctacaccaccacgcaggagctgtgcctgcagccgctgtcgctggaaacggcgacgctgaccacggacccggacggccgctcgctggtgcggctgcgctttaactgcagcaggctggcggactggagccgtatcgacctccgctgcatcccgctctacctgaacgccgacgcgccgctggcctgcgccatgcatcaggctttcaccatgaatgtctcccgtatgcggctgcggctgccgggtgagaccgacagccggccgctggaaggccattttacggcgctgggctttggtgatgatgacgccctgtggccagcgggcaacagcagtttcagcggctatcagctgttgttggagtatttcaccttccgcgagaagttcatgttcaccggtctgaaggggatggacgccgtggcgcttccggcgcagctggcgtggttcgagatcgaggtggtgctggccgagcgctggcaacacgactttacctttacggaacagcacctgcggttacattgcgtgccggtgatcaacctgtttccgctggagtccgatccgctgacgctcgattcgctgcagaccgaatacctgctgcgcccgatgcgggtacaggacggccataccgagatttactcggtggatgcggtggtgtcgtccggcaaccatacctatgtgccgtttgccagttttcgccataagggcggcatgttgcgccatgaggcgccggaatattattaccacacccgcgtgcgccgggggccgtccgggctgtataacacctggctgatcctgggcggcgaggcgttcgataaccatacggtgccggccaacgaaagtctgtcgctggcgcttaccggcaccaacggccagctgccgcggcgggcgctgcagagcacggtgctggatacggtgatgaaaaccaccgcggccagcattcgggtgcgcaacctctgtgcgccgacgcagccctgctatccgccggaccgggaccgttttcactggcgcgtgctgagccatctgggcagcaatttcctgtcgatgatggataacgccgaggtgctgcgcggtactctggcgctgtatgagtggagcgatagcgagatgaaccgccgccggctggaggcgattgtcgatgtccgccacggcgagacggcgcgttttgaacagggacacctgctgcggggcgtgcagattgaggtaacgctcgacagccagggctttgccggccacggggatatttgtctgttcggtgaaatgctgagccgtttttttgccctctataccgatatctatctgtttaaccgcctgatcatcattttgcaaccgaccggagaacgtctggaatgggaagagaaacacaatcgccgcattcccggctga

SEQ ID NO: 444288 - DNA, 1275 bp, Serratia marcescens
atggctaaagggtattatctggtacagggggatatgaccacctgtggcggtaaaattgttgatggtgcaagcgatcactgtctgtttggaaaagcggtcgcacgtgaacgtgatcgggtgacctgtggtcagcatcctggtatgtatatgattgctggcggtattgcgaatgatactatccatggtcgaaaaatggccggcaccctggatagcatcagctcctgcccttgcagggcgcggtttgtgccgtcgatgatgcgggatacttatgagaaggtggagggcggttcatctgcagaggaagattctgccgcaggttcagcgcagacaggtaatgtcccgcaacctctgcctgcgtatttgactggtgagaaaccagcattgggatatgtaccggattatcccgtattaaaaaacacccatgtagtgcccgacaataatctacgaacaatgttagctggtaataatcagaatattatgttgctaacacttggtgaggttcttgaatatcttgcatcagtgggagtatataaaagtggctggagaactatcacgcaagaccagatgggagagttcgttgtcaattatggtacgaacattaaagatacgtattcaacgtcaaagttaatatatcagcttggatcttttggaattactgccactgtatatgttaatcataagggtacggagttaataaaaataagtggctatgctgggatcaggaaaatactaaatgctccggtatttgcggctaaaaatcccaaggtaattaagtatggtataggaaagtatggccttaataatgcagttaaacaaggctttatcttcggttttttttatgtttctgccgtagatacaatagacttcattcttaacgatgcgactacgctggaaaaatttatcggtaaatgggcagtggatgtcttaaaggttggtatctcatcagcgataacttggggggcgggcgtttatgctgttggtgtattctcaacaattgcagcaccagtagttgttgtattggttgctggagcactttctgcatgggctcttaataaattagatgatgagtatgaaatcactaacaaagttatttctcttattgaatcagcgcaacaggagttcgttggtaaagcaaaggaaatggagaaaggtctatgggatctgggtgcaatgtatgttgatggtatgctgagacgggggagaacagtcattgagtatgaagtaaagaaatacataagaaaatctttggataatctgtcaaaggagtttttttaa

SEQ ID NO: 444289 - DNA, 1593 bp, Serratia marcescens
atgagccagctgcaaaatttagtggccgcctgccaggcggatgacggtgagctgatacagcaggcgcgtcgctatgtgcaagagtggcaaagctggctactgccgctctctgccgaaaatcccacgggggaagaccctggctacgacgatgattttcagcgtatccgcgaggaggtcaatcagctgtctggcattgataccggcctgatttgccaactggcggaaaggctgctgacgcagcgctgcaaggatattcgtgtcgtgaccttctacatctgggcgcgcctgcaccaggacggcgaggcggggctagcgcaggggctggaactgctggccgcgatgctgcagcagtttgacggcgggctgcacccgcagcgcgagcgcagccgtaaaagcgcgctggagtggctgggcagcggccggatgctcgacagtctgttcctgtacccggaggttgatccggccacgatgcggcgcgtgacgggcgcgctgctgctggtcgagcaggccatggaacggtgggatgaggcgagccgcccccggctgtcagcgctgtatcaggcgctggaaacgcgactggcgcaaaatggcggcgccggcacgctggtgccgcagaccagccgtgaagaaaacgcggagccggcgtccgccggcgcggcgctgccgacggcgcatgccgtgaattcagggcgcgatctgcttgatcaggcaaaaatgctggcgaagtatctgcgcgattgcgaagggggctggctggccggccaccatctgatgaaaagcgtccgctgggataccttaacggcgctgccgccgctggacgccagcggccgcacgcgcctcgctgcgcccaagccggatcaccgtgcgcacctcaagcggctgtacctccagcagagctgggcggaactgctggaactggcggacaacctgtttgctcagggagttaaccatctgtggctggatgtgcagtggtacatctggcaggcgctgcagaaaaccgaggcggacacggtgcgggcggacattatcagtcgcgatttgcggggcttgcttagccgtttgccggggctggagtcgctggcgtttaatgacggcacgccctttgccgatgaagtgacgctgggctggattaaccagcgggtgctggacgatcccacgggctggcatgaggggccgctcagcgttgcggtggcggatgatgacctgctgacgctggagccggaagtgctggccagagccgacagcgacggcattgaagccgcgctgggctggctgcaggcgcggccgggcgtcacgtcgccgcgcgatcgctggctgcagcgcctgctgatggccagagtcacggagcagtacggcaaaaacgagatggcgctgcatctgctgggggagctggacaacagcgctcaggcgctgacgctgagccagtggtcgccggacatggtctttgaggttaaagcccggcgcctgaagctgctgcgccagaaggccgcgcgtagcgaagcggataaagcccgtcagcagccggagatggacgcgctgctggccggcctgatcgccattgacccggcgcgcgccgcagtactgtgcggttaa

SEQ ID NO: 444290 - DNA, 3444 bp, Serratia marcescens
gtgaggtttactacgtttttaccccgtacaacggaaggtcgttatcttaccgttgccgtcgtctttttgattctgctgggcttcatgactctggtggtatggctacgcccggaaatggccgggctaaccagcggcagtgaacggcagacccactggctgattgccgggatctgcgttacggcctgtacctttattgcctcgctgtttttactgctggcagtacgcggggccggtcgaaagacgtttgacgatattgtggatgccgttacgggcgacgacgaagccgttaaacaagagcataagcaagcgcctttatcgccggctatcgtcctgtgtaacgagatagggaaacatctcacctcacgctatggatggcgctggcgtagcaaggtacgcctgctgttgataaccggggatgaaacagcgattgcacagctggttcccgctctgcagaccaaccgctggctcgagggcagccgaaccgtgctgatttatggcggcactctcgctgccgaaccggatgccgaaaaatacgctgccctgcgcaggctgcgtcgcggccgcccgctggacggggttgtccgcgtgctgaatacagaccagccgttgacgccgcagctgagtgatagcgatctgcgggggctggaaaaaatcggcgacctgttgcgttaccagccgccggtctggctgtggcagttgtgcagcagcgattggccgcaggcggggcggcagccccaggcggtaggcattacgctgccggcgcggggcagcgcggacgatgcggcggcccggctcgccgagctgctgccgcagctgcgtgaacagggtctatcccaggtggcgggaaaccgggcctttgattttctgctgcgtctggcgcagtggtttgaacagggcggcggcgcgcggtggaaaaatgcgctggcaccgtggctgtacggcgcgcagcagcgcgtgccgctgcgcggtctgatgttcagcctgccggatgcggttgacgaacaggctcaagggagcagggagagcgtctctacggcgttgcccccgcatgccgttaccttctccgacgcctggcagggcatccttgatgaccgcgtccgcggccgccgggtcggcatggcctgggaacagacgctggcgctggcggtgatggccggcatcgggctgtgggccgtggggatgacgatttccttcgttgccaaccgccagcaaatcgtcacggtggcggacaaagcgcaggcgctggtcgcccggccggcggtgacggatgcgcagctcggcgctttgcatgcgctgcgcaacgacgccggccgtctgcagcagcatagccgcgcaggcgcgccctggtatcagcgtttcgggctggatcacaatccgcagttgctggccgcgatgctgccctggtacggcgtggcaaataaccgcctgatccgcgatccggccagtgatgcgctgcggcaaaagctgacccagctggtgaattctccgcccaacagcccgcagcgcatcgcgctggccaaacccggctacgatcggctgaaggcctggctgatgatggcgcgcccggataagatcgacgccgctttctatgcgcaaaccctgcaggcggtgcagcctgcgccccgcggtatttcccccgggctgtggcagagcctggcgccggacctgtgggcgttctatatcgccgagctggctcatcagcccggctggaaaattaccccggatgcggcgctggtcagccagagccgtcaggtgttgctgcagcagatcgggcgtcgcaacgccgaaagtacgctgtatgagaatatgctcaaatcggtgcgccgtaactttgccgatctgcggctggaagatatgaccggcggcaccgatgcccggcggctgttcgacagccgggaggtggtgccggggatgttcacccgtcaggcctgggaagggggcattcagcaggcgatagagaaggcggccaacgcccggcgcgatgaaatcgactgggtgctgagcgacagcagccagggcgtcgcggcggatatctcgccggacgcgttgaaggcccgcctgacgcagcgttacttcacggatttcgccggcagctggcttggtttcctcaacggcctgcactggcagccggccagcaccattgccgatgtgaccgaccaactgacgctgatgagcgacgtgcggcagtcgccgctgattgccctgatgaatacgctggcctggcaggggaaaaccgggcagaagggcaaggcgctgtccgattcgctgctcaagtcggcgaaagagctgatccacagcgacagccggccggtcatcgatcagagcgcggccgggccggttggcccgctggatgaggctttcggcccgctgctgaccctgatgggcaaaaatccggccggtcaggtgatggcggccgatggcacccttagcctgcaaatctacctgacccgcatcacccgcgtgcggttacggctgcagcaggtggccagcgcctcggacccgcaggaaaagatgcagacgctggcgcagacggtatttcagggcaaaagcgtcgatctgaccgacacccagcagtacggcagcctgatggccgccagcctcggcgaggagtggagcggcttcgggcagacgatgttcgtccagccgctgacgcaggcctgggaaaccgtgctgcaaccgtccgccgccagcttgaacggcaagtggcgcagggcggtggtcagcaactggcagagtgccttcgatggccgctatccgttcgccgccagtaaaagcgaagcctcgctgccgatgctggcggagtttatccgcaaggacaccggccgcattgaacgttttctgacgcaggaactgggcggcgtcctgcataaagagggcagccggtgggtggtggataaaaccaacagtcaggggctgaacgtgaacccggcgtttctgaaagcggttaaccagctcagccagctgtcggacattctgtttaccgacggcagccaggggatcggctttgagcttcaggcccgtccgacgcctcaggtggtggaaaccacgctgactattgacggccagaaactgcgttacttcaatcagatggctgaatggcaggctttccgctggccgggagatacctataagccgggcaccatgctgacctggagcagcaccaacgccggcgcccggctgtttggtgactacggcggcacctgggggtttatccgctggctggaacagggcaaacggagtcagctggatcgcagccggtggatgatgagcttcagcgcgccggatggccgcacgctgcagtgggtgctgcgctcacagctgggcagcggcccgctggcgctgctgcaactgcgcaactttaccctgccggggcagatcttccgcgtggctgagcaggcgctggcggaatctatggatgatgttgagatgaacggagtgaagtaa

SEQ ID NO: 444291 - DNA, 1209 bp, Serratia marcescens
atggcgtattcactgaagaatcttcctcccctttatccccggccattgcctcccaaggcatcgcgctggttgatatctctggcgacaatgctggcggtcagcatgatcctgatgcgtctgtttggccgctatattgacggccaggatttctggttgctagcgctgggtgcgccaggttttatttggggagttgctgtctccggccgtctgcttatctggatgctgaaggatattaccgcgaacggtttcgataaacggcgtgaggcgtggatcttgcacgaaacgcgtagagcgcggcgcgccatgcaggtactggggacctcattggttaccggccatcctgataactcctgtgaggaggtcgtggccgcgatgctggcaaaccagaatattatcgcttcgcaggtggattggcagggtaatgaaggccaacgtctgagccgtattgacgctgaatcgggtgaaatccctgcagcggttattgagcgcatgctggttcagttgatagaagatttacccctgacgcagctccctgattcggcctctttggtggtggcgtttgatgtttcttcctcatgctccctgcctgacgtttatgatgcctggcgggcggcctgggatgctagtgaactggcgctttccgttgagttagccgagagcggcgggctggcgtgcctgaatcgatggctggataaccggatccgggataacgccttgttgctgattattgggttgcaggtggcaccgtatcagacggattacagtgcggaagctgccgtagcattactactgggcaaccgcctgacgcaggaaacgttgttacctcattcatttcttcatcgtcccgagccggctttacccggccagcttgaggatggcatgtgcatggcagcctataacgtgcctttaaaagaacatgcggtaactcatctgtggttggctggcctgagtcaggtgcagttggctgatgtcgtcacgcatcaacagaagtatccgctacaggacatcgctcaagaagccgtcatcgcgttggacaatactatgggccatgctggtgccgccgcgccatggttggcgattgccgccgctgcgcaggttgcccgtgactctcaacagtcgcagatagtcatctgcggcgatcttacacaggatgtgctgtggagcactctcattacctcggaagcgtatcgaaaggagatggattcgtga

SEQ ID NO: 444292 - DNA, 750 bp, Serratia marcescens
atgaagtttaataaacctttactcatgtttttctatttttttattttgtccattactacgaatgcgaatgcggcagataggagggatgtggttgttaattttattagagatggagtgaaagggtatgttgaattaaaatataaaaacggtaataaatatttatgtgagatcagtgaattgggagggatatatgattttgctccaggggaagcgtcattaactaatgatggaaaagcaatacttatttactcttggaatgtatatataaaaactgatgagttggcatactgtgggagtaaactattaaggctacataaaatccctatggataataatgatatttatagtattgtcgatattaacttccataaaaagatgattttggcacttgttgttattgatgcgcaaaccagttcatatcaggcactggtatcttattttaatagtgatgaaaatcttttctcgggtaaaggtttttggaatgataatgtagatgatgtcgatgttaaaaatgacactttttatgtggatttggatgatttctatcttggacggatatcactaagtggaagattcttttcccccagtactctagactgttccgctgattcttttcctggtgtttgggacgtgaaaaataggaaaaaggttgtttttcatgacagtgatgagtcagttgttaagtggaaatgcaaagagatttttgaaggaaggaaaacacctgagcaattaagtgaggggggtggatga

SEQ ID NO: 444293 - DNA, 1605 bp, Serratia marcescens
atgattatcagcccaccattattgaaaagcaaaacagaaccagagacagacaacgcctggattgcgagagtcatgaaggaagacggcgggagagaatttccggttaacgcggccggttcctggcatggtggcatacatatccgtcatacggatgatggaaccgggagagccgagagcatcagggcgatagctgatggcatcgtggtttcgtttcgtaaggcgtctggggatataaagagggattcggccccattgaatatgaatgccgataaggcgaaaagcaaaggcagtgatgatggctatatactgctaaaacacgagacagagattggtagcggcgacagcagcaaggttgctttttactctttgtatatgcatctgaagtcactgacatcgaaagtcaaaggtggtgaaaagatttatcgtaaagatgcgctgggtacatccggtatggtcgatggcgtgaacgccttccactttcagatattctgcgatgatgacaatatggccaagctggttggccgtaccacacgggagttggatatcacaagggatggccgaacggatgcggtatacggggatatccatttttatctgcctgctgggacgaagttctaccgtaatgcgcccgtgaacaatacgtcatcgacgacgggtctggcagaggtacacacttcctgcatgccgctgtatgtcagtatgacgctggagaagggaaactgcacgatggtcactcgtcagcaggagcctggcgcagagggggtattcacagccgttggcgcaccgctgattaacgccgatggcaaggattacgaatataacctttataaaacagccatgagactctatacacagagccccagcgccggttttgaactgctgcgttttggtcggattatcaatacggaacatgagactctggtgccggaggatgctccgctttggcgaacggttaattttccgggtggaaagggcatggtcaacctggcggtgccggagattaaaaagttcagcgatgcggattttccacactggacggggtggcaagccgtcgatgacgatcaggacagcaacagccagtgcaactcagctcgcattaaaaaatggcaggaagcgggtgtgtatgatgcactgaagaaccgtttgatctgccattttccgctggaatgggaaaaaagcacgatagatacacgtttttcctggctgagaacgaatgccgacgctccgatgagcgaagaggattatactaagtttaagttacatgcagaggcattgtgttttaacaccggtgacttagggaaaaagagagtgtggcattttaaccctatggaatttatagaacactttaggaaatgtggttggatagatcgtgaaaaaatcgagaaaattatgactttcgatatacggagttctgtaaaggtaaacaaaataaagtcagctgcgagagagtattattcttatttaaatataataatgaggaagtacaatatttccacacctaatagaattagtcattttttcgggcaaggggccgttgagtctggttatttaatttcaatgcaagaagtaagtcagcgtcagatagttaaagatggaaaaaaatag

SEQ ID NO: 444294 - DNA, 459 bp, Serratia marcescens
atggaactcgatatcaacaacaagatttatcagactgatgcggacgcggatacgccgctgttatgggttatccgcgacgatctggccatgaccggcacgaaatatggctgcggcctggcgcagtgcggcgcctgcgcggttatggtggacggccaggccgtgcgttcctgcgtgacgccgctggagaccgtcgccgggaaaaaaattaccactattgaggcgatcgaaagtgatgacgtcggcaagcgcgtggtggcggcgtgggttcggcatcaggtgccgcaatgcggttattgccagtctggccaggtgatggcggcaaccgccttgttaaagcataacgctcatccttcggacgaggagattgctgcggcgatggtgaatttatgccgctgcggtacctacaacgctatcagcgccgccattcatgaggttgcgggggagggagacaacgcatga

SEQ ID NO: 444295 - DNA, 2238 bp, Serratia marcescens
atgaaacgacgcgatcacgatctgacagctctggatgagcaaccggttaacctttcacggcgtcgttttctgctggccggcggcagccttgccggcgctttggtgctgggcgtcggtttgccgattgggcagagccgcgctcaggcggctgaagccgttttagcgccggggacgcgggtgccggcattcctggaaatccgccccgacagctcggtgaaattcctttcgccgtttatcgagggcggacaggggatatttaccgcgatggcgcagatagttggtgaggagctggatgccgatccggagacctttatcgtcgagaatgcgccggccggttcacaatatcaggtgatggagggcgggatgcgcatcaccggcggcagccagtcggtgcgggccagctacaccaccatgcgtcgtctcggcgcgctggcgcggcagatgctgctgcaggcagcggcggcggagctttccgtgccgattgaccagctgcagaccgagccgggacgggttattcatgcggcttccggtcgttcgctgagctatggcgaactcgccgcccacgcccgcgatttatccgttccgtcgccggattcagtgacgcttaaagatcctgcccgcttccgttggatcggcaaaccggttcagcgcctcgatatgcatgaaaagtcgacgggcaaggccgtctataccatcgactgccgcgttgacgacatgttgcatgccgccgtccagcatgcgccacggcttggcttgcatgccggcaagttgcgtaatgaagataaggtcaaggcgatgaaaggcgtgcactcggtacatgtactgccgggggcggtggccgtggtggcggagcgctggtggcaggcgaaacgcgccgccgaagcgctgcaggttgagtggctggagcctgacacgccggacggtaactatatgcctgccgatttctcctctgaagcgtttgccgccgtgctggcgcaggagccgggcaagggcgaagacgcggaagtgaagggtgatatcgcgcagggaatgtcagcggcggaaaccacgctgagcgcgacctatcacagccagtatctcaatcatgcccagcttgagccgccttccgcgctggcgcgctttaataacgacggcaccctggagctgtggataccgaatcaggcgccggaaatgtttcaggccgacgtggctaaacgcaccggactcgcccctgaaaaaatcattatccattcaccgctgctcggcggtttctttggccgccactttgtctatgacaccgcgatggtgtatccgcaggccattgcgctggccaaagcggttggccggcctatcaagctgatctggagccgggaggaggagtttctgcgcgacacccaccggccgatggccgcggtgcgtttccgtgccgggctggatgcgcagggctaccccgtggcgctggaggcggtcagcatctgcgaagggccgacggaagggcaggcaggcaaacacggcgagcagctggatcccacggcattggaaggcttgacgggtaaagcgtatgccattcccaacgtgcgtatcgcgcagatctataaaaagggcccggtcaagctgggctactggcgctcggtgggcaactcaatgaatgattttctctatgagtgtttcctcgatgagatcgccgataagagcaagctggatcctttcgccttgcgactgcatttgttgaaggggaatcaacggctgacgacgttgctcaacacagtggcggagatgtccggcggctggcaggccggcccttataccgcgcctgacggcagccgccgggcgcgtggggtggcgatggcctcgccgtttggctctgaggcggcggccattgccgaggtttccatcgagaatggtcaggttaaggtgcatcaggtctgggaggcgatcgatcccggcagcattgttaatccggcaatcattgaggcgcaggtcaatagtgcggttgcccttgggctatctcaggtgctgctagaagagagcgtgtatgaaaaaggccagccggtcgcgcgcaattacgatatgtacccgattctgccgccctcgcgcatggcgccggtgcaggtacgcattgtggagagcggcgccaaaatgggcggcattggtgagccgccactgcccgccataccgccggccgtggcgaacgccgtctcccgcttgaccggcgagcggatccgctccatgccgctgtcacgttttaacttcagctga

SEQ ID NO: 444296 - DNA, 1353 bp, Serratia marcescens
atgaaactgaaaaggctcggcctgatagtggccggtttggtgggcgtcgccgcggtggcgaccgtgtggctgctgcgtacgcctgcttcaacgtttgatcatgagccgacggacacgtcggcaatctccgccgatctgattcgccagggggagtatgtcgcccggctcggcgactgtgtggcatgccacagcacgccggacggcgcgcctttcagcggcggcctggcgatggcgacgccggtaggtaaaatctacaccaccaacattacgcctgatgacgagaccggcatcgggcgctacacgctggccgatttcgatcgcgcggtgcgccacggcgtcgcacgtgacggccatcgcctgtacccagccatgccgtttccttcttaccagaagctgagcgatgaggacgtggcggcgctgtatacctttatgatgcagggcgttaaaccggtatcccgccagaatagcccgacagaaattccgtggccgctgaatatgcgctggccgctggcgctgtggagcgcggcgttttcccgcggcgggccttatcaggcgcaggagggccaggacgaacagtggaaccgtggcgcgtatctggtggaggggccggggcattgtggcagttgccatacgccgcgcgggctggcctttaatgagaaggcgctggacgccggcagccaggagtatctggccggtgcgctgttggacggctggtatgcgccaagtctgcgtaacgatgccaataccggcatcagccgctggagcgaagaggacgttgtgacattccttaagcaggggcgcaaccagcacgccgtggtgttcggctcaatgactgatgcgttcaacaactcaacccagtttatgagcgatgacgatctgcgcgcgatcgcccactatctgaaggcgttgccggccggcagtaataacagcggcaacgcctggcgatatccgcaaggagaagcctcagctgctgtgccgggcggcagcgggagtcatcccggcaggcagacctatatggcgcgctgcagcagctgccacggtgcggatggtcgcggtcaggcgccgtggatcccgccgctggccggcgcgacgtcaatgcaggttgatgcgtcgtcttccatcaacgtggtgctgaacggctccgcgcgtattgtggccgacggcgtgccggatgcttaccgtatgccgccgtaccgtaaacagcttaccgaccagcagaccgccgacgtgctgaactttatccgtacctcatgggggaatcagggcgcggagacggatgccaaggcggtaggggagctgcgcgagaaaaccgatcccgccagcagcaacgttattatcctgcagatgcgttaa

SEQ ID NO: 444297 - DNA, 1476 bp, Serratia marcescens
atgcttaacctgagcaacttcaggctggcggacgtcaagaatgaagtcctggccggctttgttgtcgcggtatccatgatcccggaagccgtcggcttctccctggtcgccgggctgtcgcccatcgtcggcctgcataccgcatttattatcggcctgaccacggcgctgttcggcggtaaacccggcatggtgtccggcgcggccggctccatcgtggtggtgttaatgagcctggcggcccagcacgggatggattacgtgctgtgggcgaccatttttgccggtgtgattcaaatcctgatcggcattttccgcctggggaaatttattcgtctggtaccgctgccggcgattcatggcttcgtcaacggcctggcgatcgttattatgttggcgcagctgcatatggtcgccgggcaggggccgctgatgtacggcttggtgctgctggcgattctggtggtggtattcttcccgcgtctgaccaaggcgatcccggcatctttggcggcgctgatcgtggtgtcggcgctggcgatcgggtttggactgaatacgctgcgggtgggggatttggcggatatctccggcagtctgccgcactttagcctgccgatggcgacgtttacgctcgatatgctgaaggtggtgctgccatacgccgtgattatcgcgctggtaggtttgattgaatcgctgttgaccatgacggtgctggatgaaatgggcaacagtaaaggcaacggcaaccgtgaaagcatcgcccagggggcagggaatactatttgcgggttgtttggctgctttgccggttgtgcgatgatcggccagtcgatcatcaacttcacctccggcggccgtggccgcatctctgcagcggttggcgctattttgctgattctgtttgtggtcagcctgtcatcctacatcggttatattcccgttgccgcgctggccggcattatgctggtggtgtgctataacaccttcgagtggagttcgctgcgccgcttaaaaagaatgccgaaagaagacgcctttattctgctgaccgtcaccgttattacggtatttgcagatttggccgtggcggttatcagcggtgtcattatttcggcgctggtctttgcctggaaacaggcaaaaatatctatccgtgataaaaaagaagaaaacaacaccgttgtttattctttagcggggccgctctttttcggatccacgacggactttgccgagctctttgaccctgcacacgatccggcgttggttattttagactttgcacagacccgggtgatggattccagcggcgtagaggcgattgataagctcacggcgcgctacctggccgccggcaagacggtgcgtctgcgtcatctaagcgctgactgcgtcagtctgctgaagcaggccggtccgttctgtcttcatgaattggacgatcccacctatcgcgttgccgcagactaa

SEQ ID NO: 444298 - DNA, 603 bp, Serratia marcescens
gtgaatctctccgtgagcagtatcaaattgattgtcggcctggccaaccccggcgccgaatatgcgcaaacgcgccacaatgcaggcgcctggtacgtagatcaactggcgcaacgccataaccaggcgttgaaagaagaaggcaaattcttcggctataccgcacgcctgaacctggccggaaacgacgtccggctgttggtgccaaccacgtttatgaatttgagcggtaaggccgtggcggccatggcgtcgttctatcgcatccagccagatgaaatcctggtcgctcatgatgagcttgatttgccgccgggcgtcgccaagttaaaactgggcggcagcaacggcggtcataacggcttaaaagatattcagagcaagatggcgaacaacccgaacttttatcgtctgcgtattggcatcggtcatccgggcgaccgcaacaaagtcgtgggattcgtactgggcaaaccgccggccagcgaacagaacctgatcgatgaagcaatagacgagtcgctgcgctgcaccgaagtgctgttaaaagacggtatgaccaaggccatgaaccgtctgcatgcatttaaagccggtaactga

SEQ ID NO: 444299 - DNA, 861 bp, Serratia marcescens
atgattcagcagtggccctcgccggcaaagttaaacctgtttttatatatcaccggccgtcgtgcagacggctaccatcagctgcagacgctgtttcaattccttgattacggcgacacgctgaccatcactccacgtcaggatgataaaatctgcctgctgacgccggttgacggcgttgaggatgagcacaacctgatcgtacgcgccgcccgcctgctgcagcgttactgtgatgaacagcagatcgccaccccgccgcgcggcgccgacatccgggttgagaaagtgctgccgatgggcggcggcctaggcggcggttcatcaaacgcggcgacggtgctggtggcgctgaacagcctgtggcagtgcggccttagcgacgaacggctggccgaactgggtctgagcctcggcgccgacgtgccggtgttcgtgcgcggccacgccgcgttcgccgaaggcatcggcgaacggctgcagcctgccgatccgcaggaaaaatggtatctggtcgcccaccccggcgtcagtattcctacaccgctgattttcggcgatgccgaactgaaaagggatacgccggtgcgcacgctaaatgaactgttgcaattaccgtacgccaatgattgcgaaccgatcgcaagaaaacgttttcgcgaggttgaacagcttctttcttggctgttacaatacgcgccgtcacgcctgaccggcacaggtgcttgtgtgtttgcagagttcaacaccgagtccgaagcccgccaggtgttaaatcaagccccggcgtggttgcgtggttttgtagcgcgtggcgttaacatttcaccactacatcgtacccgttccgggcaaatttga

SEQ ID NO: 444300 - DNA, 624 bp, Serratia marcescens
atgcctatccgcaaagtcagtttgctacgccttatcccgctggccagcctggtgctggcggcctgtaccaccaccagaccgaccggcccggccaccagcccgacgtctcctgagtggcgagcccatgagcaagcggtgcagcagttaaaccagtatcagacccgcggcgctttcgcctatctttccgacagcaaaaaagtctacgcccgcttcttctggcagcaatattcgccggatcgctaccgtctgctgctgaccaacccgctcggcagcaccgagctggagctgaacgtgcagaaaaacgtggtgcagctgaccgataatcagggcaaacgctacgtcagcgacaatgccgaggagatgatccgtaagatgaccggcatggcgattccgatgaataatctgcgtcagtggatgctcggcctgcccggagaagcgaccgactttaccctggatgaccgctaccgcctgagcaaactgaattaccagcaggaaggcctgagctggaaagtcagctatcaggactataacagcgatattcagccccagttgccgagccgtctggagctgcagcagggcgaccaacgcatcaagctgaaaatggataactggacgctaaaatga

SEQ ID NO: 444301 - DNA, 1152 bp, Serratia marcescens
atggcacataaaattagtcgtttagcccgcggcgtggccgttggtctgatagctggctgcaccgcctttgccgcgcaggcagaaatcaccttactgaaacaggatccgcaggccggcgatccgctgagccgtctcaacttcaccgtcggcggcagcatccgtccacagttcaatatgatgaccggcgacggcgataaaggctcttacaaacgcaacggctttgacggcggcacccgcttccgctttgccgctgactactacctgttcgatgacatcagctggatcagctactacgaactgggcgtcaacatcccggcgctgtttgactgggacaaccactacgccgacggcgccaacaacaccagccgccgcatgctgtacaccggcctgaagagcaatacctggggccagttgactttcggccagcaaaacagcgtttactatgatgtggtcggcgccaaaaccgatatctgggattacgacatgctcgcccaggcgccgggcaacggcatcaatggcgactacgacggctcttaccgttcccgcaaaatgctgaagtacaagaagaccttcggcgatgccgacgtctacgcctcttacctgttcaacgacagcgactacctgccgggcaacggcctgcgttataagcgcaaaggcggcggctcactgggcgtcgattaccatctgacccgcgacctgacctggggcaccgcgtggaactacacccgtgcggaaatgcgcgatccgaccggcggagacagcaaaacctacgaccagaacatcctgggcacggcgctgagctggaagcctgacaactggaccttcagcttcggcggcggctggtacaataacttcctgaccaccaagcagaccgacgtgcacaattacttcgccggcgacgcctggggtattgaatactacgccggctacaccgcaccggtcggccagtatgcgctgaaatccgtcaccccttatgtgatgggcgaccgcttggaatacgtcagcggccgcaactatcagcgtatcgataacggtctgggcgtcaccttccagttcgactacggcttccgtaccgatgtggaacacgtgttcacctccagcaccgacaaccttggcgatatgaccgtcgtacgtctgcgttacgacttctga

SEQ ID NO: 444302 - DNA, 840 bp, Serratia marcescens
atggattatcaaagctggctgaaggcggcaacggcccggctgacggagagcgacagcgcccggcgggacgcggaaatcctgttggggtttgtcaccgggcgcgccagaacctatctgctggcgtttggcgagcgttgcctgacccctcaggagatcgcccggctggaaatattgctgacgcgccgggcgcgcggcgagccgattgcctatctggtgggcgagcgtgaattctggtcgctgccgctgtctgtttcccccgcaaccctgattccacggccggacaccgaatgtctggtcgagcaggcgctggcacgtctgcctgccggcgcctgcgccattctcgatctgggtaccggcaccggcgccattgcgctggcgttggccagcgaacgtcccgactgtacggtaaccggcgttgatttccagcctgaagcggtggcgctggcgcgccataacgcgcaaaaactggcgattaccaatgcgcagtttgttcagggcagttggttttcgccgctggccgggcagcgtttccagctgattgccagtaacccgccttatatcgacgccgccgatccgcatctgtcgcaaggggatgtccgctttgagccggacagcgcgctggtggcggaggagaacggcctggcggacttacgcgccatcgtgcgccaggcgccggagtatcttttgccgcaaggctggctgctgctggagcacggctggcaacaggcggccagcgtgcgtgaactgctggccgaggcgggctttggcgccgtggagagccgccgtgactatggcggcaacgagcgggtaacgctggggcagtatctgccggcccaataa

SEQ ID NO: 444303 - DNA, 399 bp, Serratia marcescens
atgacagcctacgccgcgttaaaaaatttgcatctgttgacggtaaccatcagtattgttttgtttgtattgcgttttttctggaaatggcgtgattcggcgatgatgaaccggcgctgggtgaagatagcgccgcatattaatgacaccgtgctgtttctgagcggcattgcactggtggtgatgttccagctttacccgctgctgggcatggactcctggctgaccgaaaagctgtttggcgttattatctatatcctgctgggctacgttgcactgagcaagaaagtccgcagcgcggggttacgcacgtcggcgtttattctggctctgggctgtctctacctgattattaaacttgccacgacgaaaataccgtttctgatgggatacctatga

SEQ ID NO: 444304 - DNA, 810 bp, Serratia marcescens
atgagtagcattgctgattttgaatttaattcttcaccgctgagcgcaggggtcattctggtgtctcagcgcgtgcggcgagattttcctgctgccgacgtggcgcgccaactgcagcgattgtctgaagaagcgcgggcggcagtgccggacgatctcagtcaggaacagcgattagaggcactcattgagctgttttaccgtacctgggggtttggcggggcgagcggcgtctaccgtctttctgatgccatctggctggataaggtgttggaagggcgccagggtacgccggtatcgctgggcactatctttttgcacatcgcccatcagctcggtttaccgctgatgccggtaatttttccgacccagttaatcctgcgggccgactggatggatgatgagatgtggctaatcaatccgcttaacggcgaaacgctgaatgagcatacgcttgaggcctggatcaggggcaatctgggtttatccgccgaactggaagatgacgatctggatgaagcggagaataatatggtggtgcgtaagatgctcgatacgctgaaagccgccctgatggaagaaaagcagatggaaatggcgctgcgcgccagtgaaacggtgctgtgctttgacccggacgatccgtatgaaattcgtgaccgtggtttaatctatgcgcagctggagtgcaaccatgtggcgatttctgacctcaactattttatcgagcagtgtcctgaagatccggtcagcgaagtgatcaaagtacagatccacgcgatcgaacccaaacaggtgacgctgcactaa

SEQ ID NO: 444305 - DNA, 888 bp, Serratia marcescens
atgaaagcacctcctcttcaggcattgcgcacctttgttgaaatcggacatcgcggcagcgtccaggcagcagcgcaggcgctacatgttacgcccggtgctatcagccaacagctacgctcgctggaagaacggcttggcgtcgtactacttgagcgcaaccgcctgggaatgcgtttgacggaggccggtgccagcatccacccaaggctcagtgacgcatttgcgcaaattgatcggtcgctagaagagttgaaaacacgtgaaagccctcagtgcctgaccatcagcacggtggccgcgtttgccgcctcttggctggttccacgcctgggaaattttcagcagcgtcaccccggtattgaagtccgagtagaagccacggcaaacctggtggatttacgccgcgatcgcgtcgatattgccctacgccacgggttgggtgattatccaggtttggccgtcactccgttgatgtcgcccgtgctggtgccggtggcctccccccatctgctcaccgctgaccagatgctgagcgaacctgcagattgcctgaattatcctctgttgcataacagtgatcgcaccgactggtcgctctggttaagtgcgcacggtgtggctacagatcctcgagccgaccgtggcaatgtgtttgaagatgactttctgctcatccgtgcggcagaggcaggacaaggcctggcactggtgccggcagcctatgcgcagacagagatcgccgccggtcgcctggtacaaatactggataaaccctggcccgcgagatttgcctactacatcgtataccagcccgatgccgcccttcgtcccgaggtacgcgcctttatcgcgtggctgttaaccgaggcggtcgctgtcccctga

SEQ ID NO: 444306 - DNA, 624 bp, Serratia marcescens
atgttgaatctctatactgacagttcacctaacggctttaaggcaacgatcgctcttgaagaactggcgctgccttatcgtctacaccatgtgcgtatcgaggctggtgagcatcgtcagccggattttttggccttgaacccgtatgcccgcatccccgtcctgactgacgatgagactggtgtggtactgttcgagtcggcggctattttgctgtaccttgccgataaaaccggccggctgatgccggatgatatcaaggggcgttgggaggcgatcaagtggttgcaatttcacgcttcaagcgtggggccgatcgtcgggcagcgtgtacacttcgagttatttgccgctgaacgtattccggccgcgattgagcgttatcgtagcctgacggaggatgctttcgcggtacttgatcgcagattggccgcaaacagctatctggctggtgatgcctattccattgccgatattgctcattttggttggatgcacatcgcccgcatcatccggtttgacttcagtcgctatcgtcacctggacgcctggttccagcggatagcggagcgccctgctgtccaaaagggaattaccttgcctgcgccagcaacgggagcgtaa

SEQ ID NO: 444307 - DNA, 1470 bp, Serratia marcescens
ttgactgactcagattccacactggcggcgtcgtcacgccatgttgccccttccggcgcgggagcgctgttctttatccaaatcttcgctacgttaggctttgccgtgctgtactccacgctggtgctgtatgccaccaagcgtctggggttcagcgaaagcagcgccaacgccatgatgggcgtattcggcgcgttcaactatggcctgcacctgttcggcggctacctgggcggacgctatctcagcaaccgcaacctgtttgtcctggggatggtgctgcaggtggcggggtgcgcgacgattgctctggccggcgtctgggggctgtattgggggctggcgatgttcctcaccggcagcgggctgaacgtcacctgcattaatatgatgctgacgcagcggttcaagcccgaggatgaccggcgcgagatggcgtttttgtggaactatgccgcgatgaacctgggtttttttgttggctacagtgccgccggctatttccaactgacggaaagttaccgcacgctgtttctgttcgccacgctgggcaacgccggggcgattatcgttgcggcgctgcgctggcgcatgctggccgatatcaataccccattgcttgatacgacgccgtcgcagtatcgccgtcggttgttggccggtctggcggtattagtgattctggtgccggtgattcgtctgatgctgacccatgctgaattcagcggttactttgtgattggcctgggatgcgccattttcttgctgctatgtctcgttacgctacgccatcatccgcgcgatgagcgtcggcggatgagcgcctacctgattctggccttgggatcgctggtcttctggatgctgtatcagctggcgccgatggggctgatgctgttttcggagcacaatatcaatctgaacccgtatggcatccatgttgccccgcagtggatccagaacatcaacacgctggtgatcgtcatcggcggcccactgctggcctggtggtttaaccgcctgcgcgcccgcggctgcaagattgatattcccctgcagttttccggctccttgttctgtatggggctggggatgctggtgctgccgctgggcatcagcctggcgggcggcgacggactggtggcgtttaaatggatcgttatcagttacgtgttgcagagcattggcgaattgctgatttcgcccatcggttacgccatgatcggcaagttggcgccggcgcgttaccagggcgtcatgatgggctgctggatgatggtgaccggcgtcggctcagtgctggcgggctatgtatccggcctgatgccggaaaacagcggcagtacgccgttgttaaccaaccccggctacagccatgtcttcagcatgctggggtggggagcggccggcgtgggcgtggtgctgttgatcctgataccactgctgcgccgcctgatccagcgcgtctga

SEQ ID NO: 444308 - DNA, 942 bp, Serratia marcescens
atgaacattatgttttaccatcctacgtttaatgcgcagcagtggcaggcgggcatgcagcagcgtttgcccggttccacgctgcgcatctggcagccgggggacgatcgtccggcagactatgcgctggtttggctgccgccgtatgaaatgctggccgggcgtcatcagctgaaaggtgtgttcgccctgggagccggcgttgacgccattttgcagcaggagaggcaacatcccggtacgctgccggcgggggtaccgctgttacggctggaagataccggtatggcgcagcagatgcaggagtatgcgttgagttacgtactgcgctatttccgccgtttcgatgagtaccagcggcagcagcaacagggagagtggcagccgctggagccgcatcagctacaggatttcactatcggtattctcggcgccggcgtgctgggcagggcggtggcgcaaaaactggtggacttcggctttaacgtccgctgctggagccgcagcgccaagcagattgacggcgtgagcagtttcgccggcgaggcgcagcggccggcattcctggacggcgtcaagctgttgattaacctgctgcccaatacgccggaaacccagggtatcctcaacggtgagatgtttgcccatttagcgccgcaggcttatctgctcaacctggcgcgcggcgcgcatctggttgaggaggatctgctggcggcgctggagctggggcagattaaagcggcgacgctggatgtctttgtgcaagagccgctgccgccggcgcacgccttctggcgtcatcccgccgttaccatcacgccgcatattgccgcgattaccttgcctgagcaggcgatggatcgggttgcccagaatattttagcgatcgaagccggagagacgccgacaggaattgtggatattcgcagaggttattaa

SEQ ID NO: 444309 - DNA, 582 bp, Serratia marcescens
atgaatgagttttccatcgtctgccgcgtgctggggacgctgttttaccgtcagccgcaggacccgctgctggtgccgctgttcagcctgattcaagagggtaaactgcagcagcactggccgctggagcaggatgaactgctccagcgtttgcagcaaggctgcgagccgcacctgctggctgccgactttaacgcgttgttcgttggcgctgaatgcagcgtatcgccgctgcgctcaacctatgttgagggggcgacggaaagcgaagtgcgcagtttcctgcagcagcgcggtatgccgctcggcgaggcgccggcggatcacttcggctcgctgctgctggcggcatcctggctggaagatcagtcgcaggaagatgaggcgcaggcgcaaattacgctgtttgatgaatatttgctgccgtggtgcggacgtttcctcggcaaggttgaagcccatgcaaccagcggtttttatcgcacattggcgatgattacccgtgatgcattgcaggcgatgcgcgatgaactggcggagtatgaagagcaggaaggctctgaagacgacgagcaggcgtaa

SEQ ID NO: 444310 - DNA, 564 bp, Serratia marcescens
atgaaaaagatggttatgggcgcagccgccctgatgtttgtcggcgcgctagccggctgcaacaagctgacccagtacacgctcagcgaacaggaagttaatgactacctgcagaaacataatgattaccagaagcagatcggcgtgccagggctggtggatgcgcatatcgtgctgacgcagctgcagagccagatcggccgcagcgaaccgggcaaggttaccctttccggcaatgccaaagtggacatcacctcgattctggggccacagcaggcggacatgcagctgacgctgaaggcgcagccgacctatgaccgtgagaaaggggccattttcctgaaagatatggagctgaccgactataaagtgcagccggaaaaaatggataccgtgatgaaggcgatttcgccttatctgaatcagtcactgaaaagttacttcaaccagaaaccggcctatgtgctggacccgaacaagagtaaaaccgaagccatggcgcgcaaactggccaaagggctggaagtgaagccgggcgaactggtgattccgtttactgattaa

SEQ ID NO: 444311 - DNA, 1644 bp, Serratia marcescens
atgctgaaaatggtgttcgtcaccgcgcgcgatcgggcgcggctggctgaaatttctgcggtgctgatccgctacggtctacaggatgtggtgcgtctgctgggtttaagcccgctgctaaccgccggcaaaggcaccccgcagacggatgacagcccgctttcactgcccgaacgtctgcgcgcggcgctggaagcgctggggccgacctttgtcaaattcggccagatactggcgacccgctccgatctgctcgacgccggctggaccagcgagctggacaagctgcacagtcaggcgtccacactgccctggcaaacgctggccggccaggtgcatgccgatctgggcggcgacccgcagcagatctttgcgcagttcgatacccaaccgctggcggcggcatccatggcgcaaatttatcgcgccaggctgcacagcggcgaagcggtgatcgtcaaagtattgcgtccgggcctggcaaaaaccattcaggccgatatccgtctgctgcgctatctggccgaaacggtggaacagcaaagcccggcactggcgcgctatcgcccggtgcagatggtgcagacgctggccaccgcgctgaataacgagctggatctgacccacgaagggaataactgcgaacaggtcgcgcagcgttttagcgatcggccagaagtgaagatcccgaaaatttactggcaatggtcaggtaaacggctgctggtgcaggagtttctgcccggcatcgcgccggaaaacccgcagcagatggcggaggccggctttaacggcccactgctggcacagcgcggcgcgcaggcgtttatgcgtatggtgctggaacaccgcctgtatcacgccgatccgcatcccggcaacgtgatggctcttgacggcgaccgcgtgggttttattgacttcgggatggtcgggcagctgtcagcaacgcgtcgcaatcagctgttgcgcgtgctgcaggcaattgccgagcggcagagcgaaggcatcgtcaacacgctgctcgcctggtcagacagcaataaccccgacgtgcaggatctggaactggcggcgcagaactatctggacaaacaggggttcggcaccttaacgctcggcaaagcgctgaccgacctgctggcgatgtcccgcgaacaccagctggcgctgccgcccgatctggcgctgctgtttaaagcgctgatcaccgccgacggcgtgctgcaccggctggatccagactttgacattatcagcaccttgaaaccgatgctgcaacagctcacgctgcagcgttacgcgccggaagcgctgcgtcagcgcatgtttgcgctgggtgccgacgcgctggatgccagtgatgaactgccgcaaaacctgcgcctgctgctgcggcgcctgacgcgcggccagctcaatgccgacatcaacgtcagcaatctttcacagctgagtaaagcattggaacgtgcggcggtgacgctggctatcgccattgtcaccgccgcctttgcgctgggcctggcgccctacctgatgcacgtctccccacgcttatggggcgtgccgctgtttccgctgctcggcggtttggcctgcatcggcggcatcgtccttctggttctgcggctgcggcgatga

SEQ ID NO: 444312 - DNA, 648 bp, Serratia marcescens
atgaaactgtttatctacgatcactgcccattctgcgttaaggcgcgcatgattttcggtctgcaaggtcagccggtgcggctggtcaccctgcttaacgacgacgaaatcacgccgaccaccatgatcggtaaaaaaatggcgcctattctgcaaaaagatgacggcagctatctgccggaaagcatggacatcgtgcactatatcgatcggctggccgataagccgctgctgaccggccccagcaacccggctatcggcgaatggctggcgcagacggcggaatatacgccgcagctgctgctgccgcgcttcgcccaggccgactttgaagagttcgccaccgacagcgcccgtcagtactttattaataaaaaacaggcggcgatcggcgacttttcccaacacctggcgaacagcgccgaccttatcgcccgtctggagcaggatctgccggcgctggcggcgctgatcgtctcgccggaggcggtcaacggcacgctgtcggaagacgatatacacctgttcccgctgctgcgttcgctgtccatcgtcgccggcgttgcgctaccggagccggttgaggcctaccgtaaccgcatggctgaacgcagcgatatcccgctgctgctgaatatggaacagtaa

SEQ ID NO: 444313 - DNA, 252 bp, Serratia marcescens
atgtccgaagaaaacaatcacctgcctcagctgttggaacatatggttttgaacctgcgtatgatctatgcccgctccacgctgatggagaaagctctggcgcgtattttggcggatgacaacgcgctgaaaagcgatgtgattgaacaacttcagcaggttaacgccgccaccgagcgcgataaagtcgatttagagcaggcccgccagcatttgattgacgtgttcaattccattcccgccaaagaataa

SEQ ID NO: 444314 - DNA, 648 bp, Serratia marcescens
atgaaatatcaattaagcacgcaagaggcgcgggtgatcggctgtctgctggaaaagcaggtgacgacgccggagcagtatccgctgtcattgaacgccatcacattagcctgtaatcagaaaaccaaccgtgagccggtgatggcgttgagtgaaggcgaggttcaggaggtgctggacgaactggtgaaaaaacactttctgcgcacgcaaagcggttttggcaaccgggtggtgaaatatgagcagcgtttctgcaattccgaattcggtcagttgaagctcagcgacgcggaactggcgttggtcgccaccttgctgctgcgcggtgctcagacgccgggcgagctgcgtacgcgcgccgcgcggctatatgatttcaacgatgtcgccgaggtagaacaactgctgcagcaactggccgggcgggaagacggcccgtttgtacagcgcctggcgcgtgaaccgggcaagcgtgaaagccgctttgcgcatttgttcggcaccgaacaggcggtagcgaccgccgccgtcgaagatgagcaggaaaatatgtcattaagccagcgcgtcgccgtgttggaacagcaggtcgcggcgctgacgcagcaactgcagcaactgacggcggaggggcgggatgactaa

SEQ ID NO: 444315 - DNA, 936 bp, Serratia marcescens
atgactaagctacgtattggtgtggtcggcctgggcggcatcgcgcaaaaagcgtatctgccgatcctcagccacgcggccgactggcaactggtgggcggcttttcgccgaaccgccagaaggcgcagccgctgtgcgacagctaccggatggcctgtttctcccgcctggatgaactggcgcagcagtgcgatgcggttttcgtacacagcagcaccgccagccatttcagcgtagtgaaaagcctgttggagcagggcgtgcatgtctacgttgataaaccgctggcggagacgctggagcagggcgaacaactgctggaactggcgcaggcgcgcggtaaggcgctgatggtcggcttcaaccgccgttttgcgccgctgtacgggcatttgcagcagcagatgcgccagccggcgtcgatccgtatggataagcaccgtgccgacagcgtagggccgaatttgctgcgcttcaccctgctggatgactatctgcacgtggtggacaccgcgctgtggctggccggtggcgaaggcaaactgctgggcggccggctgagcgctaatgacgccggtgaaatgctgtatgccgagcatcatttccgctgcggtgagacaatggtgaccaccagcatgcaccgccaggcgggcagccagcgggaaagcgtgcaggcggtgacccgcggcgcggtgtatcaactggacgatatgcgccagtggcggcgtgaagaccgcgacggcgttctggagcaaccggcgcccggctggcagaccacgctggcccagcgaggttttgagggggcggtgcgtcactttattcagtcggtggcaaatcagacgccgccgcagaccggaggtgaacaggcactttacgcccagcggatgattgaacagatactgcgcgacgcggatttgccgggtaaccccatgtaa

SEQ ID NO: 444316 - DNA, 564 bp, Serratia marcescens
atgaatcctttctcaaccatcgccgagttgcaggatctggcgctggacttaccccgtttcgaacaaacgctggcacagttcgcccagaagctacagcttgatctggcgcagtttgatgccgaccatatttcggtacgctgccaccaaaacgctacggcggaacgctggctgagtggcttccggcaatgcgctgacgtgatgtccgacgccatcatcaacggtcggccgatttatctgttcgacctgcatcagccgttgcaggtggggccgtggcaaattgattgtattgaactgccgtttcccggtgacaagcgttatccgcatgaggggtgggagcatgtggagctggtgatcgccggcgatccgcaaaccctgtatgcgcgcgcgctggcgctgttaccggacgaagccctgcttgcgccgggcattaagctgaagcagagcgcgccgcagggggaaggtgagcgcttgccgaacccgacgctggcgattaccgacggcagcgtcaccatcaaattccatccttacgccattcgcgaggtcgtcgccagcgagcgcggctag

SEQ ID NO: 444317 - DNA, 1149 bp, Serratia marcescens
atggcattcaattttgatcaatggatagaccgcagtcacagtgacagcgtgaaatgggataaatatcacgatcgcgatattattccgctgtgggtggccgataccgacttccagtcgccgccggcggtgatcgaggcgctgcaccagcgagtcgcacacggtgtgttcggctatggtcacccttctcccgcgctgatcgcgcttttcgttcagcgtatggcggaacgttaccagtggcatatccggcccgaatggctggtgttcctgcccggactggtctgcggcctgaacctgtgcgtgcgcgcgtttaccgctgaagacgaaggcactattgcgccttcccccatttatccgccatttcgcaaagccgcgcagtttgccgaacgacgccagctgtcggtgccgatgcgcatgcagaaccagcgttggctgccagacctgccgtcgctcgccgcgcagcttgacggccgggaaaaactgatgctgttgtgcaacccgcacaatccgggcggcacggtgtatcgccgcgatgaactgctggcgctgcagcagtttgcccggcaacatgatttgatcgtctgttccgacgagatccactgcgacttactgctggaaccaggtctgcaacatattccgtttgccgcgctgaatgaggacgccgcccagcgcagcgtgacgctgatgtctccgtcgaaaacctttaatatcgccggacttggcgcatcaatggcgatcgttcccaacgatcgtctgcgccgctcgctgtgtcgcacgcgtcgcggtctggtgccggaggtcgacgtgctggcgctggtcgccgcgcaggccgcctatcagcacggacagccgtggcttgaccagcagctggattacctgcgtgccaaccgcgatctggtgatgacgcgcatcaatgccctgccgggtctgcatctgtcgccggttgaagccacctatctggcatggattgactgcagcgggttgccggtcgataacccgcatgtcttctttgagcaggccggcgttggtctgagccccgggttggactttggcgaccgccgtttcgtacgcttaaacttcggttgccagcgcgcactgctgatacgcgcgctggagcgtatagagcatgcagtgcatgctttgtccggctag

SEQ ID NO: 444318 - DNA, 759 bp, Serratia marcescens
atgattaaactggaagtttgttgctatagcgtcgattgtgcgctgacggctgaacgcgcaggagcggatcgaattgaattatgctccagccaaagcgaagggggcctgacgcccagctatggatcattggcgctggcgcgggagaggctggcgattccggtgcatcccatcgtccggccgcgcgccggcgatttttgctatagctccgttgatttcagcgtgatgaaaaacgacgtggcgcaggtgcgcgagctgggcttccccggcgtggtaattggcatgctggacgaagagggccacatcgacctgccgcgcatgcgggaagtcatggcgctgtgcggtgatatggcggtgaccttccatcgggcgtttgatatgtgccagaacccgatgcaggcgctgcaacagctgaccgacttgggcgtggcgcgcattttgacctccggccagcagcagaatgccgagctggggttgccgctgctgcgtgatttactgcaggccagccaggggccggtgattatggccggcgccggcgtgcgcttaagtaatctgcacaagtttgtcgatatcggcattcgggagctgcacagctcttccggccataccgtgccgtccaccatgcgctaccgcaaggccggtgttaccatgtgcgctgataatgaattcgacgagttcagccattattgcgttgacggtgaaatggtggaagcgatgaaaggcgcgctggagctggtcgacccgctggcgcagagcgcctag

SEQ ID NO: 444319 - DNA, 708 bp, Serratia marcescens
atgattaacccgatagtaacgaagttgaaagtagggggcgcgcgtttgtggccgcatccgttagccgcagggaataaagagattgcgctcgccagccttggcgcgggtctggggctgatggtcgccggctgggtcagccactggatgttgggcagcgtcaatttatggtttgtcgcgccgatgggcgcctcggcggtgctgctgtttgccgtaccggccagcccgctggcacagccctggtcgattgtcggcggtaatctggtggcggcgctgattggcgtcagctgcggcaaactgatcggagatccgggcattgcctgcggcgtggccgcgtgcctggcgattgggataatgtttaagctgcgctgcctgcatcccccgagcggggcggtggcgctgacggcgatcctcggcggcgatgtcgttaaacagctgggctatgcgtttgtctggtcgccggtgttactcaactccgtgctgatggcgctgctggcaatagtgtttaataacttgatgggcagacgctacccgcatgcgctatcgcccgccgaagcgaagccggaaccggtgccgcttgatgtgccgattacccgcgccgatctgcatcaggcgctgatggacggcgaatttctggatattgatgaagacgatctgcaggcggtgctgcagcgcgcggaacagctggcgcagcagcggacggcgtcttaa

SEQ ID NO: 444320 - DNA, 972 bp, Serratia marcescens
atgatcgagttcggcgatttttaccagcaaatagccaaaagcccgctcagccactggctggacaccctgcccgcacagctcagcgcctggcagcgcgaatcgctgcacggcaaattcaaacaatggttcaacgcggtggaacacctgccgctgctgacgccggagcggcttgacctattgaacggcgtgcacgccgatatgaaccagccattgtccgccggccggcttgagggcattgaaaccatgctgcgcacgctgatgccgtggcgtaaagggccgttctccctgtacggcatcgatatcgaaaccgaatggcactccgactggaagtgggatcgcgtgctgccgcatatctcgccgctggcgggacgcaccgtgctcgacgtcggctgcggcagcggctatcacatgtggcggatgctcggcgccggcgcgcagtttgtcgtgggtatcgacccgatgcagctgttcctgtgccagtttgaggcggtgcgcaagctgctgggcggcgaccagcgcgcgcatctgctgccgctcgggatcgaacagctgccggagctggctgcgttcgacaccgtcttctccatgggggtgctgtatcaccgtcgctcgccgctggatcacctgtatcagctgaaaaatcagctggtgcgtgaaggcgaactggtgctggagacgttggtggtggaaggcgatcgccatcaggtgctggtgccgggcgaccgctacgcgcagatgcgcaacgtttactttatcccgtccaccgaagcgctgaagggctggctggaaaaatgcggttttgtcgatgtgaaggtggccgacgtctgcgtcaccagccttgaagagcagcgccgcaccggctggatgaccagcgaatcgctggccgacttcctcgaccccgacgacccgacgaaaacccgggaaggctacccggcgccgcgccgcgccgtgctggtggcgagaaagccctga

SEQ ID NO: 444321 - DNA, 813 bp, Serratia marcescens
atgtatatcggattaccgcaatggcaccatcccgcctggaaccgcatcggactgcgggatctggcggactacagccgctattttaactgcgtcgagggcaacaccaccttttatgccctgccgaaagctgagatcgtgcagcgctggcgagcgatgacccacgacgattttcgcttctgtttcaaattccccgctgaaatcagccataaggcggcgctgcgccattgcgacgccgacgtgcaggcgttttaccagtgcctggcgccgctggagcagcgtatcggccagctgtggctgcaactgccggcggccttcggtccggcggaactgccggcgctgtgggcgtttttcgacaccctgcccggcgcattcacctacggcgtcgaagtgcgccaccccgccttcttcgccaaaggcgaagaagagcgtctgctgaaccaggggctgcaccaacgcggcattaaccgggtgatcttagacagccgaccggtgcaccacgccgcgccgaacagtgcggcggtacgcgatgcccagcaaaagaagccgaagctgccggtacacgctttggttaccgctgacaatccgctggtgcgttttatcggcggcaacgtactgggcgacaacctgcgctggttcgatgcctggcaacataagctggcggattggcaacagcatacgccttatctgtttatccatacgccggataacggtgattcgccgcagcaggcgcaaaagatctggcagttgctgcgggaaaagataccgtcgctgcctgctgcacccgactggcccgaacaggattcactgttttaa

SEQ ID NO: 444322 - DNA, 573 bp, Serratia marcescens
atgctgaaacttgatacctcaaccaccgctctggtactgattgacctgcaacagggtattttaccctttgccggcggcccgcacagcgctgaacaggtcgtcactcacgccgcccatctggcgggacgcttccgcgcacttggcgcaccggtgattttggtacgcgtcggctggtccgcaagctttgccgaagcgctgcaacagccggttgatcagccttctccaccgccggtcggcggcctgcccgataactggtggaccttcccggaaacgctggcggtcagtgatgacgatattctggtcaccaaacgccagtggggcgccttctacggcaccgatctggagctgcagctgcgccgccgcggcattaaaagcatcgtgctcggcggcatcgccaccaatatcggcgtagaatccaccgcgcgcgacgcgtgggaacgcggcttcgaactggtgatcgccgaagatatgtgcagcgcgcagaacgcggacatgcaccagttcgccttccagaatatcttcccgcgcctggcgcgcgtacgcagcaccagcgaaattcttgccgcgctgtaa

SEQ ID NO: 444323 - DNA, 927 bp, Serratia marcescens
atgatacagaaaaaaaaatggctgcagcgtgcgctgttggcaagcgcgttgatgatggccggtagtgcgacggcggcggtggtgacatcggttcgtccgctagggtttattgcctccgccatagccgatggcgtgacggaaaccgaagttctgctgccgaacggcgcatcgccccatgacttcgcgctgcgtccctccgatctgcgccgtctgcgctcggctgacttggtggtgtgggtcggcccggagctagaggcgttcctcagcaagccgctgcagccgattgatgcgcaaaagcagctgtccgtggccgcgctgccggcgataaaaccgctgctgctgaaggatgccgaagggggcgaacatcatcatgaagggcatgacgatgagcacgaacacggtcaccatcacggcgaatacaatatgcacctctggctgtctccggagatggcaaaagtgactgcgatcgcgattcatgacagattgttggaacttatgccgcaaaataaagacaaactagacgcgaacctgcgtcagttcgagaatctgctgacgcaaactgacaaaaatgttggtaagatgcttacgcctgtgcaaggcaagggatattttgtttttcatgacgcttacggttattttgaaaaacactacggcttgagtccactgggccattttaccgttaaccctgagattcagcctggagcacagcgcttacaccaaattcgaacacagttggttgagcagaaagcagtatgcgtttttgctgagccacaattcaggccggccgtaatcactgccgttgccaagggtaccaaggtgcgttctggaacgctggacccgttgggtagcggcatcgcattggggaaggacagctacgggaacttcctgacagcgctgtcgaaccaatacgtgagctgcctgaagtaa

SEQ ID NO: 444324 - DNA, 891 bp, Serratia marcescens
gtgctgcatcaacataccccgcatctcgatacaaatcgctccgtaaatttagaactggacggtcaacagctcgaccagcttgatgccgccatgctggcaggatcggggctgcgcaaaataagcctctataacaaccaactgaaagtatttacgccggagatcgtcaaccacagccaactgcaagtgctgaacatatccgtgaatcagttaactgctgtgccggatgaaattgttcaactgcggcaattggatatgctcgatctgggacacaaccaacttagcgtgatccctgacgaaatcggtcagctcgacaagctgaaatacctttacctcagcgacaatcaactcagcgatttgccggtatccttgtccgggctaacagcgctacgctatctgaacgttactgacaaccgcctgaccaccctgccggattccctttgtcagctcacgtcgttgcaagagctcaggctttaccataatcagctcgttcatctgcctgaatccatccatcggctgtcactgctgcgggaattacatctgatgctcaatcagttaacgtcattgccgaccagctttggtgagttaggcacgctcaacatattggatgtctccaacaatgtcattacccacctgccggatacgttctgtcagctttcccaactgtgtgagcttaatttgcgctttaatcagctcactcacctgcctgaaaacataggacagctgagcaagttgcaaactctggatctgcgcgctaatcggctcacgacgttaccggccagtctggccgagatgaaaagtttgcgccggcttgatttacgctggaatgatttcacccgctatcctgcggttctcgatctgctgatcgaacgagggtgtatggtgcacgcgtaa

SEQ ID NO: 444325 - DNA, 192 bp, Serratia marcescens
atggcacgcccctgccacagggccttcagatcatggtctgaaaagtccggccgtaccctcagcctgatcgacaggcaaaaaaaagccggcagactcgctgccggcgtaacaacttattcgaactcgttccaggaacggccgtcgcgggtgatcatcgccaccgatgccaccggtccccaggtacccgcctga

SEQ ID NO: 444326 - DNA, 369 bp, Serratia marcescens
atgatttattggctgtttttaggtttggctatcgttactgaaattatcggcaccttgtcgatgaaatatgccagcgtcagtgggggcatgctggggcatatggtgatgtatgtgatgattaccacgtcatatattttgctgtccgttgcggtcaagcgtgtcgccctgggtgtggcctatgcgctgtgggaaggcatcggcattttgtttattactctgttcagcgtgctgtggttcgatgaaccgatttccctgctgaaggtattgggtctggcgacgttgattgcgggcattatgttggtgaagtccggcacccgtaagacgccgaagtctgacgatgagcgaggtgcgcagcatgcaacagcttga

SEQ ID NO: 444327 - DNA, 330 bp, Serratia marcescens
atgcaacagcttgagtgggttcatatcggttttctggtgctggctacggcgctggagattgtcgccaacatttttctgaaaatgtcagacggtttccgcagggtgtggctggggttgctgtcgttgctgtcggtactggccgcttttagtgcgctggcgcaggcggttaaggggatagacctgtcggttgcgtatgcgctgtggggtggttttggtattgtcgccaccgtggccgccggctggatcctgttcggtcagcgtctcaatggcaaaggctggttgggcgttacgctgttgttgacgggaatggtgctgattaagctggcataa

SEQ ID NO: 444328 - DNA, 702 bp, Serratia marcescens
atgtccacgcgaattttagcgatcgataccgcaacggaagcctgttccgttgccctctggaatcaaggcgaaacccacgccctgtttgaactgtgcccgcgtgaacacacgcagcgtatcctgccgatggtgcagcaggtcctggccgaatccggcgtgacgctcgccgagcttgatgcgctggcctttgggcgtggccccggcagtttcaccggcgtgcgtatcggcattggtatcgcgcagggactggcgttaggcgccgatttgccgatgctgggcgtttctaccctacagaccatggcgcagggcgcctggcgtatgaccggcgcgcagcgcgtgctggcggcgatcgacgcccgtatgggcgaggtttactggggccagtttgagcgtcagtccgatgggcaatggctggaaagcgaaggtgaggcggtattgtcgcccgagcaggcgctggcgcgcgcgcagggcctgcaaggcgactgggcgcaggtaggcaccggctggcaaacctacccgcagctggttgccggtgcgccgattactctgcatgatggtcagatattgctgccgcgagcggaagatatgctgccgctggcgctgcatgcctggcagcaggggcaggcttgcccggttgaacaggctgaaccgacgtatctgcgtaatgaagtcacctggaagaagttaccggggcgcgaatag

SEQ ID NO: 444329 - DNA, 591 bp, Serratia marcescens
atgttaatccgtaccgtaattcaacgattcacgctgccggcattggccggcggcgttctgatgctgtccggctgcgtcaccgtccccgatgcgattaaaggctcatccccaacgccggtcaccgagctggcgtcggtgcaaaacgcgccaagcctgtttaacggtgcggaggcccgctttggtggtaaagtggtgaatgtggcgaacgagcagggcaagacggtactggaaatcgccgcagtgccgctggacgatggcgcgcggccgattctcggtgaaccatcgcgcgggcgagtgctggcgacggtaaacggtttccttgagccgacggacttcaaggggcatctggtcaccgtagtcggttcgataaccggcgtgcagcctggcaaaatcggtgcgacgccgtataaattcgttacgatgaacgtcagcggctttaaacgctggcgggtgacgcagcaggtaatgatgcctccagcgccaatgggcccttggggttggcgtggcggcccgtggggacctgactggggcccgggttacggctggtacagccctggcccggcacaggtgcaaacgatcgttaccgagtaa

SEQ ID NO: 444330 - DNA, 1122 bp, Serratia marcescens
ttgaattatacgttgatcactaccgatgccggattgcagcaggtctgcgaacaggccagaacacatgctcaaatcgcgcttgataccgaatttgtcagaacgcgcacctattacccgcagcttggccttatccagttatacgatggtgaacaactctccctgattgaccctttgccgattacacagtggcagccgtttattgacctgctgagcgacaaggccgtggtgaaatatctgcatgccggcagcgaagatcttgaagtattcctgaacgctttccaaaccttgccgacgccgctggtggatacccagatcctggcggcattcaccggtcggccgctgtcgtgcgggttcgccacgctggttgctgcctatatgcaggtcgaattggacaaaagcgaatcgcgtaccgactggctggcccggccgctgaccgagcgtcagtgtcagtatgcggcggccgatgtgttctatctgttgccgatggccggccaactggtgcaggaagtcgagcaggccggctggaccgatgcggcgagcaatgagtgcctgctgctgtgccaacgccgtagcgaaacgctggcgccggagctggcctaccgcgaaatcaataatgcctggcagctgcgcccgcgccagctgggctgtttgcaaaaactggccgcctggcgactgcagcaggcgcggcaacgcgatctggcggttaattttgtggtgcgggaagaaaacctgtgggcggtggcgcgccatatgccgtcttcaatgggcgagttggacgcactgggtctgagtggcccggagatccggttccacggtaaaacgctgctggcgctggttgctgaggctaacgcgctggatgaagccgagctgccggcaccggtggccaatctggtagagcacccgggttacaaaaaggtcttcaaggatatcaaggcggcgatcgttaccgtcagtgagcaaagcggtttaagcagtgaactgctggcatcgcgccggcaaattaatcagctgctgaattggcattggaaactgaaaaacagcgactgccagccggaattaatcaacgggtggcgtgcggagttattagccgagccgttattggcaatcctacagggttattaa

SEQ ID NO: 444331 - DNA, 270 bp, Serratia marcescens
atgctttgtgtgatctatagaagttcaaaacgcgatcaaacttatctttatgtcgaaaaaaaagacgacttctcgcgcgtgccggaggatttgctgaaaagttttggcgcgccgcagttcgccatgttgcttaatcttgatgaacggaaaagattagccaatgcgaatattgacaaggtgagagaagccctgaaggaagaagggttttatctgcaggtgccgccgccggttgagaatttattgagccagcatttgggcggcgggaaataa

SEQ ID NO: 444332 - DNA, 1086 bp, Serratia marcescens
atgagattgtcgaccacggctttgacgctgacggctttgatactggccggctgtgccggccataagaaccaggcgctagcggcgccaaccgctacgccgcccgcgtcgggagggatgctgaagcctgcggccggcagtcccggagcgccggctgcgaatacgctggccgctaccggtcgcgatccggcgcagtttcccgcctatgttgaacaacttaaaagtcaggcattagcgcagggactgagccggaaaacggtcgacagcgcttttgccaatatccattttgtcgatagggtgattaaatccgatcgcaatcagctggaaaagaagatcaccctggacgtttatctgcagcgcgtgctgtcggccagtaaaacgcggcaggggcgcgagatgatgcgtaaataccagccgcagctggcacgggcgacggcgcgttacggcgtgccggaacgctatatcgtggcgctgtgggcgatggaaagtcatttcggcaagattcagggtaaggaagacgtggtttccgcgctggcgacgctggcgtttgaagggcgcagagaggcgtttttccgcaagcagctgatggcggcgttgcagattattgagcagggacacgtgacggccggacagttgacaggctcctgggcgggtgcgatggggcaaagccagtttatgcccagctcattcttgacctatggcgctgacggcgatggcgatggacgcattgatatctggaacaatgtcgatgatgtttttgcctctacggccaattacctgtcgacagaaggttggcaggcaggcagcagctgggggcgtgaagtcaaactgccggcaggcttcagtgctgccgatctggggctgaaaacccgcggacgcacggttaatcagtgggcggcaatgggcatcacgcagcctgacggcgccgcgctgccggatgctacgctgcgcagctgggtcattacgccggacgatgcgcaggggcgagcgttcctggtgtatgataatttccgtaccatcatgcactggaaccgttcatattattttgccatcagcgtgggtatgatggcggatgccgttggccaatga

SEQ ID NO: 444333 - DNA, 1575 bp, Serratia marcescens
gtggaagatattaacgcgaaatcagttattctggatcagggtggtacggtacaagacgctgtaaagtacattacgccggaaatgtttggcgcagtgggtgatggcagcgctgatgatgctggtgccattattgcagcgatagaccatgctgtagatacgggtgtaaacgctgttcgcggtgacggaatttacttaattcagaaatgtatcccttgcaaaattggcgttggcaaagataatcatactattgtttctcgtgggtttgatcttcatttgaatattgtcagggttggtgacaattttccggaggttcccgagaaatggtgggatgctgaaggtgctttctatccagaccatagcgggcctatggacaatctgaggctgcatgttaatgagttttatggtaatgatcgagcgaccttttttaaatcacaaggtagaggtgtatctacaagcctaatttcatgtaatgaaatgactgcttatattattggattcaaaaattatttagatcccacatttcagtcaggaatgaataagattagagggcgtttttggtctggtggttatattgcttgcctgatcggtggatttggcaagggctatgggaatagtgaatgtcataatatagatataaactggtgcgcaagcaatctgtatggtggcatttcgctgcaagaccgctcacagtacgccaacattaccggtggcacatatgattttaacgcacagcatacgtccatacttacgcttgacaacattgaaattgacgatatgtatggcgttgagtttggtactgatattacaagcggtaataagaaatcatacacattatcgagtctcatgcgtggatatgagggcgagtggcagttgaatgtcaaagaagatggtaatgtcactgatggacagtcaaagttttctgttggtgacgttattaccgccccgggattttcagcaaagatttcaaaaatcacagtgcctagtaaaaaaacggcgatatatcccgatattatcatctgtaatagaacgggggatttcagtaaagcccgtgttgctgctgattatgttggtggtatatatgggcataatctgtttacatgtgatatatgggggccgagtgcatcacagaacccacgtaatatggcatatcgcggtcttggtgttggcggttcttcctctcaccttgaaatgtatgcaacgcaacacagtgtatcctctccgttctgctcggtaacatctgaagatatgagaataaataggaatatatccatcctaggtgctcataagctacaggggactactgggaaaatctcagtgccaaacaatgcgtcaacttgggcatttagcctgaatggcggaagtaacactccggtgtctctttggaaggtatatatatctggtgaggacggtaatattaatggggagtttacaatgtcgaattcagctaccgaggctaaagtcatcagtaaaaatatctcgcatgtggatatcagaactgatgggcataaggtgttactactgcaaagcacgggtatagcaagaatactctattataacgcaattcgtgtgttgtga

SEQ ID NO: 444334 - DNA, 138 bp, Serratia marcescens
atgactgatgataaacgtcttaatctgctggagaaaatggctgttctgatgtttgctgtattgcttgcctatattgtactgacgtttggattatcgtttttcggtctggatcatccttggccgtgtccaaaaagataa

SEQ ID NO: 444335 - DNA, 288 bp, Serratia marcescens
atgattgccgccatgattaccgcatgtgggttgtggagtgtgacctggtgtttgggggagcgtttatccagcgcttggggcgtgctgctgccctgcgccctgttgccgctgctggctatggtcaacctggacatgatgcagctgcgcagcctgatcgttatcgccatgctggcgacgttggtgatgctgttcaacagccgctggcgccactatctgctgctgccttcctgcatggcgctggccggcgggctggccgccatcagtctgcatttcgatctgacgccgtga

SEQ ID NO: 444336 - DNA, 1062 bp, Serratia marcescens
atgaatgcacgttcttatcaggaactgctaaatagcaagcatcggttagcgatattactgttcttgctgatgaatatagcctcttcccttttcaccttattaatgccgttgagaaataccccagccatcaccccgccgctgttcggtatccccttgttttgtctggcggcgctattatttaccttacgctcgccggggaattatataaaacggctggagtatttttccggcgtattaggtctgctgtgggccggacatatttatatgaaaagccaatatctgctgccgaatgtacaaaactatctgattattagcctgttcagcatcttttttatcagcgcgattaccctgaccgacaacgtcatcgccttctgcctgcacgccgtgccctccgcgctgattatcctgctgctcgacaaccagcataataccctgcgcatcctgtttatcagcgtgctgccgattatcgccttttccatccaccatctgatgctgaaacgcagcgaatccttcacctatgcgctggtcgcccgcctgtatgaagagcgtgacaaactcagcaacctcagcatgctcgacccgctgaccggcctgtataaccggcgcgggctggaaaacaagctgacgctgctgaccacgccgcaaagcggcctgcactttgtactgctgctggatatcgaccgtttcaaagcctataacgaccactatggccataccatgggcgatcaggcgctggtgaaggtcgcctgcgccatccgcgatgcggtacgctcgcgcgatatcgtggtgcgctacggcggcgaagaatttctggtactgctgaccaacgtcagtaaagaatacgccgcccagcaggcagaacagatccgcctgcgggtgcaggcgctggcgatcccgcacggtttcaatcagctggccgccacctacgttaccctcagcgccggcatttcaccgctggagcaactggacgtggactcggccatccgcgccgccgacagcgcgctgtaccaggcgaaaaacaacggtcgcaacagcgtacgactggcgacggcgcgcccgtaa

SEQ ID NO: 444337 - DNA, 1230 bp, Serratia marcescens
atgcttgctgataaaaccgctgcgcctgcgcagacgggcgccagcgcacgtagcaatttgcgctgggcttttattctggtgaccagcctgtttttcatgtggggattgtcttacggattattggacgtgctgaataagcattttcaggaaacgctgcacgtgaccaaagcgcagtcgggattattgcaggcggcctatttcggcgcttattttctggtggcgctgcccgccggctattttatggataaacacggttacaaggcgggaatattagtcggattatgtttatatgccgtcggcgcgttgttatttgtgccggccgcctcggccaatagtttcgcgctatttttattcgcactgtttgttatcgcctgcgggctgggctgtttggaaacggcggccaatccttacgccacggtattgggtgatgccggcggcgcggagcggcggctgaatctggcgcagtctttcaacggtctcggtcagtttatcgggccgatgatcggcggcacgctgtttttctcggcgatgcacaacgacggcggcggcgatcaggggacggtgaaaatgacctacgtggtgattgccgtgctggtgctggcgatcgccctgctgttccgccgcacccggctgccggatattcgtgaagaggcgcccgcagcgcacggtgcggcggcgcagggattgtggcggcagcgtcactttaccggcggcgtgatcgcgcagtttttctatgtggcggctcaggtcggcgtcggcgcgttctttatcaactacgccaccgaacactgggcggatgtctctaaccagcgggcatcttatctgctgtcggtcgccatgatctgttttatgctcggccgcttcttcagcacctggctgatggggcgggtgaagcccgccacgctgctgatggtttatgcgctgattaatatcgtgctgtgcggcgtggtgatgctgagcatcgacggcgtgtccgtggtggcgctgattgcggtgttcttctttatgtcgattatgttcccgaccattttcgccctcggggtgaaaaatatggggcaacataccaagcgcgccagctcgtttatgattatggctatcgtcggcggtgcggtgatgccgtacttcatgggcaccattgccgaccgttacagcaccgcgctggcctacgggctgccgctgctgtgctttgtcgtggtgctggcgtacggcctgcgccagcgccgcgcctga

SEQ ID NO: 444338 - DNA, 357 bp, Serratia marcescens
atgagcggcgcagcgcagcggcggcgcttctgtcaggcgctcgacctggtcgactcaccggcgctgattgccgagtatcagcgtcatcatcagcgtatctggccgcagattgccgggcatttgcgcgaccacggcattctggagatggagatttatcgcctcggcacccggctgtttatggtcgtcgaggtcagcgccgcgttcgacgccggacgttttgagcgcgacagccggcttaaccccgatgttcagcgctgggaagcgttgatgtggaaatatcaggttgcaacgccctggacgccgccgggcgaaaaatgggtggtgatggagcaaatcttctcattaaccgaacaatga

SEQ ID NO: 444339 - DNA, 777 bp, Serratia marcescens
atggatctgtatcttgaagataaggtggtgattgtcaccggcggcggctccggcatcggcgcggcgatttcgctgacgctggcgcaggagggcgcggtgccggccatcgtcaccaacgcagcgccggatgaggcgtttctcgcccggctgacggcgctgcagccgcgcagcagcgtggtgatggccgatctgtgccgggagagcgactgccagcaggcggtggcgcaggtgcttgaacgctatggccggctggacgggctggtgaataacgccggcgtgaatgacggcgtggggctggaggccgggcgcgcggcgttcctcggctcgctggagaaaaacctgctgcactattaccagatggcgcatctgtgccaggcggcgctgcaggacagccagggggcgatcgtcaatatcgcttcgaagaccgcactgagcgggcagggcggcaccagcggttataccgccgccaaaggcgcggtgctggcgctgacgcgcgagtgggcggtgtcgctgcgggagagcaaggtgcgcgtcaacgcggtggtgccggcggaggtgatgacgccgcagtatcagcgctggatagacaccttcgaccagccgcagcggcagctggcgaagatcagcgcccacatcccgctgggacagcggatgaccacgccgcaggaaatcgccgataccgtggtattcctgctctccggccgttcgtcccacaccaccgggcagtggctgtcggtggacggcggctatctgcaccttgaccgggcgattacatga

SEQ ID NO: 444340 - DNA, 1278 bp, Serratia marcescens
atgacgacgattaccgcgctgcgggtggaggatatccgcttcccgacctcgcagcagttggacggttccgatgcgatgaatcccgatccggattattcggcggcctatgtgattctggacaccgatcggccggatctgagcggccacgggctgacgtttaccatcggccgcggcaatgagatctgctgcgcggcgatccgtgcgctggagccgcagatcgtcggccggcggctggcggatatcaccgccgatatggggacgttctggcgtcagtttaccggcgacagtcagctgcgctggatcgggccggacaaaggggcgatccacctggcgaccggggcggtggtcaacgccgtctgggatctgtgggccaaggcggagggcaagccgctgtggcagctggtggcggatatgacgccggaagagctggtgcgctgcatcgactttcgttacatcaccgactgcatcacgccgcaggaggcgctggcgctgctgcgcgaacgggcggaaggccaggcgcagcggcgggaaaatctgctgcagaacggctacccctgctacaccacctcggccggctggctgggctacccggacgacaaactgcggcggctgtgccagcaggcggtggacgccggtttctcccatatcaagctgaaggtcgggcgcgatctgcaggatgatattcgccgggtgcgcattgcccgtgaaacgatcggcccggatcgtcagctgatgatcgacgccaatcaggtgtgggaagtggaagaggcgatcgcctgggtcaatcagctggcgttcgccaacccctggtttattgaggagccgaccagcccggacgatgtggaggggcaccggcgcatccgcgagggcgtgcggccggtgaaggtggccggcggcgagatgtgtcagaaccgtattctgttcaaacagttcattatgcgcggcgcgctggacgtggtgcagattgacgcctgccgcctgggcggggtgaacgaggtgctggcggtgatgctgatggcggcgaagtaccggctgccggtctgcccgcacgccggcggcgtcggcctgtgcgagtacgtgcagcacctgtcgatgattgactatctgtgcatcgccggcagccatgaggggcgggtcattgaatatgtcgatcatctgcatcagcactttgtcacgccgtgcgagattcgcggcgcggcctatatgccgccgcgcgcgccgggctattcgatcgagatgaagtcggcctcgatcgaacggttccgctttcgcggttag

SEQ ID NO: 444341 - DNA, 846 bp, Serratia marcescens
atgaaactgttacgttatggcgccgtggggcaggaacgtccgggcgtgttggatgaacacggagacattcgcgatctttctcagcatatcgccgacgttggcggcgcggcgctgctgccggacagcatcgatcggctgcggcagctggatatcgccagtctgccgcgggtagaggggcagccgcgtctcggcgcctgcgtcggcggcatcggtaaatttatctgtatcggcctgaattacgccgatcacgcggcggaaaccggcgcaacgattcccgaagagccggtggtgttcagcaaatggaccagcgcggtggtcgggccgaacgacgacgtggagatcccgcgcggctcgcagaaaaccgattgggaagtggaactgggggtggtgatcggccagggtgggcgctatatcgccgagcaggatgcgctgcgccacgtcgccggttactgcgtgattaacgacgtgtccgaacgcgaattccagattgagcgcggcggcacctgggacaaaggcaaaggctgcgacactttcggcccgaccggcccgtggctggtgaccgccgacgaggtgccggatccgcagaacctcaggctgtggctggaggtggacggccggcgctatcaggacggcaacacccgcaccatgattttttccgtcgcgcatatcatcagctacctgagccgttttatgagcctgcagccgggagacgtgatctccaccggcacgccgccgggcgttggcatggggcagcggccgcagccggtttacctgcgcgccggccagacgatgcggctggggatcgacgggttgggcgagcagcgacaaaccacggtacaggcctga

SEQ ID NO: 444342 - DNA, 741 bp, Serratia marcescens
atggatctcaccgggaaacgtgcgctgattaccgccgccgggcagggcatcggcctcagtaccgccaaactgttcgccgcggcgggggcggaggtgattgccagcgatatcaataccgatgcgctgcaggggctggcgggcattactccgctgcggctggacgtgaccgacaccgcggcgattgcggcggtggcggaaacgctgggcacggtcgacgtgctgtttaactgcgccggggtggtgcacagcggcacgattttgcagtgcagcgagcagcagtggcgcttcgccctcgacctgaacgtcagcgccatgttccacaccatccgcgcgtttctgccggcgatgctggcgcagcgccgggggacgattatcaatatgtcgtcggtggcctccagcgtgaaaggcgtgccgaaccgctttgcctatggcgccaccaaggcggcggtgattggcctgacgcggtcggtggcggcggactacgtcgccgacggcatccgctgcaacgccatctgtcccggcacggtggagtcaccgtcgctgcgtcagcgcattgccgagcaggcgcgcgagcaggggcgcggcgaagacgaagtgtaccaggcgtttgtggcgcgccagccgatcgggcgcatcggtaaaaccgacgaaattgcccagctggcgctgtatctggcctctgatgccagcgcctataccaccggcaccgtgcagattattgacggcggctggagcaactga

SEQ ID NO: 444343 - DNA, 1140 bp, Serratia marcescens
ttgaagactattttctctgccgttttagtaaccctcggcctgggcagcctgtcgctgtcggcgcaggccgagacgccgcagctgacgtcgcagatcgtcgaccagtacgccgagcatattttctacaacagcggcgccaccggcatggcgctggtggcgatcgacggcaatcaggtggtcaaccgcagcttcggtgacacccgcccgggcaacaaccagcgtccgcgtccggactcattgatccgcatcgcctccatcaccaagctgatgaccagcgaggtgatggtgaagctggcggcggaaggcaggctcaagctgaccgacccgctgcgcaaatattccccgtccggcgcctacgtgcccggctataattcacgccagccgattacgctgctgaatctggcgacccataccagcggcctgccgcgcgagcagccgggcaaaaaaccgccgaagacgccggtgttcacctggccgaccaaggcgcagcgctggcagtggctggcccatgcgcacatcaccgtgccgccgggggtgcatgcctcctactccaacctggcttacgatctgctggccgacgcgctgtcgcgggcggcgggcaaaccctataccaggctgctgcgtgaaaagatcaccgggccgctcggcatggtcgacaccacgctgacgccgagcgccgagcagtgctcgcgcctgatggtggcctccgtcggccccagcgcctgcggcaataccgtggcggcggccggcagcggcggcatttactctacgccgcgcgatatccagcgctggatgcagcagttcctcgattcgcaggccagcccgcgcaaaaccaccgccgcccgcgagcagaccatgtacttccagcgccgtgaactggtgtcgctgaaagggatggacgtccccggcgatgcggatgcgttaggcctcggctggatctatatggcgccgaaagacggcctgccgggcattattcagaaaaccggcggcggcggcggctttatcacctatatggcgatgtcgccgcagaataatatcggcgtgtttgtggtggtgacccgttcggatctgacccgcttcaccaatatgagcgacccggtcaaccggctggtggccgatctggtggccaacaagggctga

SEQ ID NO: 444344 - DNA, 441 bp, Serratia marcescens
gtgtatcactatatcgaaagcggtttgaatacgatttggctggcgaatggcgttcatcagtcagagatcgagggtgaaatctacatcagcattgaggacgtcgcggggttgcatcgctccattgcccgggcgctggtggcgtgcgagcgcccgttgcaggcggatgaaatccgcttcttgcgggtggaaatgaatatgtcgcagaaggcgctggcggaactgctgggggtcgatgtgcaaacggtcgcccgctgggaaaaggcgcagagcagcttaccgcgtatgacagacgtgatgttgcgcatgctgtatctggaatccgtcaacgaaagcagccgggttggcgcctgcttgcggatgctggcgcaggcgggcgttgccaactcgatggataaactggtgtttgaagaacgcaaccacgcctggcggcggagcagctaa

SEQ ID NO: 444345 - DNA, 342 bp, Serratia marcescens
atggattttataccccctgacaacatcagcgaatttcctctgcgtccggcggcggccaaaaggctgttgcagcagctggcgacatcgcataccgagcgtattctgttaagcgcccatgcccggcagcggatggcggagcggcggatatcgctgcggcaaattctggcggtactcagcagccgccacagccgctttaccgagctgccccatctgacgccggcgggcgactggaagctgaatatgctcggcgtggctgccggcgagcggatagaggtagtcgtggtgttgaaacgggtggtaagcgatcccgccgccttggtggtgacggtgatgatccattag

SEQ ID NO: 444346 - DNA, 516 bp, Serratia marcescens
atgtctcaggaaaatgaacaccggctgcgctttcgcgatgcgatggccagcctgtcggcggcggtgaatatcgtcaccaccaacggcccggcggggcgctgcggcattaccgccaccgcggtctgttcggtgaccgatacgccgccgtcgctgatggtgtgtatcaaccgcaacagcgcgatgaacccggtatttcaggaaaacggccggctgtgcgtcaacgtgctgaaccatgagcaggagatgatggcgcgccactttgccggcatgaccgacgtctgtatggaagaccgcttccggctggaagagtggcagaccggcgcgctcggccagccgatgctgcgccacacgctggcgagcctggaaggggagatcacccaggtgcagagcgttggcacccatcaggtgtatctggtggagatcaagcagattgcgctcagcgacggcggacacggcctgatctactttaaacgcaacttccacccggtgatgcaccagatggcggcgctggcgtaa

SEQ ID NO: 444347 - DNA, 1377 bp, Serratia marcescens
atgaaccaggtcgattcgcagccgcataaagcgcagagcgccgccgagcagtcggtgattaacaagctgtttcggcgtctgatcgtgtttctgtttattctgtttgtcttctcgtttctcgaccgtatcaacatcggcttcgccggcctgaccatggggcaggatctgggcctcagttccaccatgttcggcctggcggcgacgctgttttacgtcacctatgtgattttcggcattcccagcaacatcatgctgagcatcgtcggcgcgcggcgctggatcgccaccattatggtgctgtggggcatcgcctccacctgtacgctgttcgccaccgggccgaccagcctgtatgtactgcgcatgatcgtcggcattaccgaagccggctttctgccggggatcctggtgtacctcacctactggttcccggcctattaccgcgcccgcgccaacgcgctgtttatgatcgccatgccggtcaccatggcgatcggctcgctggtgtccggctatattctggcgctggacggcgtgctgaacctgaagggctggcagtggctgttcctgctggaaggcattccgtcggtgctgctgggcgtggtggtgtggttctatctggacgataccccggccaaggccaagtggctgaacgccgaggagaaaagcagcctgcaggcgatgatggaggccgacaaacggcagcagacggccgccgccgcgccgcggcagacatcgtcgcgcagcctgtggcgcgaggtgttcacgccgatcgtgctgatgtatacgctggcctacttctgcctgaccaacaccctgagcgcgatcaatatctggacgccgcagatcctgcaaagctttaaccagaacagcagcaatatcgtcatcggtattctggcggcgatcccgcagatctgcaccatcgccggcatggtgtggtggagtaaacgatcggatcggctgcaggagcgcaagcggcataccgccttgccgtatctgtttgccgccgccggctggctgctggcgtcggccacgcatcatagcctgatccagctgctggggatcattatggcgtcggttggttcgtttaccgcgatggccattttctggaccacgccggatcgcgccatcagtctggaagcgcgcgcggtggggatcgcgctgatcaacgccaccggcaatatcggctcggcggtcagcccgttgctgatcggctggctgaaggatctgaccggcagcttcaactccgggctgtatttcgtcgccgggctgttggtgataggcgcgctgctggtgtggcgcattccgatgaacgccgcgcagcggcgcagcgccgtcaatcatgacaagatcaccggggacgagcttgccccctga

SEQ ID NO: 444348 - DNA, 795 bp, Serratia marcescens
atgcttatcaataccttcaaacaggcgctgcaggaaaagcgcccgcagatcggcctgtggctcggtctgtgcagcagctacagcgccgagctgctggccggcgccggtttcgactggctgctgatcgacggcgaacatgcgcccaacaacgtgcagacggtgctcggccagctgcaggcgacggcgccgtacccgagtcatccggtggtgcgcccgccgtggaacgatccggtggtgatcaaacagctgctggacgtgggggcgcagacgctgctgatcccgatgatccagaacgccgaacaggcgcgcgcggcggtgcgcgccacgcgctatccgccgcacggcatacgcggcgtcggcagcgcgctggcgcgggcctcgcgctggaaccgggtgccgaactacctgcatgacgccgacgcgcaaatgtgtgtgctggtgcagattgaaacccgcgaggcggtcagtaacctggacgatattttgcaggtcgacggggtggacggggtgtttatcggcccggcggatctgagcgccgatatgggctttgccggcaacccgcagcacccggaggtgcagcagaccatcgatgatgccatcgcgcgtatccgcgccgccggcaaagcgccgggtattctgatggcgcaggcggatctggcgcgccactatctggcgtgcggcgcgctgtttgtggcggtgggcgtcgataccaccctgctggcgcgggcggcggagaaactggccgccgagtttaaagcgggaacggcgcagggcgatgccccgggcgtctattaa

SEQ ID NO: 444349 - DNA, 633 bp, Serratia marcescens
atgaaaggaaccgtattttcggtggcgcttaaccaccgcagccagatggacgcctgggaccgcgcgttccatgacgtgccctacaagaccccgccgaagaccccagtatggtttatcaaaccgcgtaacacctacctgagccacggcggtcagatcccgctgccggcggcagaaaaagtttacagcggcggcacgctggcgctggtgatcggcgataccgcccgccaggtgccggcggcgcaggcggcggcgtatatcgctggctatgcgctggccaacgacgtcagcctggcggagagcagcttttaccgcccggcgatcaaggccaagtgtcgcgacggcttctgcccgctgggcgagatggcgcagctggataacatcgaccggctgcagattgtcaccgagatcaacggcgtggagcaggatcgctggtcaacggcggatctggtgcgttccggcggcgagctgctggccgccatcagcgagtttattacgctgcagccgggggatgtgctgctgatcggcacgccgcatcagcgggtggcgattaacccgggcgacgaggtgacgatccgcgccgccggcctgccggcactcagcaacgttgcggttttggaaggagagcaagcatga

SEQ ID NO: 444350 - DNA, 786 bp, Serratia marcescens
atgaccttcgccgcggatgcgttccgcgggcaggtggtgctggtgaccggcggtgcgcagggcatcgggctggcgatcgccggtgcctttgcccggctgggggccacgctggtggtggccgatctccagcatgataaggcgcggcaggcggcggaacagctgacagagcagggtgggtcggcgcaggcgctggcgtgcgatctgggcgacgcggcgcagatcgccgcgctggtggcacaggtaacgcagcgctgccgccggctggacgtggtggtgcataacgccgcctatttcccgctgacgccgtttgccgagattgaccgcgcgctgctgcagcgcaccctcagcgtcaacctgatggcgccgttccatctggcgcaggcggcgctgccgtggatgcgccgccagggcggcgggcgcattctggtgacctcatcggtgaccgggccgaaggtggcctatcccgggctggcgcactatgccgcctccaaagccggggtgaacggctttatccgcgccgccgcgctggagctggcgccttacggcattacggtcaacggcgtggagccgggcatgatccgcacaccggcgatggcgaacctgggggatgacgccttcaatcaggcgattggcggcgcggtgccgcttggccggctgggggagccggaagatatcgctgcggcgatggtgtttctggcctctgcggcggcggggtatatcaccggccagacgctggtggtggacggcggcgcgctgctgccggaggcccggcccgccgcgtcctga

SEQ ID NO: 444351 - DNA, 801 bp, Serratia marcescens
atgcattcagaagcggtgtttattcaggttggcgcactggcggagggctttgcccccgacagtcataccctgcaggcgcaggacgatttggccgggcagacgctgagcctgtactttgccgacggcgagcgtctcgacgtctgctttgtcgacgggcagacgctgcactggcgcgggcagccggcggactatcgcgccaccgcgctgcgccccggcgtgctgtttatcgacttcctcgacccgcagcgcgccaacgccagcattacgctggtatgtaatcgggcgctgggcaatttcaccgcggtgtacggccaactgccggatgaggtgcagacgcgcctggacgctttcagccgggtggagcaggggctgccgctgaccgcggtggcggccgagtttcgcttcggccggctggcggatgacgatgcgccgctgccggcgtttaccgacgaactgatcggcatgcgcaatatgtatacctacagccccaccgagcgctatgagcatatctacctgaacgacaatttctacgcctggcaatgtctggacggggtggagaaagggctggcggacgttgaccgctgccactacgtcaaggtggcagagcagctgtatctgtttgtctggcgcgaaaagatcattccgaccctcggcgtggtgatgatcgatctgcaggggctgcgtaccgacggcaagatcctcggctatcagggcagcgacttcagcgcgctgagtaattttgccgtcggcgcgcatgcgcaggtgctcaataccacccgccatccgcggagcggggcatga

SEQ ID NO: 444352 - DNA, 783 bp, Serratia marcescens
atgactagaacggtggtgattaccggcggcggtaccggcatcggcgccgcctgcgcccggcaactggccgggcagggcgatcgggtgtttattgtcggccgccgcgccgcaccgctgcaggcgctggcggcggagattggcgccacggcgctggtgggcgacgccgcctgcggcgacagctggcgcgacacgctgctgccgcagattatgcgccagggcgggcgtatcgactgcctgatcggcagcgccggcggcatgggattaggcgcgctgggcgagatgacggacgccgcatggcggcaggcgctggacagcaacctcaacagcgccttcgccagcgcgcgcgcctgcctgccggagctggtgaaaagcggcggcagcctgctgctggtggcgtctattgcctcgctggccgccgggccggaggcgtgcggctacgtgaccgccaagcatgcgctgatcggcctgatgcgctccgtggcgcgcgattacggcccgctcggggtgcgcgccaacgcaatttgccccggctgggtgaccacgccgatggccgatgaagagatgcggccgctgatggcggcgcatggctggacgctggatcaggcttaccgtcaggtatgccgcgacgtgccgctgcggcggccggccagcgccgaagagatcgccgaagcgtgctgttttctctgctcgccgcaggcgtcgatcattaccggcgccacgctggtggccgacggcggcgccggcgtggtggatgtgcctactctggcttttacttccctataa

SEQ ID NO: 444353 - DNA, 588 bp, Serratia marcescens
ttgatcgccttacgtccctcggttaaccgcgtctggcagcgtgaaccggccggctaccgcgccggcagcgcgctcgaccggctgcaggcggatctgcgtccctatgcctgcgagcggctgtccgccggccgtctatgcctgacgctgccgcaggggccgcagcttgagatcagcgaacggccgcaggcgctgtttctggcgcatatcgtcagccaccgtttttccctgagcggccgcactgcgctgacgggcagcgcccggctgacggtgcgcggcaccggctggtggcggcaacgcggcgtacgctattgcacggcgggcgatgaggccgccgcccggcagcttgcgggctggctggcgcgctatccgcaaatcggcgcgacgctggcgcagctggatttccgccatgcccagctgacgctggcggcggggcgctggcagttcagcatcgaacatttcgccgcctgcgaggtggtcagccgcctgccgccgggccggcgctatttacgcctgaccgcggcgcagcgctgtctgctgctcagcgcgtgtctgatggtggcgcaactgatggagaaaatcgatgactag

SEQ ID NO: 444354 - DNA, 1494 bp, Serratia marcescens
atgaacctgtcgtcgcgcctttccgcccaccttgaacgaggcaaggtgggctttcccaccacgctggccagctcggtcggcgtgattatggccagcccggtgatcctgaccgtaaccagcggtttcggcatcggcggcgatacctttgcgctggcgatgctgatcgcttttgtgatgatgcaggcgcagctcaccacctttgccgaagcggcggcgatcctgccgaccaccggttcggtctacgactacatttcctgcggcatggggcgcttcttcgccattaccggcgcgttgtccgcctatctgatcgtgcatatcttcgccggtacggcggaaaccattctggccggcatcatggcgctggtgaattttgaacatctcaacaccctggcgaccagccataacgcctcatggatggtcggcgtcgggctggtggtgattttcggcctgctgaacgcgttcggcattgaggcgttcggcaaggcggaaatcgtactgaccttcggcatgtggagcacgctggtgattttcggcatcgccggcctgctgtcgccgccggcggtggcgctgcccggctggttcggcagcgcgctggacgtcagcgatccctttgcggtgttcagcctggtggggatggcgatgtttatgttcgtcggctgcgaactggtgacgccgatggcgccggagatcaaacgctcggcctgggtgatcccgcgcgccatggcgctgggactgtgcggcgtcgccgcctgtatggcgctgtacggcgcggcgctcagccatcaggtggagaacgtggtggtcgacgccgagcatcatgtgcgcctgctggatacgccgatggcgatcccggcgttcgccggccaggtgatgggcgagttcggcaaatactggctgggcgtcggcctgctgctggccggcgcggcgaccatcaatacgctgatggccgcggtgccgcgcattctgtacggcatggtgctggacggcgcgctgccgaaggcgttcgcttacctgcatccgcgttttaaaacgccggtggtcggcattgccgtggcggtgctgatcccctgcgtgcacgccttcgccattcagggcgatctggagcgcattatcccgatggtgctggcggcggtgtgcgcttggggcgtggcctacctgctggtgacgctgtcggtggtgctactgcgcatccgccggccggatctgccgcgcgcctataaatcgccgctgtttccgctaccgcagattgtgtccagcatcggcatcgtgctggcgattatctatatcgcgccgccgggcatgccgcgcagcgcggtgtatatcccgttcggcatcatgatcggcctgaccgccgtgtacgccctgttctggacgctgtgcgtgcagcgggtcaacccgttcaagccggtgccggtggagcaggtgctgatgcaggcgttggataagtcggaacgcgaggaggtgcagtttgatcgccttacgtccctcggttaa

SEQ ID NO: 444355 - DNA, 1185 bp, Serratia marcescens
atgaatatcgatgcgctgcgggcgcgacaaatcccggtcagcggcgtagcccgcgccgccgcgccgttccacctgctggtgaaaccggtcggcgccggctgcaatctggcctgccgctactgctactatccgcagcgcggcgacaggcctaggcggatggacgatgcgctgctggcgcagtttatccgccagtacatcgccgcccagccgcgttacagccgggagatcaactttgtctggcaggggggcgaaccgctgctggcgggcatcggcttctataaacgggcgctggcgctgcagcgccgctatgcgccgccgggcgtgatggtcagcaacagtctgcagaccaacggcacgctgctgaccgacgcctggtgccggctgttcagagagcataattttattatcggcgtcagcctggacggcgatcgtcagacgcaggacgcccatcgtccggaccggcgcggcaacagcagctatgacgctgcgttgcgcggtattgcgctgctgcagcagcacggcgtggcgtttaacctgctggtggtggtgcacgacggcgtcgccgacgccgccgcggcgctgtatgaccaggtgacggcgctgggggcgcgttttctgcagtttcaaccgctgatgctggagggcgacgcgccggcgggcggctatagcctcagcgcggccaactgggggcgctttatgcgcgatatctaccgccgctggcggcagcgcggcgacgtggggcgggtgtttgtgatgaatattgagcacgtctacgcgcagtatttcacccaggtcagccccgactgcgtgcatgcggcgcgctgcggcggcaacctggtgatggagcaggacggcggcgtctacgcctgcgatcacctgattgacgaggcccaccggctggggcgctttaacgccggcgatgagctggcgacgctggcggatgccgcccgcgcgctgcctttcggccggcgcaagagcgtacggcgcgagtgccagcgctgcagcgtgaagatggtgtgccagggcggctgcccggcgcatctggggccggacggctataaccggctgtgcgccggctactacgcctttttctccgaggtgctggccccgctgcggcgctacccgcgcgacgccggcgggctggcgctgtggcgcagcgcacagcctgaggcatctcgtccataa

SEQ ID NO: 444356 - DNA, 1707 bp, Serratia marcescens
atgaaaagaaaagtggtggcagtggcgttgagcagcgtggtgtcaggcctggcgcatagcgcgccgggcgaacggcccaacgtattgattattgtggcggacgatatgggctattccgacatcacgccgtttggcggcgaaatcccgacgcccaatctgcaggcgctggcagagcagggcgtacgcatgagccagttttatacctcgccgatgtcggcgccggcgcggtcgatgctgatgagcggcaacaccaaccagcaggcgggaatgggcgctatgtggtggtatcagaacaccattgcgcgtccgggctatgaaatgcgcctgacggatcgggttgttacgctgccggagcgctttcgcgacgccggctacgccaccatgatggcggggaaatggcacctgggctacaccgacggcgcgcggccgaccgatcgcggttttgaacgggctttcgcctttatgggcggcggaaccagtcattttaacgatgcgaaaccgctcggcaccgtcgaggcgtttcacaccttctataccctgaacggcaagcgggtgtcgctgccgcaggatttctactccagcgaggcctatgcccgccagctgacgcagtggatcgatgacacgccgcaggataaaccgattttcgcctatctggcgtttaccgcgccgcacgatccgctgcaggcgccggatgactggatcgccaggtttgacggccaatacgatgccggctaccaggcgatttatcagcagcgcatcaagcggctgaaggcgctgggcatcattaacgacaatacgccgctgccgtcgctggcgctggataaggcatggcaggcgatgacgccgcagcagcaaaagtatgcggcgaaaaccatgcaggtgtatgcggcgatgatcgccaatatggacgcgcagatcggcaaggtgatgcagaccctgaaacagaccgggcgcgataagaacaccatcgtgctgttcctgaccgacaacggcgccaacccggcgcagggcttctattacggctcgcagccggactactggcgtcagtttgacaacagttacgccaatatcggccgcaaggggtcgtttgtggcttacggcccgcactgggctaacgtcagcaacgcgccgtacgccaattaccataagaccaccagcgggcagggcggcatcaataccgactttattattgccgccccgcagctgcagcagcatggcaccatcgaccgtacgccgatggcgatctatgacattgcgccgacgctgtatgaatttgccggcatcgacgccgccaagccgctgaaaaaacaggcgccgctgccgatggtcggcgtcagtttcaaacgctatttcagcggcgaggcccaggcggcgccgcggctcaactacgccgtggagctgcacaatcaggcggcctatgtcgacggcgactggaagctgcgccggctggtgaaaaacggcccgcaggccgccagcgcgccctggggactgttcaatctgcacgacgatccgctggaaacccgcgatctggccgccgagcacccggagatggtcaaacgtctcagcgcggcctatcagcgctatgcccggcaggggatggtgattgaagcaacaggcaagatggtggactacctcggggtggatgccgacggccattatatcggtatcgatccggcgacccgccagccgctggcggaggcgccatga

SEQ ID NO: 444357 - DNA, 660 bp, Serratia marcescens
atgcagacaccatcagcgcccgcggcgaacgatgcctttattgccagttgcctgaacaccatcgcgcatcttattcccgtttccgccggcgtgttttatttggtcaacagccagttaaaacccgagcattatattttgcagggcatttccgccaatacgcatcggcaatatttggcagatttccagcatattgatccgatgaaaccggccaactttcatcggcacgatattaccatggtaaatatgacgccggcggccatcgccaataaccgccagtattaccatgattttatgttgccgaataatatgcgcgatatgaccgaaatctttattcgccaacgcaagcgcatcgtcgccggggtgtcattaatccgtgatacgccgtttaccgcgctggaacgcggccggctgcacgcggtgctgccgctgattgagctggcgacgcgcgacctgctgcccgagggcgaagcgcagctgctgaccgccaaagagcaggaaattgtcaacctggtgcgcgaaggcgccagcaataaacgcattgccttaaagctgggtatttcgctctccacggtgaaaactcatatgcgcaatatattttctaaaaccgcagtggtaaaccgcaccgaattggtgtccagcggatttatcgcccagggataa

SEQ ID NO: 444358 - DNA, 1194 bp, Serratia marcescens
atgtccagcgatgccttttccgcgcctgcccagcgggcggcgctgccctgcccgccaaagctgctgatcgccattatcgccttcgccgccatcgcacccggcgtgctgatgaccgcgccggcgatcgccgcgcagctggccgctgaatggcgtctgacgcctgcgcagatcggccggctgttcgcctgcgagctgggggcgatgagcctcgccacgctgccggcctggtggtggatgagccgcatcaactggcgtcgggtcgcctggctggcggccggcgtctttctgctcggcaatctggcctcggcgctggtcagcggcttcggcccgctgctggcgctgcgctttatcgcctcgctggcgggcggcacgctgatgattctttgcattacctgcgccgccggcgtcagcaacgccagccgggtttatgcctgctgggtgctgggccagctggcgctgggggcgatcggcctgctggcgctgccgccgctgtttgcccagttcggcctgatggcggtctacctgctactggcggcgctgatgctgtgctgcctgccgctgatcgccgcctttcccgacggctaccgaccggcgccgcagacgacaacgtcccgccgccccgccccggtcacgcgcaagctgtgcgcggtggcggcagtgctgtgcttttatatcagcctgagcgcggtctggacgtttatcggcaatatcggcgccgccgccgggctgtcggcggtgcacggcggccaggtgctggccatcgccacgctgttcggcatcgccggcgccggcatagccgcgctgaccggtgaccatcgtcagcgacagcggctgatggtcttcggctacctgctgctgctgaccagtatcatgctgctgttcgccaccccgcagctggcgcgctttgccgccgcggcggtgctgttcaaattcacctggaccttcgtactgccgtttatgctggcggccgtcgccgggctggataacaacggcaaactgatgaacggcatcaacctggtcatcggcggcggcatggccatcggtccgctgctggccggctatctgctgcaatttttcggcggcttcggcgcgctgctcggcggtgcactgagctgcgccctgctgtcgctgctgctgatctcgctggcatcccgcgcgccgcgcgcgccctttaacaaggagtctgcaacgtga

SEQ ID NO: 444359 - DNA, 1113 bp, Serratia marcescens
gtgaaaagaaacaccggctttttcttcgatgaacgctgcttctggcacagcaccgggctgcacgccaccacgctgccggtcggcggctgggtgcagccccccgccggcgccagccatgccgaatcgccggaaaccaaacggcggatgaaaaacctgatggacgtctccggcctgtcgcgtcagctgcagctgcgcagcgccgaactggcggacgaacaggacctgcagcgtattcacccgccccactatctgcaacgcttcaagcagctgagcgacaacggcggcggcctgctgggtgaggaagcgccgctcggccccggcagctacgaaatcgccaggctgtccgccgggctggcctgcagcgcgctggaggcggtgctgcgcggtgagctcgacaacgcctattcgctgtcgcggccgccgggccaccactgcctgccggaacagtcgatgggcttctgctttctggccaatattcctatcgccatcgaacgcgccaaacagagctgcggccttgatcgggtggcggtgattgactgggacgtgcaccacggcaacggcacccagcacatctactggcggcgcgacgacgtgctgaccatttcgctgcatcaggacggctgcttcccggccggctatgccggcgagcaggatcgcggcgccgacgccggcctgggttataacctcaatattccgctgctggccggcgccggcgacgacagctacctgtacgccatgcagcgcatcgtgctgccggcgctggcgcagttccgtccgcaggcgataattatcgcctgcggctacgacgccaacgcgatggatccgctggcgcgcatgcagctgcacagcgacagcttccgcgccatgaccgcactggtgcaggaggccgccgaccagctgtgcgacggcaaactgctgctggtgcatgagggcggctatgccgagtcctacgtgccgttttgcgggctggcggtaatggagcagttgagcggcgtccgcaccgaggtgcaggacccgctgctggcctttattcagcagcagcagccgcgcgcggacttcaaccgcttccagcgtgaagccctcgaccaactggcgcgacaattcgacctataa

SEQ ID NO: 444360 - DNA, 807 bp, Serratia marcescens
atgtcgcaacaacaggtcagctttatcaaggggcagcgcggtgatatcgcgctgcatgactggcagcatgacgcgccgcgttttctggcgctgctggtacacggctacggcgagcatctgggccgttaccactatgtggcgcgcacgctgcaggatctgggcgcacgcgtcttcggcccggaccatctcggccacgggctgtcgcagggcgaacgggtgctgattgaggattatgaggcggtggtcgacgatgtgcggcaggccgtcgggcagattcgccgtcagcatcccgatctgccgctggtggtcatcggccactcgatgggcggcatgatcgccacgcgctacgtgcagcgcttcggcgacgacgtccgggcgctggtgctgtccggcccgctgctgggcgaacataccgccatcggcgatctgcaggacatggagaccatccccgatacgccgctgaacgtcagcaccctgtcgcgcgatccggcggtcggcgtcgcctatcaggccgatccgctggtgtggcacgggccgttcaaacgcccgacgctgcaggcgatacggcggtttctggcgaccatcgacgccgggccgggcttcggcgcgctgcctacgctgtggctgcacggcggcgacgatcgtctggtgttaagcgaggagagccgcaccaccctcgaacggctgcgcggcagcgatttccacgccgagctcctgcccggcgcccgccatgaaattttccatgagatcgacaaagatcggacgctgcagcttgtcagcgcgtttatccaacgcacgctgcgctag

SEQ ID NO: 444361 - DNA, 366 bp, Serratia marcescens
atgaaaccacttctgcttaaacaacccttgccggcgctgacggagatcggcagcgtcagcaacctgggggcgacggtgattgccggcgaaccgacggtcagcgtggcgatgatcgacggcgcgcccgacgacaacctgagctgcggcgtgttcagctgcacccgcggcagctttgtgatggagtatccgtttgccgagcatgcgacggtgtgggaaggcacggtgacgctgaccgatgaagccagcggtgaagcggtgcagtatcaggccggcgacgcctggtttgcgcccaagggcgccagagtacgctgggacatcacctccgatcgctttgtaaagcactacctggcggtagtgaacggctga

SEQ ID NO: 444362 - DNA, 756 bp, Serratia marcescens
atggatattcagcttgccagactgacgacggtgattgacgccgtggcgacccgccatttctatccgcacctgctggcctacctggaacgcttcttcgcgttcgataatgcgctggtgtacgcctttgagcaggatcggccgccgtgctgcctgctgaaggcggaaaaagagaacagcgaccgggtgaacgcgctctatcagcagggcgcctatctgcaggatccgttttatcacgcactgaacgacgggcggcagggggatatcttcacgctgcgccagttggctccgcgcggtttctaccacagcgattactaccgcaatttttaccgtaaaaccggctggcgcgacgaagcgggcattgtgctgcagctgacgccgcagcgccggctgggggtgtttttcggttcttcacggcgcacggtggcgctgcgtcagccacggcagcaagagctgcgcgaagcgctgatgttggtgcgcagcgtggcgcgtctgcacggcgatgtggcgccggatgccgcgccggccacgccgtgcgatcgcggcgcgacggcgcgcgcaacgctgaccccgcgcgagcgtgaaatcgttgatttaattctggccgggcaaggctcgccgcagattgccgagcggctgtttatcagcctgggcacggtgaaaaatcaccgtaaaaacatctacggtaaactgggcatcggttcgcaggccgaactgttcagcctgctgctcggccccacgctgtcgcacagcgcatga

SEQ ID NO: 444363 - DNA, 1122 bp, Serratia marcescens
atgaccctcaccattgccaaccgccacacctggttcggccagggcgccatcggacagttgatcccgcagctggagcaggatccgcagcccacgctgctgttcagctgccgctcgtttctcaatggcccgatatacgccgcgctggcgccgcagctcgatccgctgctgatcggccgggagatcgtcagccatgaggcctcgccacaggagctggaccagtgggtcgcgcgctggcgcggccaggcggcgcgggtggtggccatcggcggcggcagcgtgatcgacgccgccaaggcattctcagcgctggtggaacacccgctgccgacgctgcgctatatggaaaaggtgggcgacacgcccatcagcggcgccaccctgccgctgatcgccattcccaccaccgccggcaccggcagcgaagtcacccaaaacgcggtaatcaccgatacccgcgtcaaacaggttaaagcctcgctgcgccacgccaattttgtgccgcagacggcgatcctcgatccgcagctgctgcagggcgcgcccgaccacgtgctggcctactgcgcgattgacgctttcacccatctgttcgaggcctacctgtcaaaaaccgccagcagcctgacgcgcgagcagtcgctgagcggcatacgcctgttcctcgacgcctggccggcgctgaaccgcagcgacgatgcgcgcgaagccattatgcaggcatcctatctcggcggcctgacgctgagcagcgccggtttgggcgtgatccacggcatcgccggcgaggtaggcgcactgcgcgactaccatcacggccaggtgtgcggccgcctgctgctgccgttcctgcagttgctggcagagagccagcagccgcagcagcgccggctgatgcaagaactggccgggcggctgttcccgcaacatccgggcagccccgagcattacctgagcgacttcatcaccgaacacgccatcgcgccgttctggcaggaaccgctggctctgacggcggacgagctgcgcatcagcgtggagaagtccaacagtaaaaactcgctgctcgactactccgcccggcagcggcaacagatgatagaggcggcattccatatcgaatga

SEQ ID NO: 444364 - DNA, 1209 bp, Serratia marcescens
atggccgtcagttttacgccgctatggagttacccgttgattatgagtcacgatgccgccaatgcgcgttttgacgtgcccggctatgagctggtgtacagcgcgccggtagaaacctgcctgcagaatgatgacctgcgcgacagcgccgaagtctggcggcagatgttcgcccaggcgcggcagcgcatcgatatcgcccagttttatgtgatgaaccagcccggcagccggctggatgcggtgctggcggagctgcgccgcgccggcgagcgcggggtgaaaatccgcctgctgctggagcgcaaggggctgcgtaattcggcggcggatacgctggaacagttggcggcgatcccgcagctggcgctgcgcgtgctggactatcagccgctgagcggcggcattatgcacgccaaatacctgctggtggacggcgaacaggcgtttgtcggcagccagaattttgactggcgggcgctggagcatattcatgaggtcgggctgcgcgtcagcgatgccggcgtggtgcgccagatacaggcggtgtttgagcaggactggcaggcgcaggcgttgcaggcgcagcagcagccggtgccgccattgacctatcagccggcgccgccagcggacagttatttgctcgccagcccgcgcgcgtatgtgccgccgggggtgaccgatacgcagagcgagctgccgcggctgttggcggcggcgcagtggcgggtgcgggtacaggtgatggagtatgcgccgctctccttcgggccggggcgcagccgcccctattatgcggttatcgacaacgccctgcgcggcgcggcggcgcgtggcgtccaggtggagctgatggtggcggactggaacaccaaaaagccggagatcgcttatctgaagagtctggcgctgctgccgaacgtacagctgaaagtggtgaccattcccgccgccggcagcgggtttattccctatgcccgggtgatccacagcaaaatcatgaccattgatgagcagcttgcctgggtcggcaccagcaactggagcggcggttatctggataattcgcgaaatctggagctggtgctgcataacgatgcgctgaccgcgcggctggaccagctgtatcagcaactgtgggacagcccgtatgcggcggcgctgcgtattgaggaagactacccgacgcctcggccgggcggctga

SEQ ID NO: 444365 - DNA, 1257 bp, Serratia marcescens
atgaaagaacataaccctgacgctacgccagatacccgcagcgatcggcaaataaataaaccgtctgcgtttgacaagaaaatagccagaggcgctgcccgctaccataagctcaatagtgactattcattcttcttcagcaaaataagcggctatgacgataacaacaaagcctggatctacagtgaaggcaagcgcaaacttaatttctgcacttactcctatctgggtctgttaaaacatcccgctatcgaagcagcggcgctgagcgcactcaaacaatacggcaccggcacccacggcgtacgcctgctcggcggcaacctggatattcacgagcggctggaacagcgcatcgccggcttctttggccgtgaagccgcattaaccttcagctccggatttatgaccaacctgatggtgatcgacagcctgctcggtaagggcgacgtgattttttgcgacgaacttaaccacgccagtattatcgacggctgcagaatcggtaacgcgcaggtcgtgaggtttccccataacgacatgcagaccctcgaccaacagctggcggccgcgccgccgcaggcgcgcaagctgattattatcgatgccgtctacagcatggagggcgatctggcaccgctggatacactgatcgccctgcgcgaccggcatccgaataccctgctgatggttgacgaagcgcacagcctcggcgtgctgggtgccaacggcaaaggtattgaagagcacttcgcctgccgcggccagatcgacattctgatgggtacgctgagcaaaacactgcccggccaaggcggttttatcgccgccacgcaggcggttatccactacctgcgcatgaccgcccgcggctttatcttcagcgccgcgctctcgccaatcaccaccgcagccatgctggcggcgtttgacgtgctggagcaggaaggtccgcagcggcggaaaaagctgatggaaaacatcacctattttgtcgcagcgttgcgcagagaagggtttgaagtcagggcggagcaggcggcgatcgtaccgattatgatctacagcgaaagccaggcctttgcgatggcgcaatactgccaccagcgggatatttacgtgatgccggtggggtatccggcagtgtccaaaggccttgaacgcttacggatgaacgtcacataccaccacagcaaagacgatctcgacctggcgctgcaggtgctgtgcgcggcaagagaggcggtggcgccgtaa

SEQ ID NO: 444366 - DNA, 870 bp, Serratia marcescens
atgcatcaacgggcggtgattaatcagctgctggcgtggatcgaacagaatctggagcagacgctgtcgctggatgagatcgcggcgaaagccggctattccaaatggcatctgcaacggatgttcaaacgccagaccggccacgtgctgggcacctacgtgcggcgcagaagactgagcgctgcggcgcgcgaactgcggctgacgggcaccagcgtggcgattatcgcggataagtatcagtttgactcccagcagaccttcacccgaggtttccgccggcagttcgggctgccgccggccgcctaccgccgcagcgcggagtggccgggctacggcatgcagccgccgctgcgcttgtgcgcgccgccgctgccggcggcggattttgtcgaactgccggcaatgcggctggtggggcggacgcagcgccgcacgctgacgttaaacgaactgagccggcggaaaaaagagctgcgtcagagcgcctggaatgcgctgcgctgcccgctgtccgggccgccggcggtggcttacggcctggcccggctggatgtcgacagccgccagcaggatcgtcagtgcatggcgtacaccgttgccctggacgatgagcaaacggcgggggaggaggtgaggattgaaccgggagagtacgccagctttgtctaccaggggcaggcggaggatttccagaattttatcgcccgcgtttacgacagcgtgatgccggcgttgaacgtggtgcgccgtccgggcagcgatattgagcgtttttaccccgcgcagggcgggttttaccatcaggccggcgcggcgatccactgcgaatatctgatccccatccgccgtttatcggcgtcgagttag

SEQ ID NO: 444367 - DNA, 384 bp, Serratia marcescens
atgtcctttgacgccgcaaccttcccttatgtccgcatgtatcggcccgccgggcagccgcgtgacgtcgtcgccgaatttgccgaatttggtgcgctgctggtgcggcggcagccgtttgtgattgtgtgtgaaccgcgctctgacgagcagggagagcctacccgcgatgaacgcacgcaggtcgcgctgtggaaacgcgaacaccgcgccgcgctgaaacagtatgtaaaaggcatggtgatgatcgagccggatagcgcgcggcgacttgctgcggggccgtttgccgagtactccagcaagttttggggatacccggtcgaggttgtggctgatagcgaacaggcgcatcggctggcgcaggcgtggttgaatcaataa

SEQ ID NO: 444368 - DNA, 822 bp, Serratia marcescens
atgtcttttgtcaccaaaaaggcctgtctggacattgataacgtgccgcgcccggtgttcgccgtgcagggcgcgacgattcacgaaaattgggaagtcgagccgcatcgtcaccaaaaggcgcagctgatttataccgcgcgcggcatgctgcgctgcgaggtggaaaacgggctgtggctggtgccgccgcagtgtgcgctatggatgcccggcaatgtgctgcacagcgcgcgcggcaccggcaccaccgagtgttatgccttgtttgtcgacccggccgccgccggcgatctgcctgccagcagttgcaccctgaccatttcaccgctgctgcgcgaactgctgctggctgccagccgctttaccccgctgtatgatcagcacggggccgagggccggctgacgacggtgctgttggatcagttggcggcggcgccggtggaaaatctgcatctgccggtctcccaggacgcgcgtatccgccagctgatggatcaattgctggcggacccggcgaataagcgcacgcaggcgcaatgggcgcagcatatcggcatgagcacacgctcgctgagccgtacgctgcagcagcagttggggatgagtttcggccattggcgacgtcagctgcacgtaatgctggcgctgcaacgcctgacgcagggcgtcagcgtgcagagcgtggcgttggacctgggctatgagagcgccagcggctttgtcaccatgttcaggaaagcggtcggcaagccgccggcgcgctatctggcggaaaaggcggcggacggcccaatgccgtccggcaccatcgccatgtag

SEQ ID NO: 444369 - DNA, 1005 bp, Serratia marcescens
atggcgacgttcaagcgtaatattgcaccgggttactgcattgcccaacagccagggccattggcttatcatgcacataggctatttggcggaaagccctcagaggcggcacgcttctttatgacaatcaatgccgatacgctgcaggtactgcccggccagatactaattgtcgcggatcctgccaacgctaatcaggcaatgcagttaactgcattaaaacaggccaaggcacgtacccatcaggccgtccgtgccggcgatggcaacttttcccaatttttacaccgccactatgcagcaattgcggcattcacccagtacggcgataccatcacaggtctggttaccgacgctggggaacgttactacagccagatccgcaatattctgctggagatcgaaaaaacctatcaaaatcagtttcgcacccatggcacactgattggcagccaatttcaggttgaacgcgcccggttgttcacttcgctacagccgttacttaatcgcttcacacgtgcccagcttaatatgcgcgaataccatgatatcaagcgcgctctggggctttcgagtaaatcgatcgtacatgagtggagtagcgccggcatcggcgccatcaagggatattcaaattacctcgatagcgccagccgagcggctaaatttatgaaagctggcggttgggtagccatcgccctttccggcttaaataccaccaatgatgtttaccatgcctgtaccaccgggcgtgagcaggaatgcagcaaaatcgcgattaaaggctacagcaactttgcagccagtacagctttcggcataaaaggtggtgaactcggtgctgcaggggctatgatgttttgcggtatagtattgggggccatgtccggaggtataggttcactggcctgcggtgtagccggaggggtagttgggggcgctgccggcggctggtttggcggatatgttgctgatacaacgacagatttaatttttggtgaataa

SEQ ID NO: 444370 - DNA, 396 bp, Serratia marcescens
atgaaaattgcgatgctgattgttgcttccctgctcataatttgcgggttactcaaatatttgtattcgcgccaatataaaaaagaattcgcctccctgtaccaggcttatatcgatcatgggcatttcattcctccccatgtcgttattgccgaccattttggtagtttgggtacgtcaatcaaagcacaatggttcaggtggatcctgaaaaataaaaaaataaaaataacgcagggaaactatctgccgaaaaaaagttatgatttcttgcagtatgcggcttcggaaaaattaaagtcatggttaattaacgacggtcgatttctgctgctcgaaggaattttatttatcgtggcgctggttttagccgtgctcgttgagaagtcatcatga

SEQ ID NO: 444371 - DNA, 438 bp, Serratia marcescens
atgacgctgtcagcgatctgcgtgaaaaaccttatacaaaacacagctaccgcattacttaccctaagcacgctaagcggctgccagctggaaaaacagtggtattacccgctgcaggtttcgctgcaagataaccagccctgcttcgccgtacctgccgacagcgtcagccctcacgatagcctgcaaaaccgcggcatcatcgtctcccggcagtcatcgcagcaatgggatattgtctggacctcgcctgacattcatccgctgccggcactgctgcccggccagtgcgtcacatacccgcaggccgcctggcaggttggcaactatgcggtgatgatgggcgtctcgcttaatcacgatcgtgagcggcgtaaatatacccacgaattttccctcgccaaaacccccgacggccggctgattctccgcccttga

SEQ ID NO: 444372 - DNA, 1077 bp, Serratia marcescens
atgaacgctgtaatgacaaccggccgtcgccttggcgggcgcgcggttttccctctgatgctgctgaccaccatgctgtttgccaccgcgtcccaggcgcaggccgaatccgaactgctgcgcaagccggtcggtaaaggcgcctatgaaatggcgtacagccaaagcgcaaacgcgctgtatctggcgacctcgcaaagccgtaaactggacaaaggcggcgtggtgtatcgcctggatccgaccacgctggacgtaacccagattattcacaacgatatcaagccgttcggcgccgcaatcaataacaaaaccaacacgttgttcttcggcaacaccgtcaacagctccgtcaccgccatcgacgccgccagcggcgaggtgaaaggccggctggtgctggatgcgcgcaaacgcgccgaaggcgtgaaaccgctggcgccgcgcgaactggtggcggatgaaagcaccgataccgtctatatcaccggtctgggcgagtccagcgtggtctgggtggtaaacggcaaggatatgaccctgcgcaccaccattaccgacaccggcaaattcggcaccggcctggcgctggacgccgccgccaagcgcctgtacgtcaccaacagcgaaggcgaactggtcaccatcgacactgccaccaacaaggtgctgacgcgcaagaagctggatgaatctaaagagcacttcttcctgaatatcagcctggatacggcgaatcaccgcgcctttatcaccgactccaaacagccgcagctgctggtggtggatacccgcaacggcgatattctgcagaaaatcgacgtgccggagtcgctggccgtgctgtttaacccggcgcgcaacgaagtgtacgtcacccaccgtaaggccggcgccgtcagcgtgattgacgccaaaacctaccaggtgcgggaaaccctgaaaacgccgacccacccgaacagcctggcgctgtcgccggacggcaagacgctgtacgtcagcgtgaaacaggcttccagccgcgagaaagaggctaccgctcctgacgatgttattcgcgtcagcctgaaataa

SEQ ID NO: 444373 - DNA, 1380 bp, Serratia marcescens
atgtacgctaatatcatcgattttcatccgctgttaaccgcgccggaaccggcgcggcaagcgccgttcgccgccgaggtcgagaactatctgcacaattatcccgacaccgagttcgtcgatatctatctgcacgatctgaacgcccaaatccgcggcaaacgcatcgccgtctcggaactgttcgccctggggcagggctgctatttcccgcagtcggtgtatgcgatggatctcaacggccaggtggtggagtacagcggtctgggccagcaggccggcgaacccgacaggctgtgcctgccggtgtgcggcacgctacgcccctgcgccaaagacccgcagcatagcgcgcagctgctgctgaccatgcaagaaacggacggcgcgccctgcctgctggagccgcgcgtggtgctggcgcagctgcttgagcggctgcaccgcctcggctattacccggtgatcgccgccgagctggagttttatctccatgcaccgcaacagcgccccgggcagcaagaggcgctgttatcgcagaactttgccgttgatgcgccggcgtgccacggtgcgctgctggaggatatcgcccgccacgccaggctgcaggcactgccgctgaccggcgtggtggccgaagcggcagccggccagtatgagctgaacctgcgccacagcgccgaggtgctgaccagctgcgaccagctgctggcgctgaagcggctggtgcgtcaggtggcgcagcagcaccggcagcatgcctgctttatggccaagccggacgcgcagacggccggcagcggtctgcacttccacatcagcctgcaggatgcgcagggccgcaaccgcctgagcatgaaggacgatgcccccggcgacgccatgcgccaggtgctcggcggcatgctggcgctgatgccggcttccatggcgctgctggcgcccaacgtcaacgcgttccgccgcttccgccgcgagatgcatgtgccgctgcgcgcctcgtggggctacaacaaccgcaccgtggcgctgcgcctgccctgcgccgatcgggccaaccagcgtatcgagtaccggctggccggcgccgacgccaacccctatctggccgtcgccgccatcctcgccggcatgctgttcgggctggagcagaacctgccgctgccgccgtccagctgcggcaacggctataacgatccgcaggcaacgccgctgccgctcggccagccgcaggcgctggcgctgtttcaacgctgtgcggcgctgcgacggctgctcggcccggcattctgcgacctgtggcacagctgtaaaagcgcggagctggcgcagtttgagcagctgattaccgacgccgaacgcgcctggccgctgtaa

SEQ ID NO: 444374 - DNA, 711 bp, Serratia marcescens
atgtctcgtctggttctgctctccaataaacactgtgacgccaatgatattatcgccgccgttcaggactacgcgctgaataccctgaccgatgaaagccaggggctgtggctgggttgggacagcaatgtggaaaacttcgccgacgccgccgaccggccggtacaggtgcagcacagcaacggctatgaactggtgacctttcccttttccacccgcgagtttcactaccactatcagggctactaccacgacgggctgtggccggtgttccacaaccgccccgagctggcccatttcacgccggaaaactaccaggcctaccggcaggtcaaccggcagatcgccgccatcgccagcgaatacatctgcccgagcgatttgatctgcattgatgattatcaactgctgccctgcggcgcggcgctgaaggaacaggggctgcttaacccgtgcggtttctttttcgcgctgccgtttcccgccgcgccgctgctgaagaacattcctcagcaccgcgagctggttgagtcgctgctctattacgatctgatcggttttcgcagcctcggcgacgccaataatttccacaactatctggcgaacgcctaccaggtcgagccgctgcccgacaatcagtatcaggtcgacggccatatcttcagcaccgccatctttcccgacgcgcagcacgccagccggctgtgctga

SEQ ID NO: 444375 - DNA, 957 bp, Serratia marcescens
atgaaacccatcgcagtcaccattctgaccggctttttgggcgccggtaaaaccaccctgttacgccatatcctgcatgccgaccacggctatcgcatcgcggtaattgaaaacgaattcggcgaagtgccgatcgaccacgcgctgatcggcgatcgcgccagccgcatcaccacgctgagcaacggctgcatctgctgcagccgcgccaatgaactggaggacgcgctgctcgacctgctggacggcattgaccgcggcgagctgaccttcgaccggctgattatcgaatgcaccggcatggcggaccccggcccgatcgcccagaccttcttcacccatccggcgatctgcgaacgttttctgctggacggcatcatcacgctggtggatgcggtgcatgctgaacagcagctggataaatacagcatcgcacagtcgcaggtgggctatgccgaccgtattctgctgagcaaaaccgacgtcgccggcgacagcgaggcgctgatccggcgcctgcagcgtatcaacgcccgcgctccggtgcacaaggcgctgcacggcgatatcgatctcaaggtgctgtttgatattgagggcttcgtgcttaatgacaggctgaacctgagcacgccggtgttccaccgcatcgcggagccgcagaacagcattcactcgatcgtgctctaccaccagccgccgctggagctggcgcagatctccacggtgatggaggaactgctgctgcagtttgccgacaatctgctgcgctacaaaggcattttgtcgatcaaagacgagccgcgccgcctgctgtttcagggcgtgcagcggctgtacaacgccgactgggaccgcgactggcagccggatgagccgcgccagagcacactggtgtttatcggcatcgacctgccggaagcggagatccgcgcacgctttgccgccctgagctga

SEQ ID NO: 444376 - DNA, 1599 bp, Serratia marcescens
atgccattaaaacgaacaaccctgggcctgttgctggcgggcgccggcctgctgtcggccaataacgcgctggccgcctctgatacgctgatttactgcaccgtggcctcgccggaatcattcaacccgcagctgtccacctccgggccgacctttatcgccacctcgcagatgctgtacaaccgcctggtgacgctgcgcggcagtgacaaaacgcctgccccctcgctggccaccgactggaccatcagcccggacggcaagacctacaccttcaccctgcgcaaaggggtgaagttcaaccgcaataaattctttacccccagccgcgactttaacgccgaagacgtggtgtttacggtgatgcgccagaaagaccccaaccacccataccataaggtgtccggcggtaactacgagtacttcaccgatctggggctggataaactgatcgccaaggtcgaggcgctggacaactatcacgtgcgctttaccctgactcagcctaacgcggcgttcctcgccgactggacgatggacttcgcctcgatcctgtcggcggaatacgccgatgcgatgatgaagaaaggcacgccggagaatgtcgacaactggccgatcggcaccggcccttacgcgctgcagcagtacaaacaggactcgctgatccgctacatcgccaacccgcactactggcagggcgaggtagccagcaagcacctgattttctccatcaccccggacgcgcaaacccggctgtcgaagttgaaaaccaacgaatgccagattatcccggcgccgctgcccgagcagttcgacgcgattaaacgcgacaagaacctgcagttgcacagcatcgacgggctgaacgtcggctatctggcgttcaacaccgccaaaaagccgtttgataacctgctggtgcgccaggcgctgagctatgcggtggataaaaaagccatcgtcgctgcggtatttaaagagagcggctcaccggccagttcgctgctgccgccgggcatgctgggctacaacgataagctgccgggctatgaatacaacccgcaaaaagcgcgcgaactgctgaagcaggccgggctggagaaaggtttcaccaccgatatctggtcaatgccggtcgcccgcccctataaccccaactcgcgccgcatcgccgagatgattcagagcgactgggcgcaggtgggcgtcaaagccaaaatcgtcacctgggaatggggccagtatctggccgggctgcgcaagggcgagcagcacagcgctctgtacggctgggtatcggataacggcgacccggacaacttcgccaccctgctgggctgcgacggcgtgcagagcggcgccaacgtcgcccgctggtgcgacaagtcgtatgactcgctgatcaagcaggccattgcggtcaacaccccggcagagcgcggcaagctctaccagcaggcgcaggaagtgtttgccaaacaggcgccatggctgccgctggcgaacggcaaggtgttttacgccacccgcaacaacctcagcggctacgtggtggacgtcaacggcagtgatttctccaaagcgaagctgaattaa

SEQ ID NO: 444377 - DNA, 1173 bp, Serratia marcescens
atgcaacgcaaactgacgttgacactggcaaccgtgatgatgatgttcccccaactggcggagacgatttacagcccggcgctgacgcacatcgccaccgggtttcaggtgagcgcggaaatcgcagcgcaaaccctgtcgtgttatttcttcgcttttgcattcggggtggtggtgtgggggcgcctgtgcgacctgatcgggcgtcggcccaccctgctggccgggctggcgttatacctgttggcttcgctggcggcgctgtgcagcggcagtttcagtatgctgctggcggcgcggatagtggcggcttttggcgcggcggtcgggtcggttggtacccagaccgccatccgcgatcgtttcgacggcgagcaactggcgcgggtattttcgctgatggggatcgcaatggcgctcagcccggcgctcggcgtgttgagcggttcgctgttgagccattactggggttatcagggggtgttcgttggcctggcgctgctggcggcgctgctgctggcctatgccgcctggcggctgccggaaacccggccgcaacggctggcgccgccggccttctgcgccacgctggggcgcatggtgcaagacgccgacatctggcgcagcgcgctgctggtggcgctgtttaatatctgcatgttcagctactaccagctggcgccgttccgctttgcggcgctggggatccccgcgccgtggttcggctacagcggtctgctgctggcggctggggtgggcatcggtgcggcgatcaacaagcgcctgcttgccgccggctggcgttttggcgcgctgctgacgctggcgtgcgcgctatcgctgggcggcggcgtgctggtgtggctgctggaagagacgcgcgggttcgcgctgccgatgctgctggtggtgatggcgtacggtatcgccattcccaatattctggcgcgcgcgctgcgcaactataaggcatgtatggggactgccggtgcgcttctcggcctgatgtactacctgatgctgggggcggggctgacgctggccgggctggcgcagcggccgggcgtggtgctgacgcttggcagcctgtgtgcgctggggctggcgtggcgcgtttgttcggcgaacggcaaacagggcgagggagcgcctcgccctgaacggtgcgattaa

SEQ ID NO: 444378 - DNA, 771 bp, Serratia marcescens
atgacatggctcagcgcccaggatcatttcgatcccgacgagctcgataatagcgtactgggcattgccgccgagctggcacggcacgattccggcccacaccaacacgccatgggacaattgctgttcagccaacagggctgcatgcgcattacgctgaataacagcatctgtatgctaccgccggcgcgcattgcctggatcccgccgcgggtggtgcaccgcgtacaggtcagcggcgtcgtcggctaccgttcggtatacctcgacactgcgccttatcccggcctgccggagggactgacggtgctgatggccacgccgctgctgcgcgcggcactggagcgcatcgccctcgccgctttcgacaccgactggcgacatggccccaccgccaatattctggcggtctgtctggatgagatcgcgcaggcgccgcgggaactgacgctgctgccgctgcccgccgaccggcgtctgcgccatctggccggcctggaaaccctgccgccgctgcacgaactggcgcgttacagcggcgcctcggaaaagaccatcagccgcattttccggcgggagaccgggctgagttaccagcagtggcggcagcaatggcggctgattaccgcgatcgaactgctggccgcaggccatcgccagtgcgacgtcgccgcccggctggccttcaccagcgacagcgcctttgccaccttcttcaggaatatgaccggcagcccgccgcgcgcctatatggccatgcgggaatcgtga

SEQ ID NO: 444379 - DNA, 2133 bp, Serratia marcescens
atgaacagaaaagaaaaaaaccagctgatcgccaaactctctcccatttgttttctgagcctgctctcctggggcgcagtcgcccacgcggccatcaccccgtcggcaccgatgaacggtggcccttccgtcagcgccggcgccaacggcagtaccgttatcgacatcaataccgcaggcaaaggcggcgtttcccgcaacatctactcggaattcgacgtagaccggggcggcgtagtgctcaataacagcgccaccggctcaacctcgcacctggccggcaatatcgccggtaacgccaatctggccggcggttccgcatccattatcctgaacgaagtcaactccacccgcgccagccagctgaacggcctgatcgaagtcgccggcgacaaagcgcaggtgattgtcgccaacccatcgggcatcagctgcagcggctgcggctttatcaacgccgaccgcgccaccctgaccaccggtaaagcacaggtcgccaacggcacgctgctgggctataccgtggagaaaggcagcgtcatcatcaacggcgacggcctgaataccggcgatgccgactacaccgatatcatcgcgcgcgccgtgcagattaacgccaatatcgtcgccaaagatctgaagatcaccgccggccgcaacaacgtcaatgcggacaacacgcagattaacgaactgacgtcgggcggcagcaggccgtcaatcgccatcgacgtcgccaagttaggcgggatgtacgccaataaaatcaccctggtcagcaccgattacggcgtcggggtgcgtaacgccggcaccatcggcgccatggcaagcgacgtcaatatcaccaccgacggcgtgctggaaaataaaggcaccatctccgcacaccacgacgtcaatattgacacgacgcaggggcgcaaccgcaacggcggttattactatgcgcacggtcgtacattaaacaacaccgcgaacggcgtgatcagcgccggcaaaaatatcaacatcgatctggccaaaagcaaactgagcaacagcggcggcgaactgctggcagacggtgatatcaatatcgtcagcggtgatatcgacaacagatacggcaatatacacagtcagggtgccgtcaatatgcgcaatgacccttaccattacggcttcagcagaacgttaaacaacgccggcggcgtcatccacggcttcaacggcgtggctatttcctcgcgcggtctgaacaataccgaagggcttatcaagagtgatatgggcggcgttgatattcacaccgccggttacacgctgaccaatacccgcggcaccatcgaatcctgttgtgaactgaatctggatgtcggtacgctgacgaataacgccggcttaattcaatccaccgagaacgtcaccattaacaccaaccggcgttcgctgaccaaccagtccggcgtgattcgcggcggtaacgacgtgtcgatcagcagcctcggcgtcaataaccatgccgggcgcatcatggccgacaaccacctgaacatcaacgccaacggcagcagtattaccaacaccaacaatgccagaaacaccgacgaagcagggctgttcagcggcaagggcggcatgacgctggtcgccagctccatcaacaacaacaacgggaaagtggtctccaacggcaatatcatcacccatacctcatcctcgctgagcaacgccaacggcctgatcgaaagcaacggcagcgtcctggtgaccacctcaagcctcaataacaacaacggcacgatcaacgcggctgaagacgtggtgattgacgcccgctccgtcagcaacaccaaaggcacgatcaacgccggcggtgaggcaacgctgacgctggccggcggctatagccaccaaggcacgctgagcgcacaagaagacatccgtattaacgccgagaaaggcgccgtttataactacggcactctggcgtccgccaacggtaaaaccatcattaacagccgcagcttcgccaaccagagaaacgcgctggtagacagcccggccggcgttgaactgatgctgggcaagcctggttccttcaccaacaacggtaccgttaacggcaccatcaccatcaacaagcagtaa

SEQ ID NO: 444380 - DNA, 1662 bp, Serratia marcescens
atgcgcgttcacttttccgcttccctgctattggtattttttattcccctcgttcaaggcgcagaaagcgggcggttgattgaacaacaggccagccaccagcaagaacaagaaagggcgcgctacagccagctggaaacgcaggggaaagatgtccgcgcggccgacagcggcgcagaaaaaagcgcgaaaataacgtttccccgcgaagccaactgtttcgctgtgtcgcaggttattctcaataaagacgacaagattccgcactggctgccgctgcgcaaactcaccgctcaggctgaaggacaatgcctcggcatccagggggtccgtacgctggccaacgccatccagaacaaattaatccgccacggctacatcaccacccgcgtggtggtgccccggcaagatctcaacgccggcgtgctgacgctgaccattttacccggcgtgattggcaacatttccttcagcgaaaacagcgataaatacgccaacctgtacaccaccttccccggccatcaaggcgatattctggatttgcgcgcgattgaacaggggctggagaatatccagcgcattcccggcgccgacgccaacgtgatcctccgccccggggaccgcgcaggggaaaccgatattgagatcgcacgcagccaaccttcattctggcggattggcggctggttcgacgacgccggcagccgctataccggacgctatcagggcggcctggcgctctatctggataacccgacctcactgaacgatctgttctatgtctcctttggccgcgatctggcgtggcagaaatggcgcaactccaaaaacagctcgctgtactactcggtgccctacggcttttggtcactggatatgtacgccagccacagtgaatatcttcagcggctcaacggcacctgggccgacctgcagtaccagggcaaaagccgcaatctgagcctgaaggtcaaccgcctgctgtaccgcaacgccagccagaaaacgacggccagcatccagctgttaaaaaatgacgccagttattttatcaatgacatcaggctgactatccgggagcgcaaggtcaccaaagcgatcgtcaggctgaatcaccgccactatatcggccgttccatcgtcgacgcgatggtcagctaccagcgtaatacctcctggttcggcgccaaaccgcaggccgccgccagcccgcacagccgcgccgtcaatctggatatcagcgcctcagtcccgtttattttgttcgggcagtcaatgagctaccaaccgcgctatcagcagcagcacagccgcgatcgcctggcgacgcaggatcagttcagcatcggcaaccgctggacggtgcgtggttttgacggcgagtataatctttccgcaaatcggggctacgtgctgcgcaacgacctgaacctgaacttgcccaactataaccagcagctatatatggggctggattacggccgggtgagcggtggcaacaacgatttttcccgcgggcatctggcgggcggcgtgctcggcctcaggggaaggatcggccggatcggctacgacgcctttgtcggcgcgccgcttgccaaacccaaaggattcgacaccagcccggtcaacctcggcttcaccctgcagtggcagttctaa

SEQ ID NO: 444381 - DNA, 1380 bp, Serratia marcescens
atgagtatgtctaacagcccacgtgaaaccggcgattatcaggcgctggacgcgcgtcaccatatccatgcttttctggatcagaaggcgctgaatgcggaaggggcgcgggtgatggtgaaagccgatcggctgcacatctgggataatgacggcaagcgttacctcgacggcatgtcgggcctgtggtgcaccaatctgggctatggacgcgaagatctggtcgccgctgcggcgcggcagatggagcagctgccttactacaatatgtttttccacaccacgcacccggcggtggtggagctgtccgaactgttgttcagcctgttgccggatcgctatagccacgcgatttacaccaactccggctcggaggccaatgaggtgctgatccgcacggtgcgccgttactggcaggtggccgggcagccgaaaaaacggattatgattggccgctggaacggctaccacggctcgacgctggcgacctcggcgatgggcggtatgaagtttatgcacgaaatgggcggcatgctgccggagatcgcccatattgacgagccttactggtatgcccacccgggcaatatgacgtcggatgagtttggccgccgttgcgcccggcagctggaggagaaaatcctcgagctgggggcggaaaacgtcgccggatttattgccgagccgttccagggcgccggcggcatgatcttcccgccggagagctactggccggaaattcagcgcatttgccgccagtacaatgtgctgctgtgcgccgatgaagtgatcggcggctttggccgcaccggcgaatggttcgccagccagcactttgggtttgagccggatacgctgtcgatcgccaaggggctgacgtcgggctatgtgccgatgggcgggctgatcttgtccaaaaaaatgggccagacgctggtggaggaagggggcgtgtttgcccatggtctgacgtactccggccatccggtagcggcggcggtggccctggccaacatcaaggcgctgcgcgatgaaggcatcgtcagccgggtgaagcaggataccggcccctatctgcaaaaagggctgcgcgagatgtttgccgaccatccgctggtgggggaaattcagggtgccggcatggtggcggcgctgcagtttgccgaagataaagccagccgccggcgtttcgccaatgaaagcgacatcacctggcgttgccgcagctacggttttgaggaaggggtgattatccgctccaccgccggccggatgattatggcgccggcgctggtggcgacccacggcgagattgatgaactgctggagaaaaccaaacgcgcggtggaccgcaccgcccgcgatctggggctgctgtag

SEQ ID NO: 444382 - DNA, 1446 bp, Serratia marcescens
atgactgaattgaacacgaactctgcggccgccaggggacggcgcaaccggctggggctgggcgcgctgctggcggtggcgattggtttggtggtctcgcagggggtgatggtgctgatgctgcaggccgtcggcatggccggcatcggttttatcattcctctgtttctgacctacttgctggcgctcagctatgcgttttccttttccgaactgtcgctgatgatcccgcgcgccggcagcctgagcagctataccgaggtcgccatcggccagttcccggcgattctggcgacgttttccggctatatcgtggtggcgatgttcgcgctgtccgccgaactgctgctgctcgatcaaatcatcagtaagattttccctgcggcgccgctgccgccgctgtcgatcgcgtttggcgtgctggggttattcaccgtcctcaacctgctgaatattgatattttcgcccgtctgcagtcgttcctggcggcggtgatgctggtggtgctgctgctgctggggttcagcgccatcggtcaccagcatgcgcagccactgggtcagctgatggccgacggcgcgggcaacccgctcggctggggcgtgctgacgctggcggtgatggcgatctggggatttgtcggcgccgagtttgtctgcccgctggtggaggaggcgcgccggccggagcgcgatattccgcgcgccatgatcgtcggcctgagcgtgattttctgcaccattgcggtgtattgcctcggcgcgctgctgctgatcccgcgtgaggaactggcgagcaatggtctgccgcactacctgttcgccaccacggtgtttggcaaaagcggtcagctgtttctggcgaccgcggcgattaccgccacctgcagcacgctcaactcttcgctggcgacgatcccccgcatgctgagcgggatggcgcagaacggccaggcgtttccctgttttaagcgccacagcgccaggacgggcgcgccctgggtgtcggtgctgtttgtcgccgccattaccgggctgccgctgctgctgatggcggccgacgcgatcaacctattgctgagcgccgccgcgctctcctggctgctggcctatatcatcacccatatcaatgtcttggtgctgcgtaaacgctacccgcaccagcatcgtccgttccgcacccctttttatccctggccgcagctggccggcattgccggtatggcgtatgccatctggcatgtatcgccttccgccgagcaggcgctgcgtatttacaccgtcgccggcgcggtgctgggactggtgtctgtgattgcggtgctgtggatcaaactggtgatgcgcaaaccgctgtttaaacccgaaccgctgacgccgcgcgtttccccggattcgccggtgaagcgcgccttacagcccagcgctgataacccaagtctgtga

SEQ ID NO: 444383 - DNA, 1491 bp, Serratia marcescens
atgtttactcttggttactggcgcgaacgcgccgcccgccaatgtttcatcgacaaggccatgattgatggccaatgggtcactgccgcatcgggaatgacgatggcggtgtgcaacccggccaccaatcagtctctggccgacgtggccgcctgcgataaggaagacgtcgatcgcgcggtgcgcgttgcacgccgctgtttcgagcagggggagtgggcgcaggccgtcccggcggcgcgtaaacaggtgctgctgcgtctggcggcgctgattcttgaacaccgggaagaactggcgctgctggattcaatgagtatgggcaagccggtgatggatgcctggaatgttgatgtgccgggggcggcgcacgtttttcgctggtatgcggagagcctggataaatgctatggccaagtggcgccgacggcgaataacgtgctggcgaccgtcacccgcgtgccgcttggcgtgattgccgcggtggtgccatggaattttccgctggatatggcggcctggaaactggcgccggcgctggcggcgggcaacagcgtggtgctcaagccggccgagcagtcgccgttctccgcgctgcggctggcggagctggcgctggaagcgggcctgcccgccggggtgctgaacgtgctgcccggatacggcgagcaggccggccaggcgctggggcgtcatcaggatgtcgatggtctggtgtttaccggctctaccgaggtcggcaagcattttatgcagtatgcggcgcagtccaacctgaagcaggtctggctggagtgcggcggaaaaagcccgtgcctgatctttgacgactgccggtcgctggatctggcggcggaaaaggccgccttcgccatcttcttcaatcagggagaggtatgttcggcaaactcccgtctgttggtgcagcgctcgattcatgatgcctttgtcgaacggctgatggcgcaggcggccagctggcagccgggcgatccgctggatccgcaaagccgcgccggggcgatggtggacgcgcgccagacgcagcgggtgatggactttatcgatgaagcgcagcgggaaggggcgcggctgttgtgcggcggccggcgtctgagcgtcaacggcgccgataattttgtgcagccgacgctgtttacccaggtgacggcgcggatgcgtctggcgcaggaggaagtcttcggcccggtgttggcgatctcagtcttcgacgatgaagaggaggcgatcgcgctggcgaacgacagtatctatggtctggccgcctcggtctggagcgacgatctgaaccgggcgcaccgtgtggcgcagcgcctgcacgccggcacggtgtcggtgaataccgtcgatgcgctggatgtgacggtaccgttcggcggcggcaagcagtcgggattcggccgcgacttatcgctgcactctttcgataaatacacccagttgaaaaccacctggatccagctgcgttaa

SEQ ID NO: 444384 - DNA, 927 bp, Serratia marcescens
atggctaattacaccctgcgtcagcttaaatattttgtcaccaccgccaaatgccgaagcgtcgccgaagcctcacgtaagctgtacattgcacagccctctatctcgaccgccatcaaaagtctggaagacagttttggcattcagctgtttattcgccaccacgcgcagggcgtttcgctcaccccttccggcgcacgtttttatcgcaaggcgcagaaactgctcagaatggcgcatatttttgagcaggacgcgctggcggataacgatctggtggcggggaaaatcaatatcggctgttttgagacggtcgcaccgctcattttaccgaagctgatccgtggctttaaaacgctgtatccggggatagaaaccatcgtccgcgacggtgaacagcatgagctggtgcaaagcctgaccgccgggaacctggatctcgccctgctctaccatcacgaactgagcaataacatcgtcaccgatgcactggcggaaccgcaaaagccttacgtcctgctgtccgcctgccacccgctggcccatcgcgatcgggtcaccctggcggatctggcgacggagccgatggtgctgctggacgtgctgcccagccgcaactatttcctcaacctgttcacccgggcgggcattacgccgaatatcgtgttcagctcgccctcgatcgaaatggtgcgcggcatggtcggccaggggctaggcttcgccattctggtgacccggccgcacggccggcacagttacgacggccagccgctggcgacggttgaactgcaggacgaggtggaaggctccgggctggttgcggcctggctcagccgcaacccgctgaccaaaccggcgcaactgttcgttgagttctgcaaaaatgagctggcgacgatgagccggccggcggcgtgccactga

SEQ ID NO: 444385 - DNA, 1161 bp, Serratia marcescens
atggcgtgccgggcgatgagtgaccaggtgcgcgatgtgctggcgcggctgctggcgttcgataccaccagccgggaatccaatctggagctgatcgactttattcaggaatatctggccggtttcggcattgagagccggcgctttccggatgacggcggcggcaaggccaatctgtatgcccatatcggcccgacggggggcggcggtgtgatgctgtccggacataccgacgtggtgcccgtcgacgggcaggcgtggacgctgccgccgtttgcgctgacgcagcgcgacggacgttactatggccgcggcagcgcggatatgaaggggtttctggcgtgcgtactggcggcgttgccggactttctggcgcagccgctacgtatgccgttgcatctggcgttttcctacgatgaggaggtcggctgtctgggcgtgcgtagtctggtggagcatctgcggcaggcgacggataagccggcgctgtgcatcgtcggcgaacccacggggatgaagccggtgtatggccataaaggcaagctggcgatgcgttgcagcgtgcgcgggcacgcttgtcattccgcctatacgccgcagggggtgaacgccatcgagtatgcggccaagctgatcgccaggctaaccgagcttggcggcaagttggccgcgacgcagaactcgcgtttcgatccgccctacagcacgctgcaggtcggcatcattcagggcggcgcggcgctgaacattgtgccgcaggattgccggttcgattttgaaatccgccatctgccggaagtcccggtcgccggcgtgattgatgagctgcggcgttacgccgatgaactgctgccggccatgcggcaggtggcggagggctgcggcatcaccctgcagacgctcagccagtatccgggattgctgaccgatccgcagtgcgactttgcccgctggctggcgcagtggagcagcagcgaggagtttgccacggtggcctttggcacggaggggggtctgtttgccgaagccggcgtggcgaccttgatctgcggccccggcagtatggagcagggccacaaacccgatgaatatgtcagcgtagaacagctggagcgctgtatgcagatgttggctaacttacgccgctggatgcagcgctga

SEQ ID NO: 444386 - DNA, 675 bp, Serratia marcescens
atgacgttctctatcgccgctcgctgtgacaaaaccgggcagttcggcattgccatcagctcttccagcattgcagtcggcgcccgctgtccctggctgcaggccggggtgggcgcggtgtccagccagaatgtcacgctgccgcggttggggagcctggcgctgcagcggctcgaacaggggatgtcatcgcagggcgcgttagacagcgccctgcgtgaggatgcattcagcgcttaccgtcagctgatcgccattgaccgccaggggagcactgcgctgttcagcggcgatcaatcgctgggggtctatcatggcgtacagggtcacgcgtgcgttgcggcgggcaatatgctggcggataaatcggtggttgaggcgatgacgtcggcctttgaaaacgcgtccggtctcctggcggagcgcctgatggcggcgctgcaggcggcgcttgagcgcggcggcgaggccggcgcggtgcattccgcggcgctgaaggtgatgggtgagcatagctggccgattgttgacctgcgggttgactgggcgcagcaggatcccatcggcgagctggcggcgctgtggcgggcttaccagccccagatgcaggattatattacgcgggcgatcgatccccgggaggcgccaagctatggcgtgccgggcgatgagtga

SEQ ID NO: 444387 - DNA, 441 bp, Serratia marcescens
atgagtaacgttacccatacccgcatccgtatgttcaacactaaagccacctaccccaaccaatcgctggataacgacctgtgccaggcggtgcgcgcgggcaataccgtatatctgcgcggtcaggtcggcaccgattttgacggcaacctggtcggcctgggcgatccggcggcgcaggcggagcaggcgatgaaaaacgtcaagcaactgctggaggaggcgggcagcgatctctcgcatatcgttaaaacaaccacctatattatcgacccaagatatcgtgagccggtgtatcgggaagttggaaaatggctgaaaggggtatttccgatctcgaccgggatcgtggtctcggcgctggcgcagccgcagtggctgatggagatcgacatcatcgcggtgattccggaagggtggcatagggaggagcaggcatga

SEQ ID NO: 444388 - DNA, 1416 bp, Serratia marcescens
atgcctgcgactgaatcatcgccaccgcttatcgaaaagcacaccattggctatatcccgccgcaagagcgtcacgggaaggtcagagatctgtttacgctctggttcggcggcaatatcgcgccgttgccgatcgttaccggcgcgctcggcgtccagctgtttcatctcaatctgttttggggcgtgatcgccattctggtgggccagctgatcggcggggtgctgatggcgctgcactcggcgcagggcccgcagatgggcattccgcaaatgatccagagccgcgcgcagttcggctcctggggctcgttgctggtggtggtgattgccggagtgatgtacctcggcttctttacctccaacattgtgctggcgggcaagtcgctgcatggcgtcacggacagtgtctcagtgccggtggggatcgcgatcggcgcggtgggatcttgtgcgatcggcattatcggttatcgctttattcacctgctcaacaggatcggcacctgggtgttgggtatcggcattctgctgggttttggctatatattcagccacatacacagtgcagacttttttacccgtggcggctttaatctttacggctggctggcgacggtgtcgctgggggcgctgtggcaaattgcctttgccccctatgtctccgattactcgcgctatctgccggcgaacgtgtcagtggcggccaccttctggaccacctatctcggctcggcgctgggctccagcctctcgtttattttcggcgcggtggcggtgctggccacgccggcggggatggaaaccatggacgccgtcaaactggccaccggttcaatcggcccgctgatgctggtgctgtttttgctgagcgtgattagccataacgcgctgaatctgtacggcgcggtgatctcgatgattacgctggtgcagaccttctcctggcgttggatccctaccggcaggagccgggcggtgctgtcggtgctggtgctgctggcctgctgtatcgccgccatttacagctcggcggactttattggtcattttgtggatttagtgctggcgctgctggtggtgctggtgccctggacggcgatcaatctgatcgacttctacgccatccataaagggcagtatgacattgactcgatttttcgtgcggacggcggcatctacggctactacaacccccaggcgctgctggcctacgctatcggcattgtggtgcaaatcccgtttatgaataccccgttatacgtcgggccgatctcggtgcacattcacggcgccgacctctcctggctggtggggctgctggttacctcgccgctctattactggctggcaacgcgcgccggcgtcagccgccggcatcagaacgtccgccaggggcgcgcgggggaggcgtaa

SEQ ID NO: 444389 - DNA, 1269 bp, Serratia marcescens
atgacgttaaataacatcgagattgatacgttagtggtaggagccggccaggcgggcgtagcaatgagcgaacacctgacccaactcggcattcctcatttagtgctggagaagaaccgcatcgccgaggcctggcgcacgggccgctgggattcactggtcgccaacggcccggcctggcatgaccgcttccccggcatggagtttgacgatatcaaccccgacggctttgtcgccaaagaacggatcgccgattactttgccgcctatgcggataaattcaacgcgccgattcacaccggcgtcgacgtcaggcgcgtgcagcgcaaccttggccgccccggttttagcgtggagacctcggcaggacggattgaggctcaacgcatcgtcgccgccaccgggccgtttcagcggccggcgatcccggcgatcgccccgcaggatgacacgcttacccaaattcactcggcgcaataccgtaacccgcaacagctgcccgcgggcgcggtactggtggtcggggccgggtcatccggggtacagattgccgatgagctgcgccgggcagggaaacaggtgtatctctccgtcggggcgcacgatcgtccgccccgcgcttaccgtaaccgggacttttgctggtggttgggggtgctggggttatgggatgcggcgtcgacacagccggggaaagaacacgtgacgattgccgtcagcggggcacatggaggccatacggtagattttcgcaagctggcccatgaaggcgtgcagctggtgggcctgacgcagtctttccagaacggcggcgtcacctttgccaataacctgaaagagaatatcgcccgcggcgatgaaaactatctggagctgctggacgcggcggacgcctatatcgcccgcaacggtctggatctgccggaagagccggccgcgcgccatcttcttcccgacccggaatgtatggttaatcccattctggcgctgaacctggccgacgccggcatcagcaccatcatctgggctaccggctacagcgccgactacggctggctggaggtggacgccttcgacagcgccggcaagccgcaacaccagcgcggcgtttcacgcgagccaggcatctattttctcggcctgccctggctgtcacgccgcggctccacctttatctggggcgtctggcacgatgcaaaatacattgccgaccatatcgctacccagcgcagttacctgagctataaagacgccggccagcgccgctga

SEQ ID NO: 444390 - DNA, 1005 bp, Serratia marcescens
atgattatatcgctgcagtaccttcgggctattgcctgtttacttgttattattttgcatataacaaaaaaaatgtttcttaatggtgacatttcatcttatatgtatatgggtgcatccggggtggaccttttctttgtgatttctggatttattattatttatatttcagataaaaacaccaaggcactttcatttattaaaaatcgagttattaggatatatccaacatacctgatattacttttgccctatctggcgattttcattctctatcctgagttagtcaactctcactcaagtcaaacgccgtctatttttaaatcggtcagccttttgccatttccggctaacggcgggctggttaatatcgtttcatggaccttaacctttgagttttatttctattttgtctttgctatcgccctgttcctcaagagggatctgttctggacgtcttcgattgccatcttactgctgctggctgtcgggcagctgtttaacattccgttcctcaggtccgcaatcgtcatagaatttatcatgggcatggccatctataaattccttttcaaaccggaaagaatgcccggcaagccgctttccctactgattgtcgcattgggagccgggctgctatgtgcgttcccggggcatgaaatagacggtaccggtttcgatcgcgttctcctatggggagcccctgcagccatcgtatttattggcgcgattgcgctggagcgccaactgcgaaaaatgaactatttggtgctgttgggcaactcgtcttataccgcatacttgacccatatactttcaatcaatgccgtatatgtcgttaccaacaatatgctacagctgcctccgatcgtgacaatatctggcgccgttatcgtgtccttaatcgttggtattatttcgcataagatgattgagctgccaaccatcaactttttcaagaaaagaaaaagccagttaaagaacggtacgcagcccctttcttaa

SEQ ID NO: 444391 - DNA, 684 bp, Serratia marcescens
atgaagaaaattgaaccggaagactactttaccggccaacagctgatattggccaaggccattgaggcgggtgacctggagagggtaaaacagctggcgccggaaacggatctgaatacccccggcgagcagaaattaaccccgctgtttttcgccatcaacgaggcaatgtataacgataatccgggcaatcgactagaaattattacggtgctggtcagtgctggtgcggatcctttaccgagggggatgggggacaaaccggctttatggatggctaaggccagtaaggatatctggcttaaggcaatgctggacggtggtctatctccgaacgccagagataaggacactgactatcccatgatctatgaaactatgtatgccaagactaccgatacgttagcattattaattatgcgcggggctgatgttgatacccgtaattctttaggtgaaacgccattaacggtagcttttttcagcagtaaatttgagcacgccaattatttactggaccacggcgctgatccaaatccggtaactaagaagggatgggtattcgcttcgctggtgcaagacggcatcaaagacagccggccggaaactgaataccaccagaactgtttgcggctgcgcgacaagatgatcgcgctgggggtgaagtggccgccggaggcgtaa

SEQ ID NO: 444392 - DNA, 732 bp, Serratia marcescens
atgatggtgtttggcatgatttggctggcaggatgcaatggcatgaaaaaaattgaacctgaagactactttaccggccaacagctgatattggccaaggctattgaggcgggggacctgggcagggtaaaacaactggcgccggaaacagatttaaacaccccgggtgaacaggatttaaccttattattcttcgccttgaatgagacgtactacaataataatcccaaaccacgtttgcaaattgtgaccgcgctggtcaaagcaggggctgatcctttgcaaccactccccagagggatggccagcccggcggaaatggtctcaatgggggataaggatatctggctaaaggcattgctagatggtggcttggatccggatgccagagaccgaaatcataatgaagcgattatctatagcgcactgaaagccaggaatacggatacgctagcattattgaccatacgcggtgctgatgttgatgccaatgacattttaggccagacgccgttagtggaagcttttttcagcaaccgttttgaacacgctatttatttgctggatcacggtgccaacccgaatccggtagacaaaaaaggacgaggatttactgcattggtacaaagacgcctcaatagtacccggccggaaactgaataccaccagaactgtctgcggctgcgcgacaagctgatcgcgttgggcgtaaagtggccgccggaggcgtaa

SEQ ID NO: 444393 - DNA, 1425 bp, Serratia marcescens
atgagattgattactctatcaacggaagatctcgaaccttaccagttttcccgcatttttaaccctaactcggcgcgttatgcgctggaggctaaatacctgttcggggcgtcagcgctgccttcgatctgccgtcgctacccggtctcccgctgtgagatttccggcgtgggcgtgtcgcagtaccgggaagaccgacaggttaagcagcaggtgctggccgagttgaacagcggtcagctgcttgccatcgatgacgactgctttggctggtcgccggtgcgccacctgttctttatcgatcaggctggccggctgacgctctatcctgccattctgccgccgctctatccgacgcagcagataatccgccgctatgaggcgatggttgcccgctattgcacccgtccggcgccaacggtgctgccgcccagctaccggccgcagcagaaagcgccggttgccgtagcggcggccacggcggtggcggtacgccgggatccgctggccgcaatgcgtgcgatgagcaagcgcgaacgctggcaggcccggcaaaacctgattggccgtggccagcgcagcatctaccccgatgcgcgcatcgccgcgacgcgtctgggcgagaacaatattgccgttgaaaaggccaggctggcgcaaaatgtgtatggcattgatggacggccgattaacgcgttggaaacgatgccgaacgtgcccgaagggtggcgcgatattagtaatgatgacaaagcgctacaaaagctgggtttaaaatccacgatgttatatagcagtgtaaatgatcctgattttttctcccgagtatatgccccagataaatcggtatttggtaatgagatggcaccgaccgtggtattcagaggtacacggatggagaatataacggactggctgaacaatggtcagcaaggaatgggtgttcattcaagctattatgaaaaatcggtttttatcggtagtaagttagaggatttctctggtcaggtagatattgccggacattcactaggcggcggccttgcttctgcggcggcgattgccagcggtaaacctgcctggacgtttaatgccgcaggactcaatgccggcacggtgggaaagtatggcggggctgcgatcggcgacggctcaaaaattgctgcctaccgggtgcggggcgaggtgctgacgcgcttgcaggagttccacctgttagaggatttaaagagcgtttattacaacattccgctgctgatggtgaaacatcagctctctgcgctattgcccagcgcggcgggcaacgcgaagtggctgccgggcggggagggcggcaccgttgataaacacggtatgcagcaggtgatcgacagcctggagctacagaaagaggcagatatgaccaccattaccagcaggttatag

SEQ ID NO: 444394 - DNA, 609 bp, Serratia marcescens
atgctagacggctggtatatgcttgatgtattggcaaggaacgacgagataaacatgattctaataatctacgcacacccttatccccggcactcgcacgccaaccaacggctgctgcaggcggtgaaagatattcccgaggtggaagtccgctcgctgtatgagctatatcccgatttcagcatcgatatccatgcggaacagcaggcgctggaacgcgccgatatggtggtgctgcagcatccgatgcagtggtacggcctgccgccgctgctgaagctgtggatcgacaaggtgctggagcacggctgggcctacggccacgacggcaacgcgctggtagggaaagactgcctgtgggcggtgaccagcggcggcgaccgccaccacttcgagctgggcgactacccggagtttgccgtgctggcgcagccgctgcaggcgacggcgctgtactgcggcatgcgctggcagccctactttgcgctgcataataccttcacctgtaacgaaacggcgctgctggcggcgggagaggcctaccggcagcggctgattgattacctactggcgcagcaaccgcaaacgcaggagaaccaacatggataa

SEQ ID NO: 444395 - DNA, 822 bp, Serratia marcescens
atgactgattcacagatccgcatggcggttgtgggcgccggcggccgtatggggcgtcaattgattcaggcggtgcagcaggcgcagggcgtggtgctcggggcggcgctggaacgcgccggctcctcgttagtcggggcggatgcgggcgaactggccggcgtcggcgcgcttggcgttatcgttaacgacgatctggccaaggtggcggatgactttgatgtgctgatcgactttacccgtccggaaggctcgttggcgcatctggcgttttgcgtttcccaccataaggcgatggtgattggcaccaccggttttgacgatgccggcaaggcggccattaacgccgctgcgcagcagatcggtattgtgttcgccgccaacttcagcgtcggggtcaacgtggtgctgaagctgctggaaaaagccgccaaagtgatgggcgactataccgatattgaaattgttgaagctcaccaccgccacaaggtggatgcgccgtccggcaccgcgctggcgatgggcgaagcgattgccgatgcgctggggcgcgacctgaagcagtgcgccgtctatgcgcgcgaaggccacaccggcgagcgcgatccgcagagtattggcttcgccaccattcgtgccggcgatatcgtcggtgaacataccgcgatgtttgccgatatcggcgagcgggttgagatcacacataaggcctccagtcggatgacctttgccaatggcgccgttcgcgcggcggtttggctgtctgaacgtgataatgggctgtttgatatgcgagatgtgctgggattagaccagttgtaa

SEQ ID NO: 444396 - DNA, 1263 bp, Serratia marcescens
atgttttatctaaaaaacaagaatttctggatattcagcggcttttgcttcttctacttttttattttgggttctatcctgccttttttcccgctctggctgcatgacgtcaaccagctcgatcagcgacagaccggcattgtgttctcctttatggcgttctttgcgctggtgtgccagccggtgttcggctttattaccgaccgcttcggcctgaagaaacatctgttgtggttgatcatcgtactgctgatgtttttggcgccgctgtttatctacgtgatctcgccgctgctgcagagccattttatcgtcggcgcgctgctgtgcggcctctatctggggctggtggccagcggcggctcgccggcgatcgaagcctatgtggaaaaggtcagccggcgcagccagtttgaatacgggcgggtgcggctgttcggctgtatcggctgggcgatttgcgcctcaatcgtcggctacaccttcaccattaataatcagttttcgctgtggctggcttccggctgcacgctgattctggcgctgctgctgtgcctgtttcggccggaaaaaagcggcacggtcgcggtggcggaagggttggcgctgaacaagaacccggtcagcctgcgttcggcgttgcggctgctgcggatgcgcaagttctggttcctggtgatgtatatcgttggcgtcgcctgcgtgtatgacgtgttcgatcagcagttcgccaacttcttcacctccttcttccgcgaccgccacagtggtacgcaggcatttggctatgtcaccacgctgggcgaattcctcaatgccttcattatgttttttgcaccgctgatcattaaccgtatcggcggcaagaatgcgctgttgatcgccggggcaatcatgtcgctgcgcattatcggctcttcgtttgccgattcggtgacggcggtgatcgtgctcaagacgctgcatatgtttgaagtgccgttcctgctggtgggcattttcaaatacatcaccacccagtttgacgtgaagctgtccgcgtcgatctacctgttcggtttctgctttttcaaacagttttccgccatcggtatgtcctatgcggcggggatgatgtatgtggcgtacggctttaaaaccgcctacctgatgctcggctgcattgcgctgctgtttaccgtgattgccgccttcaccctgagcggcagcccgctaacggcgcgggcgggtaaaccgctggtggcaccgtcgcaaactgcatga

SEQ ID NO: 444397 - DNA, 1308 bp, Serratia marcescens
atgatcaaagtgacgtttatgggcgcaggcagcacaattttcgcgaagaatgtgttgggcgacattatgtgtacgccggcgctgcgggaagtggatatcgcgctgtacgatattgacagcaaccgtctgaacgagtcgctggcgatgctgaataatatcaatcagaacgtcaacgacggcaaggcgatcattaccccgtatctgggggaggagaaccgccgcgcggcgctgcagggcgccaactatgtggtgaacgccattcaggttggcggctacgatccgtgcaccatcaccgactttgaaatcgcgaaaaaattcggcctgcggcagaccatcgctgatacgctggggattggcggcatcttccgcgcgctgcgcaccattccggtactgttctctttcgcccgcgatatggaagaggtgtgcccggacgcctggctgctgaactacaccaacccgatggcctcgctgaccggcgccatgctgcgccataccggcgtgaaaaccgtcggcctgtgccacagcgtgcaggtgtgcgccgacacattgctgaaaagcgtcgatatgccgaccgacgacgtgcagttccatattgccggcatcaaccatatggcctggctgctggatatccgtcgtcacgggcaggatctctacccggaaatcaaacggcgcgctgcggcgctgcagggcaaacatgacgatatggtgcgccatgaaatcatgaaaaccttcggctattacgtcaccgagtcttcggagcataacgccgaatatatgccgtactggatcaagcgcaactacccggagctgatcgaacggttcaatattccgctggatgagtatccgcgccgttgtgttgaacagattgcccagtgggaacagcagaagcaggaactgacccacgacgcgcatcttacccatacgcgtacgcacgaatacgcctcttacattatcgaagccatggagaccgaccgtccgtacaaaatcggcggcaacgtgctcaacacgggtcttatcaccaacctgccgaacgaagcctgcgtcgaggtgccttgtctggtagacggtcagggcattacgccgtgctacgtggggaacctgccggagcagctggcggcgctcaaccgtaccaacatcaatacgcagctgctgaccattgaggcggcggtgactcacaaacgcgaggcgatctaccatgctgcgctgctcgatccgcatacctcggcggaactgtcgatcgacgatatccgccagctgtgcgacgccctgatcgaggcgcacggaaactggctgccggcctaccactaa

SEQ ID NO: 444398 - DNA, 897 bp, Serratia marcescens
atgcacaagagctttaccctgaccaacacctccggtatcgaactgaacgtgtttcagttcggccatgaggattgcgcgcccggccatcgtttcggcccggcggtgcgtcagcattacctatttcattatgtgatatccggcagcgggacgctgtacaccgacagcggcgagtttacgattcgccccggcgaaggctttctgatctacccccacgatgtcaccacctattgcgcggaccggcaggatccctggcattacatgtggattgaggtcgacggcctgatggccgcgacgattttccaacagtgccgcctcagccgccagatgccggtctatcggccccagcactaccggccggaagccgaagaacggcgctgtctggcggagatcgtcgcccatgagcaaaacgacgcctggctgaaaatcattggcttaagctaccagttcttcgctgcgctgatcgccaatgcacagcgggaacagccggccgcgccggcggaaaaaacccgccacctcagcaaggcggtgaaatacctggaaagccgctaccacgaaccgctctctatcggccagttggcggcttactgcaaccttaaccgcagctatctgagccgtctgtttaaagcggagtttggtctggggccgaaagagtatctgctgcaggtgcgcatgaacgtcgccgccagcctgctgcgtcacggcagcgcggcgattaaggtagtggcgctgtcggtggggtatgacaatcagctgcacttctgcaaggcgttccgccagttttacggcgtctcccccagcgcctggcgcagcggtgaaggcgacctcacatccagcattgagccacgcctgatggcaacggccagtgtcgataccgacatcgcgcagcagcggcgctga

SEQ ID NO: 444399 - DNA, 471 bp, Serratia marcescens
atgacggtccaggtacaacccaacagcgcagtgctggtgcatttcacgctgaaactggaagatggttcaacggcggaatccacccgcggcaacggcaaaccggcgctgttccgccttggcgacggcagcctgtctgcgccgctggagcagcaactgctcggcctggctgccggcgacaagtgcgcctttacgctgcagccggaagacgcgttcggcgccaacaacccggatcttatccagttcttcctgcgtcgtgactttgccgaaaccggcgtgcctgaagtcggcaccatcatgctgttcacctcgatggacggcaaagagatgccgggcgtggtgcgcgaagtggctgaagagtcggtcaccgttgattttaaccatccactggcgggacacccgatcaccttcgacattgaggtgctggagatcgatccgcagcaggaggagacgcatgcaaatactgctggctaa

SEQ ID NO: 444400 - DNA, 507 bp, Serratia marcescens
atgagtaaaccgatctgttcgaccggcctgcgttggctgtggttagtggttgtggtgctggcgttggattttgtcagcaagcagtggattctgagccatttcacgctgggccagtcccagccgttggtgccgttcttcaacctgtactacgcgcgtaactatggcgcggcgttcagcttcctggccgaccacggcggctggcagcgctggttcttcgccggcattgccgtcgccatcgtggcggtgctgctggtgatgatgtaccgcagccaggcgcagcaaaagctgaacaacattgcctatgcgtttattatcggcggcgcgctgggcaacctgtttgaccgcctgtggcacggctttgtggtcgactttatcgatttctacgtcggcaactggcattacccgaccttcaatctcgcagacagctttatctgcgtgggggcggcgatgatcgtactggaaggcttcttgccttccggcaagcgtgcaacgagtaaaggtgagtaa

SEQ ID NO: 444401 - DNA, 150 bp, Serratia marcescens
atgacgcgctgctttgtttttgtggatcaggcctttagcagcctggcgatccacaagtggttgcatttcgttgaatgcgttttgtgctgcagttttgtcgccggctgcgatagcggcatataccttcttgatgaaggtacgcaccattga

SEQ ID NO: 444402 - DNA, 1170 bp, Serratia marcescens
atgaccaatattattcgtcagtttttacgtcaggaagcggcaggcggcatcattttgattgtggcggcagtgatcgccctgatgatggccaactcgccgctgcagggcgtgtatcagggattccttaacctgccggtgatggtgaagattgcctcactggaaattgccaagccgctgctgctgtggattaacgatggcctgatggcgatcttcttcctggtggtcgggttggaagtaaaacgcgagctgatgcagggctcgctggccgggcgcgataaagcggtgttcccggcgattgccgcgctgggcggcatgttggcgccggcgctgatttacctgctgttcaacggcgccgatgacattgcacggcaggggtgggcgattccggctgcgaccgatattgcctttgccttgggggtgatggcgctgctgggcaaccgcgtgccgaccagcctgaaagtgttcctgctggcgctggcgattatcgatgaccttggggttatcgtaattattgccctgttctatacccatgaagtgtcgctggcggcgctgggggttgcggcggcggccgttgcggtactggcgctgatgaactggcgcggggtgagcaaaacctctatctatatgatcgtcggtctggtgctgtgggtggcgatcctcaaatccggcgtgcatgcgacgttggccggggtgattgtcggctttatgattccgctgaaggtcaaaaaggggccgtcaccgtccgaaacgctggagcatgagatgcacccttgggttgcgttcctgattctgccgctgttcgcctttgccaacgccggggtgtcgctggagggcgtttccctcaacggtctggcttccttgctgccgatgggcattgccgccggtctgtttatcggcaagccgctggggatctttatcttcagctggctggcggtgaagtccggcattgcccgtctgccggaggatatcggcttcaaacaggtgtttgccgtttcggttctgtgtggtattggttttaccatgtcgatctttatcgcatcgctggccttcagcggagcggatgaagcgttcagcacctactcgcgtctggggattctgttaggctccaccgcggcggcgctggtgggttatgcgctgctgcgcctgtcgctggcgcacagaggcaaatag

SEQ ID NO: 444403 - DNA, 1314 bp, Serratia marcescens
atgcatcatgacacgcaacgccggctgaaccggcaagactataagactctgacgctggcagcgctgggcggggcattggagttttatgacttcatcattttcgtcttcttcgccaccgtagtcggcgagctgttcttcccggctgagatgccggaatggctgcgtttggtgcagaccttcggcattttcgctgccggctatctggcccgtccgctgggtgggatcgtgatggcgcacttcggcgatcgggtcgggcgcaagaaaatgttcagcctgagtattctgctgatggcgctgcccacgctgggcatgggcctgctgccgacttacgccagcatcggtatcgccgcaccgctgttgctgttgctgatgcgtctgctacagggcgccgctatcggcggcgaagtgccgggcgcctgggtatttgtggcggagcatgtgccgcgtaaacgcgtcggcctggcctgcggcacgctgaccgccggccttaccgtcggcatcttgctgggttctctggtcgctaccgtcatcaacaccacgctgagcgcgcaaagtattgcagacggcggctggcgcgtgcccttcctgctgggcggcattttcgggttgatcgccatgtatctgcgccgctggctgcaggaaacgccggtgtttgtagaaatgcaggcgcgtaaggcgctggcggaggagctgccgctgaaaacggtggtgaagcagtataagaaagaggtggtggtttcgatgctgctgacctggctgctgtccgccggcgtggtggtggtgatcctgatgacgccgacctacctgcaaaagcagttcggcattgcgccggcgttgacgctgcaggccaacagcatcgccaccattatgctgattttcggctgtctggccgccgggctggcggccgatcgctttggcgccagcaaaacctttatcgtcggcagcctgctgctggccggctgcagctggctgttttatcagaccgtggcgcagcatgcggaaatgctgttcgcctgttatgcgctggtgggattcagcgtcggcgttgtgggggcggtaccgtttgtgatggtgcgcgcatttccaccggcggtgcgcttcagcggcatttcgttctcttataacctgtcatacgccattttcggcggcctgacgccgattttcgtcaccttgatgatgaaggtgacgccgctggcgcccgcctactatgtgctggcgctgtcggcgctcgggctggtgctggggatctatctgcaccgcgatctggacggcgaccgtgtggcgccgcacgccgattcgctggccgatctgtaa

SEQ ID NO: 444404 - DNA, 1437 bp, Serratia marcescens
gtgacggatctgattaatttcattaacaatatcctgtggggatcggtactcatttatttactgatcggtgccggcatctacttcaccatccgcacccgctttatccagttacgccacttcacccatatgttttcggtgctgaaaaacagcaataaaagcgacagttccggcatctcctcatttcaggctttatgcacaacgctggcggcgcgggtcggcaccggcaacctgaccggcgtcgccatcgcgctgaccgccggcggccccggcgccatcttctggatgtgggtggtggcatttatcggcatggccacgtcatttatcgaaagcaccctggcccagctgtataaaaccaaagacgatcagggtaactaccgcggcggcccggcctactacatggaaaagggcctcggcatgcgctggatgggcgtactgttctccatgttcctgatcctcgccttcggcctggtgttcaacgcggtgcaggccaactccatcgcccaggccagcgctgcggcgttcaacttcaacccgctgtacgtcggcatcggcctggtgctgctgagcggcaccgtaatcttcggcggcatccgctccatcgcccgcgtggcggaatgggtggtgccggtcatggcggcggcctacctgctgctggccttctgggtgctggcgatgaatattgagcagttgccggccattttgctgctgattgtcaaaagcgcgttcggtttacaagaagcggccgccggcgcagtcggctacggcatctcgcaggcgatgacccagggcgtccagcgcgggctgttctccaatgaggccggcatgggttcggcgccgaacgccgcagcctccgcctcgccgtatccgccgcacccggcgtcgcagggctacgtacagatgctcggcgtatttgtcgatacgctggtgatctgcagcgccaccgccgccattattctggcctccggcgtgatggataaccccaccggcgagatcagcggcattgaactgacccagcgcgcgctgtccagcgccgtcggcagctggggttcgccgtttgtggcgctggcgattttcttcttcgcctttacctccatcatcgccaactacgcctacgccgaaaacaacctgatcttcctggagcacaatcatccggcgcggctggcaatcttccgctgtgttgcgctgggcatggtgatgttcggcgcgctggcggagctgccgctggtatggaaaatggccgacaccgccatggcgctgatggcgatcaccaacctgacggccatcctgctgctgtcacgcgtcgcctttaaactggcccgcgactacaaccggcaacgggcgctcggcaaactgccgaccttcgacgccagtcaataccctgagctgaaatcccagctggagcccggcgtgtgggataacccgcaaaagccagactga

SEQ ID NO: 444405 - DNA, 774 bp, Serratia marcescens
atgctcgttattatctcacctgccaaaacgcttgattacgaaagtcctctggcgacggctcgctttacgcagcctgagctgctggagcaatctgcagaacttatcaacatcagccgccagctgacgccggcgcaaatcgccagtctgatgaagatcagcgacaagctggccggactgaacgccgcccgctttgccgaatggaccccgcaatttaccccggataatgcgcgccaggccctgctggcctttaagggcgacgtgtataccggcctgcaggcgcaggacttcagcgaagcggattttgactttgcccagcagcatttgcgtatgctgtccggcttatacggcgtgttgcgtccgctcgacctgatgatgccttaccgtctggaaatgggcatcaagctggccaacccgcgcggcaaagatttgtacagcttctggggcgctcgcatcaccgacaaactcaatgaagtgctgaagcaacagacggacgatgtggtggtcaatctggcatcggatgaatacttcaaagcggtgaagccggccgggctgcacgggcagctgatcaagccggtgttcctggatgagaaaaacggtaaatataaggtcatcagcttctacgcgaaaaaagcgcgtggcctgatgagccgctttattatcaaaaatcgcctgaccaaagcggaacagttggctgatttcaatctggaaggatatgcctttgatgaggcggcgtccaaggcgggcgaactggtattcaagcgtcccgaacagtaa

SEQ ID NO: 444406 - DNA, 480 bp, Serratia marcescens
atgaaaaaattatggatattattgttctgtctggccggcgcaacggccaatagcgtacaggctgagcagattggttcggtggataccgtgtttaaactgtttggtccggaccataagattgtggtcgaagcgttcgacgatccggacgttaaaaatgtaacttgttatatcagccgcgccaaaaccggcggtatcaaaggcgggttggggctggcggaagataccgcagacgcggcgatttcctgctcccaggtcgggccgattgagctgagcgagaagattaaaaacggcaagaacaaaggcagcgtggtgtttcagaaacgcacgtcgctggtgttcaaaaaactgcaggtggtgcgcttttatgacgccacgcgcaacgcgctggtctacctgacctattcagacaaagtggtggatggttcaccaaagaatgcgctgagcgccgtgccgattattccctggaataccgcgcgctaa

SEQ ID NO: 444407 - DNA, 870 bp, Serratia marcescens
atggatcaagccggtatcattcgtgatctgcttagctggctggaaagccatttggaccaacctttggcgctggataacgtggcggccaaggcgggatattcgaaatggcatctgcaacggatgttcaaagatattaccggtaacgccatcggcgcttatatccgggcaaggagactgtctaaagcggcggtcgcgctgcgtttgaccagccgcccaatactggatatcgccctgcaataccgctttgactcgcaacagaccttcacccgagcattcaaaaaacagtttgcccagacgcctgcgctgtaccgccgggccgaggactggaacgcgttcggcatctgtccgccgatccgcctgggcgccttcaccctgccgcagccggagtttgtcaccctgccggagcagcagatgatcggcctgacacagagctactcctgcacgctggagcagatttccaacttccgtaccgaactgcgctcacagttctggcgtcactatctgggcgaagcaaccacgctgccgccggtgttgtacggcctgcaccactcccgaccgagccaggaaaaggacgacgagcaggaggtgctgtacaccaccgcgctggagccgcaccacgtgcccgataccgtcagcgagggccagccgatcacgctgcaaggcggcgaatacgcgctgttccgctatgaaggcccgggcgccggcctgcaggattttatcctgacgctgtacggcacctgcctgccattgctggagctgacgcgccgcagaggctacgacattgagcgtttccacccgaaaggcagccgcctgccgccacagccgccgaccgagatcagctgcgaatacctgatcccgattcgccgttaa

SEQ ID NO: 444408 - DNA, 531 bp, Serratia marcescens
atgtaccatgttgttgctgcaactaccaacccggcaaagatcaaggctattcagctggcctttgacgagacctacggcgccggccggtgccatgtcgaacccgtcgacgtcgccagcggcgtttctccgcaacccatcggcaatgctgaaacccgcaccggcgcgcgccaacgcgtgacggaagcgcgtcaggcacggccggaagccgacttttgggtcggcgtggaagcgggaatcgaagacaatatgaccttcgcctggatgactatcgaaaatccgcacatccgcggcgaatcgcgttccgccagcctgatgctgccggaagccgtactgcagggagttcacgccgggcgtgagctgggcagtgagatggcggccattaccggcaacgccgatatcaagcgccagggcggcgccatcgctatcttcaccaacgggcggctgagccgcaccagcgtttaccatcaggcgctgatactggcgctggcgccgttcctcaacccgatttatcagcatcatcagccacgctga

SEQ ID NO: 444409 - DNA, 342 bp, Serratia marcescens
atggtgtccgccatgacgcaattatcactgcacgatcctgctctttcagaacaaggcaatgaagactggcagcgttttgtcgcgctgctgcagggttccttcgatcgggatctgcatcagccgctgatgcagctgctgttgacgccggacgagcgagcggcccttggcacgcgcgttcggattatccaggagctgatgcgtggcgagatgagccagcgcgagctgaagaatgaattgggcgccgggattgcgaccattacccgcggctccaacagccttaaggcggcgccgccggcgctgaagcagtggctggagcaacagctgctgaacggcgcgccatag

SEQ ID NO: 444410 - DNA, 1929 bp, Serratia marcescens
atggtcaaggtggacaagtggcggcttctggcaattggcgtgtgtctgacggctttctcgagcgcggcgttggctgattcgctggatgcccagcgcgagcgttatcagcagatcaaacaggcatgggacaataagcaaatggatgtggtggctcagctgatgccgacgctgcgcgactacccgctttacccctatctggaataccgtcagttgacgcaggatctcggcagcgtcagctatcagcaggtcggcgaatttattcgccagcatccgacgctgccgccggcgaaatcgctgtcgtcgcgtttcgttaatgagctggcgcgtcgtgaagactggcgtggcctgctggccttcagtccgcagccgccgaaacctgttgccgcgcgttgcaactactattacgccgagtgggcgaccggcgagcgacaggccgcctggcgcggggtgaaagagatttggcggtcggggaaatcgctgccgaacgcctgcgataaactgttcagcgtctggcagtcgtccggcgaacaaacgccgctggcgacgctggaacggatgaagctggcgctgaaagagggcaacggcgggctggtgacgcacctgtcgcggcagctgccgtcggactaccagaccatgggcgatgcgctggtaagcctgcaaaacgatccgaccagcgtggaagggtttgcgcgcagcgtcggcccgaccgattttacccgctcggtcacccagattgccttcacccgcctggcgcgtcaggatgcggagaacgcgcgcgcgatgatcccgacgctggcgcgcctgcaaaaaatgagcgaaagcgaccgccttgagctggaagaaacggtggcgtggcgcctgatgggcaatgacgcaaccagcgagcaggcgcagtggcgcgatagcgtgatcctacgcagccagtcgccgtcgctgctggagcggcgggtgcgcatggcgctcggcaccggcgaccgcgccgggctgaaaacctggctggcgcgcctgccggaagagtcgcgcaataaagacgaatggcgctactggcgcgccagtatgctgatggatgaaggcaaccgtcaggaaggcgaagagatgctgcgccgactgatgaatgaacgtggcttctatccgatggtggccgcgcagaagctgaatgaaacttacccgatcatggtggcggtggccgccaagccgcgcacttcgctggtgagcgggccggaagtcgcgcgggtgcgcgagctgatgtactggaatatggacaacctggcgcgcggcgagtggaacgcctatgtggccagccgcagccagccggaacaggaagcgctggcgcgttacgcgttcgaacagaaatgggccgatctgagcgtgcaggcaaccatcgtcggtaaaatgtggaaccacctggaggagcgtttccctattgcctggccggatgaatatcgccgcgccaccgaggggaaaggcatcacgcagagctatgcgatggcgatttcccgtcaggagagcgcctggaatccgaaggcgcagtcgccggtcggggcggcggggctgatgcaggtgatgccgcgcaccgcgcagcatacggtgcagaagttcggcattccgggttacagcagcgccagccagctgttcgatccgcagaccaatatcaccatcggcaccagctatctggagtcggtgtatcagcagtttgaccgcaaccgcattctgtcgtcggcggcttacaacgccggcccgtcgcgggtgaacacctggctgaacaacagcggcggccggattgatgcggtggcgtttatcgagagcattccgttctcggaaacgcgcggttatgtgaagaacgtgctggcttatgacgcgttttaccgtcatttcatgcatcaaccggaaaaagtgctgaccgatgcggaatggcagcggcgttattga

SEQ ID NO: 444411 - DNA, 597 bp, Serratia marcescens
atgaagagatctgaatacgccagcagctcaaccaacaccgccaagggttccttccggagcttatttttctcttgccccttattcctcgggctgctcctgctgatgccgttttgctcgcaggccgcaaccgaaagcagcgaactgacgcagtcgcgtactcaggccgtcaccaccgtggtgctgggtattatcagctatacccgctggtctacgccgcctaaccctgttcgcctgtgcgttaccgcgcaaacgcgctatgccgacggcctgtttagcccgctgctgctggaagccccgcatccgattaaaacgcagcgactgccgcttgatagcggcaaactgtcgcagcagtgcgacgtgatctatctcggagacgtcagcaatacacagcgccgggcgctgatcccgcgcatcgccggccattcaatcctcgtcatcagcgaaaatgatacggaatgcagtgcgggcagcgccttctgcctgcagccccggggcgagcagatcggttttaaagtcaatctggatgcgctggcgcgcagcggcgtgcgcgtacaccccaacgtcctgcaactggcgcgtaagctggggtcgtcatga

SEQ ID NO: 444412 - DNA, 1251 bp, Serratia marcescens
atgatcgggctgtttcgcagaaagcgcgccgctcattcgcggccgacgctgggccaggtgctgcagcgcatgaacctgagcctggcgctgatcgccgtcggcaccgccggcattttcctgacgctggtcgctctgtttgcgctgcgcgcctatgccaaccacaacctgcatctgattgcccgctccatcagctacacggtggaggctgcggtggtattcgacgatcgcagcgccgcgcgcgaagtgctgatgctgatcgcctccaatgaagaggtctcggaagccaaaatactgaacaaggacggcaaactgctggcctactggcaccaccccaaagacggcccgctgcacgggctggagcagttggttgcgcgctgggtgatgccggaggccatcgagctgccgatcaatcacgaaggaaaacaggtcggtaaagtctggctgagaggccacggcggcaccctgctgcgctttttattacgcggactggccggcattatcgcctgcctggcgctcagcaccctgtgcgccctgattctgtcgcggcgtatgctacacggcatcgtacgctcgctgaatgatatcgccaacgtcgcccacgtggtgcgcagcgatcgcagcttcggccagcgcgtaccgtcggcgccgatagccgagctgcacacgctgagcaaagattttaacggcctgctggaagaacttgaggcctggcaggcgcatcttaagcaggaaaatgattcgctgacccaccgcgccacgcacgatagcctgaccggtctgccgaaccgcgccttttttgaaggccagctcagccatgctctgagtcatatttcccccgaagaaaaactggcggtgctgtttattgacggagaccgtttcaaagaggtcaacgacagccacggccacgccgcgggcgacgcggtgctgaccaccatcgccggccgcatccgctcgcagctgcgcgacggcgacgtggtggcgcgtatgggcggcgatgagttcgccgtgctgctgtcgccggtgcgccggcagtcagacgtcacgcacatcgccgataaaattatcggctgtatggcgcagccggtggaattgccgaaccagcaacaggttatcgcctcactcagtatcggcattgccttctaccccgatcatgcggcaacgcctcagggattgctgcacgaagccgatgacgccatgtaccaggcgaagcatcgttatcacggaggttggcggctggcgattcaaaaatag

SEQ ID NO: 444413 - DNA, 495 bp, Serratia marcescens
atgatcaagcaacgcttcacacgacctttttcactgctggcgatgatgtttatcgccgtattggcgctggccggctgccagagcaagcagggactcacggcagagcagatagcgctgctgcaggcgcaagggttcaagctgaccaataaaggctgggagttcggcatgtccgataaagtgctgttcggtaataacgtcggcaaactcagcccggaaagcgcagaaacggtcaaaaaaatggggcaggcgctgctgagcgtcaacatcgttaaattccgtcttgacggtcataccgacaactatggcgaagacagctacaacgatcggctgtcgctgcgccgcgccaacaccgtcgccgatcagttggccagcgtcggcattccgcgcgccgatatcgagacccgcggcatgggcaaacgcgacccggtcgccgataaccgcacgtccaaaggccgcgccgaaaaccgccgcgtgtcgatcatcgttacgccataa

SEQ ID NO: 444414 - DNA, 1269 bp, Serratia marcescens
atgcgtccggcgatctggctgccgggcataccgttgaacgtttactggtacgccgggcactttgcggcgatcgctatcggtatgctgggcgtgtggctgctggcgcggcggctgagcggcagcgggcgtctggcctggctggcgatgctgacgctcaacctgtccggtattatcaatttcgacattatcccctataacgacaactatctgctggtgatgctgtggccgtggatgctgctgtttttccacctggcgattagccgctccgccaactggtggccggcctttggcgtcgcagccggtctggcgatgatggcgaaatactccaccttcgcctttgtttatttcattgtgttgtcgacgctgatggtgccgcagattcgccgctgctatcgccagccgcagttttatctggcggtggcgatctggctggcgctggtgctgccgaatgtgatctggctctggcaccatgattttgccgcgttccgatgggtgggctcgcagacccgtatgcagcttaacgtcggtgttctgcgctcgttgttgctggtgttttatccgctgttggtgctgtggtggatcctgcggcgcgccggcgtggagttgggctgtccggacactcggccgacgcgggtgctgctgtgggtgtaccttttgccgctggggattatcgccttctggttcttcttccgcatcggcggccgactgaccgaatggctgcagccgttctttatcgtggcgccggcgctgctggccggttgcgtacgtcagctgccgacgcgttcgctgcgggcggcgacgatcgggctgctgtgtgccgcgctggcggtatacctgggctacgcggcggtgatgctgggcaatgtgcgcaacgccgggcagaagatggtgggtatcaaggcgttcagcgccgcggtggagcagcgctggcggcagcgctacggcaccggactgcgctatgtcggcggcgcctatttatctcagtggatgacgctatatgccgattctcgcccgcaggtcattacccgctggtccaatgatctccagccgaatatctataatgctcaccttgatgccgcacagctggcgcggcacggcgtggcgctgttcgggcggctgggggagacgtgcgcgcagaacgattttgacggtgcgctggtgcagtggccgtcgctgcatatcgactggcggcaggagatgtcgttccgggccgatccgcaggaggcggcccagacgctgtgcgtggcgtttgtccggccgaacggctga

SEQ ID NO: 444415 - DNA, 978 bp, Serratia marcescens
atgtcgaatagtctgacctattgtgacctcccggccgagatctcccaatggccgggtcttcccctttcactgagcggtgacgaagtgatgccgctggattattgggcgggccacaccggttggctactctacggcagaaaactggataaagagcgtatcacgcagttccagcgtcggctcggcgcggcgatggtgatcgtcaccgcctggcgcgtggaggattaccaggtggtgcgtctggccggttcgctgacggcgcgcgccaaaacgctggcggcggagagcgggctggacgtggcgccgctcggcaagatcccgcatctgcgtacgccggggttgctggtgatggatatggactccaccgcgattgagattgagtgcattgatgaaatcgccaagctggcgggcgtgggcgagcaggtgtccgaagtgaccgagcgggcgatgcgcggcgagctggatttttccgccagcctgcggcagcgggtcggtacgctgaagggcgccgacgccaatatcctcaaacaggtgcgcgataacctgccgctgatgccggggctggtcaatctggtgcggaagctgcaggcgctggactggcacgttgccatcgcgtccggcggcttcacctattatgccgagcacctgcgcgatacgctgaagctggtggcggtggccgccaatgagctggaaatccgcgacggtaagctgaccggcgaagtggtgggaccgattgtcgatgctcagtacaaggccgatacgctgacgcagctggcagaaaagctgggcattgagccgcagcagaccgtggcgatcggcgacggcgccaacgatgtgaaaatgatgcaggcggcggggctgggcattgcctatcacgccaagccgacggtgtatgacaaggctcaggtggcgattcgtcatgccgatctgatcggcgtattatgcgtgctgagcggcagcctgaaacacgaagtgcgctaa

SEQ ID NO: 444416 - DNA, 687 bp, Serratia marcescens
atggctacagccaaactgaaatttcgtctgcaccgcaccgccatcattctgatttgcctggcgttattggtgctgttgatgcagggcgcctcctattttagcctgagccatcagctggcgcgctccgagcaggtggaggatctggctcaaaccctgacgaaacaggtcgccttcagcctggcgccgctgcttgacgacgacagcgatattgataatcagcgcatcgacgccatcctcacacagatgaccgaccacagccgtattctggacgccagcgtctaccaactggacggtacgctgatcgcccacgccggggaaaccatcagcgtacgcgaccgcctgtccctcgacggcaaacgcgccggcggctacttcaacaatcagctggttgaagccattaaaggtaaagacggcccgtgcggctttatccgcatcaccctggacacccacgtgctggcgaccgaggccaaacaggtggataacaccaccaacctgctgcggctgatgatgctgctgtcgctggccatcggcattattctggcgcgctgcctgctgcagggccgccgcagccgctggcagcagtcgccctatctgctgaccgccaacacgccgctggcggaaaacgacgacgaaaaacaggaaagcgccgcgccggcatccggcgacgacgagacgcgcaagccatag

SEQ ID NO: 444417 - DNA, 780 bp, Serratia marcescens
atgaccgaattaaccgccgcagcgcaacgcgcgctgagcctgatggatttaaccaccctgaacgacgacgacaccgacgagaaggtgatcgccttgtgccgtcaggcgaacagcccggcgggccataccgccgccatctgcatttatccgcgctttatccccatcgcccgcaaaacgctgcgcgagcagggcacgccggatatccgcatcgccaccgtcaccaacttcccgcacggtaacgatgatatcgacattgcgctggcggaaacccgcgcggcgatcgcctacggtgccgacgaagtcgacgtggtgtttccataccgcgcgctgatggccggcaatgagcaggtcggttttgagctggtgaagcagtgcaagcaggcctgcgccgaagcggatgtgttgctgaaagtgattatcgaaaccggcgaactgaaagacgcggcgctgatccgcaaggcgtctgaaatctccatcaacgccggggcggactttattaaaacctccaccggcaaagtaccggtgaacgccacgttggaaagcgccgagctgatgatgtcggtgatccgcgatatgggcgtcggcgagaaggtgggcttcaagccggccggcggcgtgcgcaccgcggaagaggcgcagcattatctgcaacttgccgcgcgtatcatgggcgcagactgggcggatgcacggcatttccgcttcggggcttccagcctgttggccagcctgctgaccacgctgggctacagcgcgcagacgtccggcagcggctactga

SEQ ID NO: 444418 - DNA, 777 bp, Serratia marcescens
atgagtctgcgttttaccgatacccactgccactttgatttcccgcccttcagcggccacgaggcggagagcctgcggcgcgcggcggcggctggcgtggagcggattattgtgccgtcggtcactgccgatcgctttgcgggcgtggcgggactggcggagaagtacccaccgttgtacgccgcgctggggctgcacccgctgtatatcgcacagcaccatgacgcgcagctggagcaactggccgactggctggccgcacggccgcccaaactggcggccgtgggggaaatcggcctggatctgtatatggacgaaccgcagtttgcgcgtcagcagacgctgctgcgcgcccagctgcagctggcgaaacgccatgacttgccggtgattctgcattcacgccgcagccacgatccgctggccgccatactgcggcgcgccgacctgccgcgtcgcggcgtggtgcacggctttgccggcagtctgtcgcaggcgcaggcgtttgtacgcctgggctattttatcggcgtcggtggcaccatcagctatcagcgggcgcagaaaacccgtgcggtgatggcgcagctgccgctcagcgcgctgctgctggaaaccgatgcgccggatatgccgctggccggccatcagggcgagcctaacaggccggaacgcgctgccgaggtgtttcaggtgctgtgtcagctgcgttcagaaccgcccgagcaaattgccgctcaacttcagcaaaatacccaatccctgtttgcgctatag

SEQ ID NO: 444419 - DNA, 1101 bp, Serratia marcescens
ttgggctacagaatacccatcacgctcggcaatattgagccgctggcgtataaaccataccggcctggcaaactggcgctggtgtgcgaagggggcgggcagcgcggtattttcaccgccggcgtactggatgagttccagcgcgcccgcttcaacccttttgaactgatgattggcacctccgccggtgcgcagaacctttccgcctttatctgcggacagatggggtacgcgcgtcgggtgatcacccgctataccaccaccgccgatttctttaatcccctgcgctttgtgcgcggtggtcacctgatcgacctcgactggctggtgaatatcacctcgcagcagctgccgctggcgatggacacggcggaacaacagttccacgacgggcgtgagtttctgatgtgcgcctgccgcagcgacgacttcgaaccgacctatttccccgcccggcgcgccagctggctgccgacgattaaagcctccagcgccattccgggtttttaccgtatgggcgtcgatctggacggcgtcagctatcaggacggcggcatcagcgacgcgattccggtggaggaagcctaccgtcgcggcgcggataccatcgtggtgatccgcaccgtgccgtcacagatgtactatacgccgcagtggatgaagcggatggagcagtggctgagcgaaagcagcctgcagcagatggtgcgcatcatgcgtcagcatgagcagagctaccaccgtattcagcagtttattgagaagccgccgggcgacctgcgcatctttgaaatcttcccgccgaagccgctggcgagcaatgcgcttggcagtcgcctgtcgtcgcttaatcgcgactatcatctgggccggcgctgcggccgctattttctggcgaccgtcggccactggctgcaggcggcggaagagggcgatggcgttatggtgaaacggccgctgtcgcggcgtttgctgcagccggaaagcctgagtatgccgtcgccgatcgtcagtgaagtgacacagccggccgcggcggcgcccgccgagatgcgtctgccgccggacgaactgccgggcggcaagggagaggcgctatga

SEQ ID NO: 444420 - DNA, 186 bp, Serratia marcescens
atgaacagcgacattatcctcggacgttggaaacagctcagaggccagctgtggcaggcctgggctgaactttccggcagcgactgtgcatggctgaccggcagtaatgactgcctctccggcatactgcaagaagattacggaagagagcaagaagaggtatcctcagaaaaaacaccttactga

SEQ ID NO: 444421 - DNA, 639 bp, Serratia marcescens
atgaaaaagaccaagtttgcacaatcaatgatggctgtcgtattgggttccgttctggtgagcggtagcgctctggccgaaggttcgttgctcgataaggcatccagcgtggctgatagcactggcagcaaaatcgatagctctatgcaaaaagtcgacagctcaatgaagaaagtcgacggctatatggatgacagcgcgatcaccgcaaaagtgaaaagcgcgctggtgcaggacaagactatttcttccagcaacgacatttcggtgaaaacggaaaaaggcgttgtgacgctgagcggctttgtcgccagccaggcgctggctgagcaggcggtcgccgtggcaggcaaagtggaaggcgtgaaatccgtcagcgataagctgcacgtgaaagatgaagccaagcagtcggtgaaatcctatgccggtgatgccgctgccaccacggagctgaaagccaagctgctggccgatgacatcgtgccttcgcgcaatgtgaaagtggaaaccaccgacggcgtggtgcagctgtctggtgaagtgaagtcgcaggaacagtctgagcgtgcggaaagcatcgccaaggcgattgacggcgtgaagagcgtgaagaacgatctgaccgttaagccataa

SEQ ID NO: 444422 - DNA, 444 bp, Serratia marcescens
atgaacaacatttccaccctgacggcggccgacctggccaccgccttcaagattgaacaggccagccacgcctttccctggacgcaggccacctttgcaagcaaccagggcgaacgctacctcaacctgaaactggacgccgacggtcagatggccggctttgccattacccagatcgtgctggatgaggcgacgctgttcaatatcgccatcgatccgcagcagcagcgccgtggttacggccgcgcgctgctgagtgcgctgatcgccgagctggaaacgcgcggcgtggttacgctgtggctggaggtgcgcgcctcgaaccgcagcgcgctggcgctgtataacgatctgggcttcaatgaagtcacggtgcgccgcaactattaccctgccgccggcgggcgtgaggatgcgatcgtgatggcgctgccgctgggctag

SEQ ID NO: 444423 - DNA, 438 bp, Serratia marcescens
atggcatctcaacgcgactggctgttacaacaactgggtattacgcagtggacattgcgccgcccggccgtgttgcagggcgaagtggcgatcggtctgccggcggaaacgcgcctgttagtggtggctgcggcgttgcccgcgccggatgatgcgctgttttgcgacgtattgcgcagcctggggctgacgccggcgcaaacctatggcctgacgccggaacaggcggcgatgctgccggaagacacggaatgcaacagttggcggctgggcgtcacggagccgcttgcggtggccggcgcgcagctatacagcccggcgctggccgagctttctctcgatgcgggtgcgaaacgcgcactctggcagcagatttgtcatcatgaacaacatttccaccctgacggcggccgacctggccaccgccttcaagattga

SEQ ID NO: 444424 - DNA, 996 bp, Serratia marcescens
atgaaacagcgcacactaggttccaacggcccgagcgtttccgctctggggttaggctgcatgggcatgagcgatttctactccaccgcttatgatgaaaaagaggccatcgccacgctgcaccgggcgctggaactgggggtaaccctgctggacaccgccgatatgtacgggccgcacaccaatgaacagctggtgggcaaggcgatcaaaggtaagcgggagcaggtatttctggccaccaagttcggcattgtgcgcgacccggcggatccgcaggcgcgcggcgtctgcagccggccggattatatccgccgtgcggtggaaggcagcctgcagcggctgggggtggagacgatcgatctttactaccaacaccgggtggatcctgaggtgccgatcgaagaagtggtcggcacgctggcggatctgattaaacagggcaagatccgccatatcggcctgagcgaagcctcggcggcgacgctggagcgggcgcatcaggtgcatccgattaccgcgctgcagagcgaatactcgttgtggacgcgcgatgtggagctgcagggacaactggcggcctgcgagcggctgggcatcggctttgttgcctacagcccgctgggacgcggcttcctgaccggcgctatccagcggccggacgatctggccgaagatgatttccgccgcagcaacccgcgttttcagggggataatttcgcccgtaacctggcgctggtggagaaggttagtgaactggcgcaggctaaaggcgtcacgccgtcgcagctggcattagcctgggtgatggcgcagggcgaacatattgtgccgattccgggcaccaaacgccggcgctatctggaggagaacgtggcggcagcgtcgctggcgctgagcgcgcaggaactggcggcgattgaggcggtattcccgcagcaggcagcggccggggcgcgttactggcaggaatcgatgggctacgttaaccgttga

SEQ ID NO: 444425 - DNA, 909 bp, Serratia marcescens
atggatcagattcaggccatgcgtgttttcacccgtatcgtcgagctgggcagcttcagccgcacggcagaacgcctgcagctgccgcgcgccacggtcagcaacgtgttaaagcggctggagcagcagcttggcgtacgcctgctgatccgcaccacccgccaggtgcaggtcacccatgaaggcacgctgtattaccagcgctgcatccaactgctcggcgcgctggaagaagccaacacgctgttccgccagcaaaagctgcagccgtccggccgggtgcgcatcgatatgccgcattcgctggcacgcgaagtggtgatcccggcgctggaggatttctaccggcgctaccccgatatcacgctggcgctgggggccaacgacacgcaggtcaatctgctgcgcgacggcgtcgactgcgtgctgcgcgcctggagcagcgaggacgacacgctggtggcgcgcagcattgcgcaactgccgcagatcacctgcgcctcaccggactatctgcagcgcttcggcacgccgcgctcgctggacgatctggccggccatcaggcggtaggctacttctcgctcagcaacaatcaggactacccgctggaattctgccgaggcggccaggtggaactgcgtacgctgcccgcacggctgagcgtcagcggcgccgacgcctacgccagcgcctgtctgaccggcctggggctgatccaggcgccgcgctactcgctggctccgcgtctgaagcgcggcgaactggtggaagtgctggccgataccccgccgccgccgatgccgctgcacattatgtatccgcccggccgctttctggcgccgcgcgtgcgggtgctgattgactggctgatcgaactgtttgccgggcgtccgctgcatgagaaataa

SEQ ID NO: 444426 - DNA, 498 bp, Serratia marcescens
atggccatctttaccagccgccacggcgagctggagcgcacccataagatcctgcagcacctgaaccagcaacaaccgctgtcgccgaccgattttgccatgtcggtgcataataccgccgcaggctggttaaccatcattgctaaaaataccttacccaccacctctctggccgctggcgaagacagttttcaacagggaatactggaagcgcaggggatattggccagcggcgcggcggaacgggttttgttggtggattttgacggtgcgctgcctgaggactaccagccttttgtcacgttaaccgctcgcccctatgcgctggcgctgctgttggcggcgggggagtcattacaatgcgtgccggtcgccaggcaagcgaccgctgagtctttaccacaaagtttatccttcctgcgccactggttaagcgggcaaacagagtttatcgtgccgggtccgcgacacgattggcgctggacgtatgatggctag

SEQ ID NO: 444427 - DNA, 810 bp, Serratia marcescens
atggctaggaaagctaaccccacgccaccctcatcgtggctgaaccgcagctggcgcgtggttgcgaccggcggattattcgccctgtttggcgtcggcggcctgctgctctcctgcgtttggttcaatctgctgcgcctgctggtgcgtgattcggcccggcgtcatcagctaactcaggattctatccgccacagctttcgcgtttttctggccgcctgccgttttttcggcgtactcgattatgctttcgagcatgaagaacgtctgcaagaggatgccggctgtctggtgatcgccaatcatcccagcctattggactatgtgctactggcttcgcgcatgccgcgctgcgactgcattgttaaacaggcgcttttgcgtaacgtattcgtgcgcggcgtgattaaggcggccggttatctggcgaatgccgaatctgagcgtttactggagcagtgccggcaacgtctggccagcggcggcacgattctcatcttcccggaggggacgcgcaccacgccgggaaccatgctgacgctgcagcgcggtgcggcgaatatcgcgattcgcagccaatgtcccatccgactggtgcagatccactgcgagccgccaatgctgacgaaacagggcaaatggtataatatcccggcgacaaaaccgcagtttcgcgtaactgttctggataagatcgatacgcgcacttttatgcgcgaggacgatgtttctcctgcccgcgcagcaagacgtttaacccagcatttaactgacgccttacagtcagattctataaataatgagaaatag

SEQ ID NO: 444428 - DNA, 261 bp, Serratia marcescens
atgcatttattgagcaccgaaatcaagcaattgattattgattcgctcaatcttgaaggcatgacgccggatgagattgacacacaggcgcctttgttcggcgaaggattaggactggattccattgatgcgttggaattggggctggcgttgaaaaaccgctatggcgttgtgctgtcggccgaaagcgacgatatgcgtcagcatttttattctgtggaaacgttggccgcgtttgtttccgcacagcgtagcaaataa

SEQ ID NO: 444429 - DNA, 252 bp, Serratia marcescens
atggataagcagcagatttttgtagaggttcagacgctgatggcgaagctgtttgagcttgatgcccaggatattacgccgcagtccggcctgtatgacgagctggatctggacagcatcgacgccgtagacctggtggtgcatctgcaaaagatcaccggtgagaagatcaaaccggaaatgttcaaatcggtgcgtacggtacaagacgtggtcgatgctatcgatcaattgcttaaccctggaaactga

SEQ ID NO: 444430 - DNA, 579 bp, Serratia marcescens
gtgagacgctggctggcgcatagtcggacgctgttacaggcgctgacctggctgctgctggtgctgtatccgtttgcggtatggtttggcgtcagccgctggggtacgcagctgctggcgccattgctggctttactcttcaccctgcgcctgctgtcgctgcgcggcggatggcgtcagcatggcggtctggcgaaaatgttggctctggtgggcatcgtgctggccgtgagcagttggttgctggggcaatcccactggctgctgtactacccggtgttggtcagcctgctgttgctggcgttattcgcctattccttgtggtttcccccgacggtggtcgagcggttggcgcgtctgcgcgaaccggcgctgtctgccgcgggcgtggcttatacgcgccgggtcacccaggtttggtgcgggttctttattgtcaacgcctcaatagcattaatcacctgccaactgggggatatcaagctatggacgttatacaacggcgggatcagttacctgctgatgggcgccctgatggggggagaatggatcgcgagacaaagggtaaaacgccgctga

SEQ ID NO: 444431 - DNA, 1368 bp, Serratia marcescens
atggatcgcgagacaaagggtaaaacgccgctgaccttgccgatgagccgctggttggcgcaggagcgagcgcctgataccgtggtcgcctggcgcggtgagctgcgcataacgctggctcagctgcgtcgcgatgtcgccgggctgtatcgcgagcttaacgcgtacagggaaaagcgttgggcgctctgcttcgatgactgctaccgttttacggtcgcgttgttagcgtcgctgtactgcggcaaagtgccgattatcttcggccatcagcgagaagccattttgcaagagcagcgcgcggattttgatgcgttgttgagtgatttgccgctgatgcttggcgtaccgaggctgacggtcgaagaaggcgccgcaggcagcgccgcgttgccggactggccggatgccgccagcctggttctctatacctccggttcgacgggggaaccgcagaaggtacacaagccggtcgcggcgctggatgaagaatgcgcgttactggcagcccgctggttgccgcagtttcaggggcgctggatcgcggcctccgtctctcatcagcatttatatggcctgagcttccggctttttatgccgatggcctgcggcgtgccgttcgatgcgcaacttacggaatatcatgaacaactgattgccaaacgtcaggtgggtcaactgctgtttatcagcagcccggcctggctaacacggctggacgctgcgctaagcccgctggattgcgcgctggtgttctccgccggcggcccgttgccgttcgcagaggcgcagcgcgcgcagtatctgctggggacgttaccgctggagatttatggtgcgacggaaaccggcattatcggctggcggcagcagcatcagccagagacggcgtggcgcctgtttgacggcgtcaccctgcaggttgatgcgcaggggctgccgcagattgactcaccgctgctggatgcgccgctgtcgctgaatgatattttgcaaccggcggcggatacgcgttattttcacctgctggggcgcagcgaccgcattattaaaatcgaagaaaagcgcctgtcgctgactgaagtggaacgacgcttgcgggcgctgccggccgtcagcgatgcggcggtattgccgttacggcgtaaagggcgcatcagcctgggggcggtgattgtcctgtcggcacagggccgcgccgaacggcagacgctgtcggaaggtctgttcacccggcgtttacatcaggcgctgcgcccgtggctggagccggtggcgctgccgcgcagctggcggattgtcacggcgatcccgcgcaatccgcaggggaaacgcgcctacgctgaattacaggaactctttttatga

SEQ ID NO: 444432 - DNA, 345 bp, Serratia marcescens
atgatgcatcccgaggtgctgcaacagcagacaacggatacgacccacgccacggtgacgatgcggctgcccgcagagctgtcgtggtttcgcggtcatttcccccggcaccctatcttgcccggcgtggcgcaggttaactgggcgatgcagttcgccgccgcgctgttgccgattgacggtgatttctgcggtatggaagtgctgaagtttcagcggccgattctgccgctggagacggtgacgctgttgctggagtggcagccggcccggcagaaactgctgttcagctatcgcgtcggtgaggttatcgccagcagcgggaagattgcactatgccgctaa

SEQ ID NO: 444433 - DNA, 1719 bp, Serratia marcescens
atgccgctaaatcgtgagtttctgccctgcctgatcgtcccctgttttaatcacggcgcgatgatggccggtgtcctggagcaactggcggcctatcaactgccgtgcctggtgattgacgacggcagcgatgccgagacggcgacggaattacagcgtctggcggcgcagtggccgtggatgacgctgcagcggctggaacaaaaccgcggtaaaggcggcgcggtaagcgccggcctgcaactggcacagcagcgtggcttcagccatgcgctgcagctggacgccgacggccagcatcaattaagcgatattccagccatgctggatgaggccctccgttatccgcatacgctgatctccggccgcccggtatacgatgaatcggtaccgaaggcgcgactgtatggccgctatatcacccacttttgggtatggctggaaacgctctccttttctctgcaggacagcatgtgcggctttcgcgtctatccgctggcagaaacgctggcgctgctgaacagccgccggctggggcagcgcatggatttcgatactgaagtgatggtgcgcctgtattggcgcggcgtacccagccgctttttaccgacccgcgtgatctatccggcgggcggcatttcccacttcgacgcgctgcgtgacaacctgcgtatttcctggatgcatacccggttgtttatcggcatgctgccgcgcattccgcgtttattacgccagcgccggcggcaggcggaaccgcagcactggtcggcggcgcgtgagcgccaggggctgtggggcattcgcctgatgctcagggtgtacaagctgttcggccgccgggcgtttcagctgctgctgtatccggtggccggctatttctggctgaccggacgcgcgcagcgccgggcatcgcgcgattatttacagcgcctgcggcgttttgcgcagcagcgtcaacagccgttaccgcagccgctgaacagctttcgccactttatgcgttttggcgatgccatgctggataagctggccagctggcagggcgatctgcagggaatccggctgatggatcgccagcgttgtcggcagcagatcgactcgggcaaaggcacgctgattctggcatcgcaccttggcgatatcgaatcgtgccgcgcgttgggcgaattgggcgatgcggtcaaggtcaatgcgctggtgtttaccgaacacgccgaacgctttaaccaggtgatgcaagaggtaaatccgcgcgccaacctgaacctgatccaggtttcctcactgggaccggaaacggccatgcggctgatggataagctgaacgccggcgaatgggtggccatcgtcggcgaccgcacctccgccggacagtaccagcgcggcgaacagccgcgcgtagtctggagcgactttctcggccaggcggcgccttttccccaggggccgttcgtgctggccgcggcgctgcgctgcccggtctttctgatgttcggccttaaacagcagggcgagctgcgggtctactttgaacccttcgccgacccgctgcctctgccgcgcggcgatcggcagcgggcgctgcagcaggcggtggatcgctatgcggctcggctggagcactattgcctgcaggcaccgctcgactggtttaattttttcgatttctggcacttggcggccacgccgcctgcacgacaggagcctgaggtatga

SEQ ID NO: 444434 - DNA, 429 bp, Serratia marcescens
atgaatctgcaagacgatccgcgtttttccgtacgggtggagatgaccgtgccgttccacgacgttgatgcgatgggcgtagtctggcacggcaactattttcgctactttgaagtggcgcgcgaagcgttgctgaaacagttcgactatggctatcggcagatgcaggcttccggctatatctggccgatcgtggatacgcgggtgaaatatatcgcgccgctgcgttttgaacagcgggtgattgtctgcgcgatgctgcaggagtatgagaatcgcctgcgtatcggctatcagatcctggatgcggaaagcggccagcgtactaccagcggttacaccattcaggtggcggtggaggcgagcagccaggagatgtgctttgctgcgccgcaggtgctgttggacaagctggagggtaagcgatga

SEQ ID NO: 444435 - DNA, 606 bp, Serratia marcescens
atgaaaaagtggctcttgctgacgctgtgcttgtttgccgtgggggcgcaggccgtcacgctgccgcagctgcaacagcgcttcagccagcaggcggtgctgcgcgccgaatttgagcaacagcgcagcatcagcggcatggccaagccgctgcactcaggcggcgagttgctgatctcccagcagaaagggctgtggtgggcgcagcagcgccccttcccgctaacgctgttactggatgacaagcgcatggtgcaaaccgtgggcgggcaggcgccgcaggtgataacggcggaaaataacccgcagatgtttcagttcaaccatctgctgagcgcgctatttcatgcggacggtcaggcgttggagcaaaactttaccctgcagttcagcgatcggggtgatgaaaactggcgcctggtgctgacgccgaaaaccacgccgctggacaagctgtttacccgcatcacgctcaacggcgcccaattcctgaacaccatcgatatcgatgataaacaaaacgacgccacccatattcgcttctttaatcagcgtaccgtgccggcgacgctgaccgccgaagagctgcaacgttttgcgccctaa

SEQ ID NO: 444436 - DNA, 2301 bp, Serratia marcescens
ttgcgccctaatattcaccgccgcctggcttatggctggctggtggtttgcctgtcgctgatcgcggcgctgtgcgtactggcgccgcgcagccagattaacagcagcgtgctggcgctgttgccgcacgcctcgccgtcccaggtgccgaaggcgctggcggacggtttcagccagcgtttggatcgccagctgatgtggctggtcagcccggcgccggggcaggatgacgccgcggtgacctggtggtatcagcagttgcaggcgctgccggcgctgcagcaggtcgccggcccgctggatgccgggcgtcagcagcagtgggggcagttcttttatcagcaccgcaacgcgttgctggatgacgcaacccgccagcgcttgcagcagggcgcggaggtgcaaagccaatggatcctcggccagctctattcggcgttcgccggggtcagcggcaaggaactgacgcacgatccgctgctgttggtgcggggcgcgcagctggcgcagcagcaaaacggcggcgcgctgcgtctgcaggacggctggctgacggcgcaggatcggcaggggcgcagctggtacctgctgcatggcgaattacgcgcttcttcttacgatatgcgcagcgcgcggcagatggtagagacgttgaacggactgcaacagcagctgcagcagcgttttccgggcagtgaggtgttaaagcgcggcgcgctgtattacagcgattatgccagccagcaggctgagcacgatatttccaccatcggactggcctctgtagccggcgtatttctgctggtgctgctgatgttccgctcgccgctgccgttgctgctgtgtgcgctgtcgatcggcgtcggcgcgctggcgggaacggtcgccaccttgctggcgttcggcgaagttcatctgatgacgctggtgctgagcatcagcatcgtcggcatttctgccgactatacgctgtatttcctcagtgagcgcatggtgcatggccggcagtcgacgccgttgcagagcctgcgtaagctgctgccggcgctgtcgatggcgctgctgacgacggtggtggcctatctggcgctgttaatcgccccgttcccgggcttacagcaattggcggtgttcgccgccgtgggactgagcgcggcgtgcatgacggtgatctgctggtacccgcagctgtcacggcgtctgccggtgcgcagcgcgccggggctgacgctgataatgcgctggctgcgggcctggcgtcggccgctgctgcgttttggtctgcccggtgcgatcgccgtggtggtggtcgtgggcatcagtcaactgcgtgttgacgatgatattggtcagctgcagtcgctgcccgccgggctgcagcagcaagaacggcagatcgccgccttgaccgggcagcataacgatcagaaatggctggtgatatacgggcagaatgcgcagcagacgctgcagcggctggaaatgttgcggcctaaactgcagcaggcgcagcggcaggggctgctgggtgattatcgcctgctgccgctgccttctctgcgtcagcagcatgcagacgcggcgctgctggcgcacgtggccccgcaggtgacggcgcagctgcagcaggccggcgtcgcggtcgttcagcccgatctgcaggcgcgctgggtgaagccggagcaatggttaaccagcgtggtcagcgaagggtggcggctattatggctgtcgctgccggacggtcgcagcgcggcgctggttcccgtcagcggcgtgcaggacagcgccgcgatgctgaagctggcgcagcaggtgccgggcggcggctggatcgaccgcaaaacggagttcagcgaactgtttggccactaccggctgtatctgtcctacctgctgatgctctcggtggcggcgattgcggctatctatctgtggcgcttcggcatccgccacgcgctgcgctgcatggtgccgaccctgctgtcgctgggcggcggcattgcggcgctggcgctgagcggccatacgctgaatctgttttcgctgctggcgctggtgctggtgctggggattggtatcaactacacgctgtttttcaccaatccgcgcgggacgccgaccacctcgatgtttgccatttttatggcggtgttcaccacgcagctgaccttcggcatgctggtattcagccatacgcaggcgatcgccagttttggcatcgtcctgagcggcggcattgcggtggcgtttttgctggcgccgctgaccctgagaaaaacgttaagaggtaatgtctga

SEQ ID NO: 444437 - DNA, 570 bp, Serratia marcescens
atgcgcggcctattgctcccgatcgtgctgcttggcgcgttgctgaccggctgtgccggttcatcttccgcgcccgatgcgcccagcgcctggctgaagcccggcacacgggttgccctgccgccgccgacgttggcgcagccgttcagccagcagcagttgctgaacgcgcaggtaaaaggacaacggcacacgatgatggtgctgttgaacgccgacggtcagcgtctgacgctggtgggcatgtcgccgctgggtattcgtctgtttaatctggtttatgatgaacagggtatccgcagtcagcagtttatcaagctgggtgagctgccgccggccgcccaggtgctggcggatattatgctgagctactggccgcaggcgcagtggcaggctcaactgccgacgggctggcggctggaggatcgcggcgatcgccgtcgtctgtatgacgatcgcggggcgttgatcagtgagatccgctaccagacgagtgcgcgccgccagccggtatccatcagtcagtcggcgttccactaccggatcgccattgagaatctggatgaataa

SEQ ID NO: 444438 - DNA, 1173 bp, Serratia marcescens
atgatttatttctccgcattgggcatggtcagcgccctgggcacaactctggcgcaaaccgcgcataatctgcgttcgggtcatgcgccgggcatgcagccgcaaacccagtggcttctgggcgatgagccgtcatggtatggcgcggtggaagacagcttgccggcggtgccggcgacgttgcgccgtcatgattcgcgcaataaccgcctgctgctggcggcgttggcgcagattgcgccgcaggttgaggacgcgatagtgcgctacggcgcggatcgcgtggcggtgatcctcggcaccagcacctcggggatccacgaaggagagctggggctgcagtattaccagcagcacggcgtctggccgccgggctatgattatgcccagcaagagctgggcgatccggctcagtttcttggcgcgctgcttggcgtacaggggccggcgtatacgctgtcgaccgcctgttcttccagcgcgcgggcgatcatcagcggtaaacggctgatcgacgccgggctggtggatgcggcgattgtcggcggcgccgatagcctgtgccggatggcgattaatggtttccgcagcctggagtcgctgtcggcaacgcgctgtacgccgtttgcccaagggcgcagcggcatcaatatcggcgaaggcgcggcgctgatccttctgagctcagagccggcgccggtggcgctgctgggcgtgggcgaatcgtccgacgcctggcatatgtcggcgccgcatccgcaggggctgggggcggaacgggcgatggcgatggcgttacagagcgccgggctgcagccgcaggatattggctacatcaatctgcacggcaccgcgacccgcttgaatgacgcgatggaagcgcaggtggtgcagcgtatctttggctccgccacgccgtgcagttcgaccaaacatctgaccggccatacgctgggcgccgccggcgcggtggaggccgggctgagctggctgctgctgacggaagatctgccgctgccggcgcaggatttcagccaggcaccgcgcgatgacgagctggcggcgatcgatctgctgaccgcgccgcaggcgctgacgcggcggacgattttatcgaattcatttgcttttggcggcaataatgcctgcctgctgttaggagcgctgccatga

SEQ ID NO: 444439 - DNA, 474 bp, Serratia marcescens
atgagtggttatcaggctgctgaatactatttgccgcatgcggcgccgatggtgctgttggagcgggtcatccgcgtggataaagagggcgcctgctgcgcggtcagcgtctgcgatcgcggcgtgctggcgccatttctcgatgcacagggcgcactgcctgcctggtatgcggtcgaactgatggcgcaaaccatcggcgtctggagcggctggcacgggcgccagtccggccggccgccggcgctgggcatgctgttgggcggccgcgccattcactgcgagcagccggcgtttgccgccggcagtgagctggtggtcagcgcccggctgctgtttcaggatgagaagctggcctgtttcgaatgcgcgctgacgctgaatgggcggcaggttgcacacggcagacttaatacctaccagcccgaccaacaggaaattactcaactcaccaatccagggggcaacgcatga

SEQ ID NO: 444440 - DNA, 732 bp, Serratia marcescens
atgacgcgttccgttttagttaccggcgccagcaaaggaatcgggcaggcgatcgcctgccgtctggcggccgatggtttttatatggtggtgcactatcaccgcgacagggccggcgcagaacagacgctgcagcacattacggcggccggcggtcaggggcggctgattcagtttgacatcagcgaccgcgtccagtgccgcgagcggctggagcaggacatcgagcgccacggtgcctactacggcgtggtgaataacgccggtatcacccgtgacggcgcgtttccggcgctgagcgacggggactgggacggcgtgatccacaccaatctcgacagtttttataacgtgctgcatccgtgcgtgatgccgatgatcggtctgcgtaaaggcgggcggattatcgcactgtcgtcggtgtccggcgtgatgggcaaccgcgggcaggtcaactacagcgccgccaaggcgggggtgatcggcgcctgcaaggcgctggcgattgaactggcgaagcgcaaaatcaccgttaactgcattgctcccggactgattgataccggcatggttgatatggagccactggcgcgggatgaggcgatgcgcgccattccgttaaaacggatgggcacggcggaggaggttgccgggctggccagctacctgatgtcagatattgccggctatgtgacgcggcaggtgatttccattaacggaggcatggtatga

SEQ ID NO: 444441 - DNA, 1230 bp, Serratia marcescens
atgacgcagcgggtggtgatcaccggcatggcgggcatcaccgccttcggcaacgactggcagcagattgacgcgcgtctgcggcaggggaaaagcgcggtgcgctatatggcgcagtgggaagcgtatcgggggctgaatgcgcggttgggcgcaccggtagaggactttaccttgccggagcactacacgcgtaaacgcattcgctccatggggcgggtgtcgctgctggcgacccgcgccaccgagctggcgctcggacaggcgggcctgctggaggacgcggtgctgaccagcggcgcgaccggcatcgcctacggttcgtcgagcggcagcaccgactcggtgagcgagttcgccaccatgctgaccgaaaagcacacccacaatattaccggcaccacctatgtgcggatgatgccgcacaccgccgcggtcaacaccggcctgtttttcggcctgcgcggccgggtgatcccgacctccagcgcctgcacctccggcagccaggcgattggctatgcctatgagagtatccgccacggttaccaaacggtgatggtggcggggggcgcggaggagctgtgcccgtcagaggcggcggtgttcgataccctgttcgccaccagccagcagaatcagcggccggatttgacgccgcgaccgtttgaccgtcagcgcgacgggctggtgatcggcgaaggcgcggcgacgctgatcctcgaatcgctggaacatgcgcaggcgcgcggcgcgacgatttacggcgagattgtcggctttgccaccaactgcgacgccgcacatattactcagccgcagcgtgaaaccatgcagatctgcattcagcaggcgctggatgccgccggtctgacggccgcggatatcggttatatcagcgcgcacggcacggctaccgatcggggcgatattgccgagagtctggcgaccgcggcgatctacggcaaccgtacgccaatttcgtcgatgaaaagttatttcggccatacgctgggcgcctgcggtgcgctggaagcctggctggcgctggagatgatgcgcgacggtcggtttgcaccgacgattaacctgagcgagccggacagcgcctgcggcgatctggactacatcatgggggattaccgcgccattgagaccgaatttgttcagtcgaacaatttcgccttcggcggcattaacacctcgctggttctgcgccgctggccgtag

SEQ ID NO: 444442 - DNA, 897 bp, Serratia marcescens
atgaaagcgaattcggatgaactgatcacctttgtcacggtggtggaaaacggcagtttcagccgcgcggcggagcgcctgggccaggccaactccgtggtgagccgcacggtaaaaaaactggaaaacaagctgggggtgaccctgctcaaccgcaccacccggcaaatcagtctgacgcaggaaggagaaagctatttccgccaggtgcagaaggtgctgacagagatggcggcggcggaaaatacgctgatggagagccgccagcggccgcaggggctgctgcgcgtcgatgccgccacgccggtggtgctgcatgtcctgacgccgctggtggccgagttccgcacgctgtatcccgacatgtcgctgtcgctggtctcgtcggaaacctttatcaatctgatcgaacgcaaggtggatatcgccattcgcgtgggggaactcaccgactccagcctgaaggcgcgcaaactgatgaacagctaccgtcaggtgctggcctcgccggcctatctggaaaaatacggcacgccgaccaccgtggaggagctgcatcagcactgctgcatcggctttaacgatctggtggcgctcaaccgctggccgctctcctgcgccgacggccgtcaactggagatcgaaccggggctgaccagcaacagcggtgaaacccatcgccatctgtgcctgtatggcaacggcatcgcctgcctgtccgactttatgattggtgaagacgtgaagcgcggcgatctggtgccgatcctgaccgagcagacgctgccgctcgccatgccgataaatgcggtgtactacagcgacagcgcggtcagtaaccggctgcgcagctttatcgattttatcagcgcacgtctcggcccggttcagccataa

SEQ ID NO: 444443 - DNA, 780 bp, Serratia marcescens
gtgccgaaacgaacttacgccatgcggtatgtcgcaggccagccagtagaacgcattttccctggcacccacaatgccccgttgccgccgggcgccgcgttgcctaccggcggcgcgctgcgggtgatggtctggaatatcttcaagcagcagcgcgccgactggctgtcggtgctgaaaagctttggcaaagacgcgcagctggtactgttacaggaggcgcaaaccacgccggagctggtgcagttcgccacgtcgaactatctggcggccgatcaggtgccggctttttccctgccgcaacatccctccggcgtgatgacgctggcggcggcgcacccggtgtattgttgcccgctgcgtgaaaaagagccgctgctgcgtctggcgaaatcggcgctgattaccgtctatccgttatttaacgatgaattgctgatggtggtgaacatccatgcggtgaacttcagcctgggcgtggacgtttacagtaaacagctggggccgattggcgaacagattgccagccatcaggggccggtgattatggcgggggattttaacgcctggagccgcaggcgtatcaatgcgctgtatcagtttgccagcgatatggcgctgcgcgaggtgaactttactgacgatcatcggcgcaaagcctttggccgtccgctggattttgtgttctaccgtgatttgggcgtggcggaggcgtcggtgttggtgacgcgcgcttcggatcataatccgctgctggtggagtttcagccggcgcgttag

SEQ ID NO: 444444 - DNA, 720 bp, Serratia marcescens
atgaaaccagcccacactctacaaaagcttcatagtccgcagtcgtgggccgagttgccatggggggaatattatcgtgcagcgctggagcagcagttgcaaccctggtggccgaaactgtttggttttcatctgttgaaaatcggcagcctgagcgcggagctgaccactgacaagtgcgctatttcccaccaggtcaacgtggggatgagcggcgcggcgctccaggtgcgcgccgacgtctaccaactgccgtttgccgccaagtcggtggatgcctgcctgctggcccacagcctgccctacgccgacgatccgcaccgtatgctgcgtgaggtggaccgcattctggttgatgacggctggctggtgatcagcgcctttaacccgttcagcctgctggggctggcaaaactggtgccgcggctgcgtcagcgtcagccgtatgccagccgcatgttcacgcagatgcggctgttggactggctgagcctgttgaattatgaagtgctttgtcagacgcgcttccacgtgttgccgtggcatcgcaaaggggggcagtttctcagcacgcatctgccggcgctgggctgtatgagcttgatagtggcgcgtaagcgcaccttgccgctgacgccgacgccgctgagaatgggggcgcgtaaaccgtcccttggccgcgcggtcggcgcgaccaagagctaccgcaaactgccgtaa

SEQ ID NO: 444445 - DNA, 993 bp, Serratia marcescens
atgacgccgctaccgggggcgggcgtgcggcttttacctgaggcaaagttcgtgagtaaagaagatgatatccggctggatcaaaaggtccgcgccgcgtggatgtactacatcgccggtcttaaccagagcgaaatcgccagccagctcggcacatcacggccggtagtgcaacggctgatcgcggcggcaaaggaagaaggcattgtctcgatcgggctgcatcacccggtggccaactgtctggactatgcgcagctgctgcaggaaaaatatcgcctgctggagtgtaacgtggtgccggcttacggcggcgagggaacgctggacagcgtctctttcggctgccagcaaatcatggcgcgctacctgcgtgacgccgaggccaaggtgatcggcatcggctccgggctgacgctgaaaaaaaccatccaccgcatcgacttcagcagccagaacgcccgctgcgtcgccctgatcagcgccatgaacgaaaacggcgagtgtaactattacgacgatgtgccgctgctgctggcgcggaaaatccaggcgaagtactaccaatggcccgcaccgcgctacgcgcaaaccacgcaggaacacgccatgtggagcggcagccggctgtaccgcaacgtctcggcggtggcggaaaactcggacgtgatctttgtcggcatcggcgcattgggcacgcaaagcccgatcttcaaagacggctttatcgaccagccgcagctcgccgagctgaccgctctcggtggggtcggtgaaattctggggcgctttatcgacggtgacggggaagtgctcgactgtgcgatcaaccggcgcaataccagctacgatatccgccgcagcgattgcccgcgcatcgccgcagcctgcggtgaagataaacggccggcgatactggcggcgctgaaaggcggctggatcaatgggctggtgaccgacgagcacagcgcccgctggctgctgacgcgctga

SEQ ID NO: 444446 - DNA, 1371 bp, Serratia marcescens
atgaacaacgatcaaaacacgtggctgcatatcggtctgggatcttttcaccgcgcgcatcaggcgtggtatctgcaccgtctgattgccggcggcgaccggcgctggcatattgccgccggcaatatccgtaatgatgcggaacaggtggtgcaggcgctggcggcgcaagacgggcgctatgtgctggaaaccgtcagcccggacggcgagcgcgagtatgaagagattacttcgattcagacgctgttgccgtggcagccggatctgcagccgctgattgaggagggcgcccggccgcagacgaaagtgatcgcgtttaccgtgaccgaaggcggctactacctgaatacccgccacaaactggacgtggagaatgccgatttggcggcagatctgaacggtgactgcaaaaccatttacggcgcgattaccaaaattctggaacagcggatggcgcagaatgccgggccgttaacgctgctgagctgcgacaacgtgcgccacaacggcgatcgcttccacgacgggctgacggaattcctgcagctgaccggcaaaagcgcggtcagcgactggctggcggccaacgccagctgtccgaataccatggttgaccgcatcacgccgcgtccggcggcggatctgccggcgcgcatcaaggcgcaaaccgggatcgacgatcaagcgccggtgatgggggagagctttatccagtgggtggtggaagataatttccgcgccggatgcccggacttggccgccgtgggcgtggagctggtggaatcggtgatcccttacgaagaggcgaaaatccgcattcttaacgcttcgcacagctgcatcgcctgggccggtacgctgctcggtcagcaatatatccatgagagtacgctgaccgccgcggtttacgccattgccgaccgctatgtcacacaggacgtgatcccaagcttaggggacaacggcatcgatctgcccacctaccgcgacgtggtgctcaagcgtttcaccaatccccatattcaggataccaaccagcgggtggcggcggacggcttctccaagatcccggcgatgattgcacctaccctgcaggagtgttaccagcgcggcgcgcggccggaggccaccgccatgctgccggcgctgttctttgtctttatggagcgatggcatcagggggggctgccgtacgactatcaggacggcattctcaatgcgccggcggtgcatgcgatgttcgaatcggacgatccgatcgccgcctatgcgcaggacagcgcgctgtttggcgaactgacgcagcgggcggattttgtcgcgctgctgcgcgagaagattgctgcggtttacgcgctgattaactga

SEQ ID NO: 444447 - DNA, 1464 bp, Serratia marcescens
atgtatttaggcatcgatcttggcacatccgaagtcaaggcgctgatcgtggatgaaaatggcgcgattgtcgccagccacagcgcgccgctgaccatccagcggccgcagccgcattggtcggaacaagcgccgcaggcctggtgggaagcgacggactatctgatggccacgctgcgtgaaaagtgcggccagcactggtcagccatcaaggcgatagggctgtccgggcagatgcacggcgcggtgttgctggatgacaacgatgaggttattcggccggctattttgtggaacgacacccgcagcgcgcaggagtgcgtggaactggaagacatcgcgccggaactgcatcaggtggccggcaatctggccatgccgggcttcaccgcgccgaagctgctgtgggtgcgccgccatgaaccggacaattttgcccgcatcgcgacggtactgctgccgaaggattatctgcgctaccaaatgaccggtaaaaaaatctccgatatgtcggacgcggccggcacgctgtggctggacgtggcgcgccgcgactggtcggacgcgctgttggataagtgcggcctgtcgcggcgtcatatgccggcgctggtggaaggctgtgaggtttccgccacgctggagccgcagctggccgcgcgctgggggctgaacccatcggtgctggtggccggcggcggcggtgataacgccgtcagcgccatcggcgtcggcgcggtgtcgccgggcgatgcgtttatttcgctgggcacctccggcgtgttgtttgtggtgacggaggcttaccggccggcgccgcagtcggcggtgcacgctttttgtcacgtgctgccgaatctgtggcaccagatgagcgtgatgctcagcgccgccagctgtctgcagtggttctgccggctggtgggggtcacggaaaacgcgctgctggaggagatcgcccagctgagcgaggaagaaaaagccgccgcgccgctgtttctgccgtacctgtccggcgaacgcacgccgcataacgacccggatgcgggcggcatgttctgggggctgaaccatgccagccagcgcgcattgatgggctacgcggtgctggaaggcgtgagcttcggcatggcggacggactgcgggtgctgcaggagagcggcacccgtatcgaacagtgttcgctggtgggcggaggcgcccgcagcccgttctgggcgcagctgctggcggacatcctgaatttgccggtggtgacgcataaaggcggcgaaaccggcggcgcgctgggcgcggcgcgtctggcctgcctggcggccggcaagccgctggcggcggtgtgtgaaaagccggaaatcttccgcacctggcggccggaggcggcgcgccatcagcggctgatgacgcgctatgcgcagttcaatgtgctgtatgtcaacgacctgaattaccgtaagcactga

SEQ ID NO: 444448 - DNA, 1281 bp, Serratia marcescens
atgtcggtaaacaacaaacagtggctcggactgcccctgaacctgatatggggatatatcgccattgcggtctttatgaccggcgacggtttcgagctggccttcctgtcgcactacattaaagagctgggctttacgccggcgcaggcctctttcgccttcaccctttacgggctggcggcggcgctggccgcctggatctccggcgtggtggcggagattatcactccgcagaaaaccatgatgatcggctttgtcatgtggtgcattttccacgtgctgttcctggtgttcggcctgggcgatgccaactatccgctgattctgctgttttacggcattcgcggcctggcctatccgctgttcttgtatgcctttatcgtcgccatcgtgcataacgtgccgagcgacagggcgagctcggcgctgggctggttctgggcggtgtattccatcggcatcggcgtgctcggcagctatattccgagctttaccattccgcagatcggtgagttgggcaccctgtggttggcgctggtgttctgtgtgatcggcggcattatctcgatggtggcgctgcgcaataccgaaacgccgcgccatatgcgcaacctcaccacccgcgagaagttcggcgaactgagccgcgcggtgacgctgctgtacaccaaccgcagtattctgctctccagcatggtgcgtattatcaacacgctgtcgctgttcggctttgcggtcattatgccgctgatgttcgtcgatgagctgggcttcaccacgccggagtggctgcaggtatgggcggtgttcttctttaccaccattttctccaacgtattctggggcattgtggcggagaagatgggctggatgaaggtggtgcgctggttcggctgcgtgggcatggcgctctccagtctggcgttttactacatcccgcagcatttcggccataacttcgccatggcgttgattccggcggttgccctggggatcttcgtcgcggcgttcgtgccgatggcggcggtgttcccggcgctggagccgaagcataaaggcgcggcgatttcggtgtataacctgtccgccggcatgtcgaacttcctggcgccggcgattgcggtggtgctgctgccgtacttcagcaccatcggcgtggtggtggcgtacacggcgctgtatgtgctggcgtttttcctctgtccgctgattcgcgtcgagcagccgggaattggccggcagacaagcggcgagggcgaaaccgccgggatatcgtcataa

SEQ ID NO: 444449 - DNA, 2199 bp, Serratia marcescens
atgaaacgcaagcacctctggatactgaatccctgcctgctggccatgctggcgccgaccgcctgggcggacgatcaaaaaaatgaagaccagttggtcgtttccgccaaccgtatgcaccgcagcgcgacggaaatggcgcagacaacctgggtgattgaaagccaggaaattgaacagcaggtgcagggcggcaaagagatcaaagagatcctcgcccagctgatcccggggatggacgtcagcagccaggggcgcaccaactacggcatgaacatgcgcggccgttcgatgctggtgatgattgacggcgtgcgccagaactcctcgcgcaccgacagccgtcagctcgattcgatcgacccgttcaatatcgaccatattgaagtgatctccggcgctacgtcgctgttcggcggcggcagcaccggcggcctggtgaatatcgtcaccaaaaaaggccagcaggaaaaacaggtggagctgcaaatcggcggcaaaaccggcttcggcggccataacgaccacgatgaaaacgtggcggcggcggtcagcggcggtaacgaacacgcctccgggcgcctgtcggtctcctatcagcgctacggcggctggtatgacggcaagggcaaagaggtattgatcgacaatacccaaaccggcctgcaatattccgaccgcatcgacgtgatgggcaccggcaccctgaatattgacgaccaccagcagctgcagctgaccacccaatattacaaaagccagtccgacggcgaccacggcctgtatctgggagagaatttctcggcggtcaccggcaacggcaccgcctccaacagcggcaatctcgactccgaccgtattcccggcaccgaacgtcatctgatcaacctgcagtactccaacaccgatttctggggccaggatctggtggcgcaggtctattaccgcgatgagtcgctgaccttctacccgttcccgaccctgagcaaacagggcgacgtcaccagcatcggcgcgtcgcagcagaaaaccgacttctacggcggcaagctgacgctgaacagcaagccggtcgacggcctgacgctgacctacggcgtcgacgccgagcatgaaagctttaacgccaaccagcagttcttcgatctggataaggcgaagcagtccggcggcatgcacctggagaacagctacaacgtcggccgttaccccagctacaccaccaccaacctggcgccgttcctgcaggccagctacgacatcaacccaatcttcaccctgagcggcggcgtgcgctatcagtacaccgagaacaaggtggatgatttcgtcggctacgcgcagcagcagggcatcgccaacggcttggccaactccgccgacgccgtgccgggcggtaaaaccagctacaacaacgcgctgttcaacgccggcctgctggcgcacctgaccgaacgccagcagctgtggttcaacttctcgcagggcttcgagatcccggatatcgccaaatactacggttctggcaactatgatctggttaacggccactatcagctgaaaaacagcgtcaacgtcaatgactccaaactcgacggcatcaaggtcaacgcttacgagctgggctggcgctacaccggcgataacctgcgcacgcaggtggcggcttactactcgctgtccgacaagaccatttcgatcaacaagaccgatatgaccatcaacctcgacgacgataagcgccggatttacggcgtggaaggggcggtggattacttcttcgacgacggcgaatggagcaccggcgcaaccttcaacctgatcaagtcgcagaccaaggttgacggcaagtgggagaaactgacggtcgataccgccagcccgtcaaaagccaccgcttacgtcgcctgggcgccgggcgactggaacctgcgcatgcagtcgcagcagacctttgacgtctccgatgccgacggtaaaaaaatcgacggctataacaccgtcgatttcctgggcagctacatgctgccggtggggaaaatcagcttcagcatcgagaacctgctggacaaagactacaccaccacctggggccagcgggcgccgtacctgtacagcccgacctacggcgcgcctgagctgtatagctacaaaggccgcggccgcacctttggtctgaactactcggtactgttctga

SEQ ID NO: 444450 - DNA, 1329 bp, Serratia marcescens
atgaatcagcccctcgatttcatcggcatcggtatcggtccgttcaacctcagcattgccgcgttgggcagcgaagtcgacggtttcaacagcctgtttctcgaacgcaagccgcacttctcctggcacccgggcatgatggtgccggattgccatatgcaaaccagctttctcaaggatctggtcagtgcggtggcgccgaccaacccgtacagctttctcaactatctggtaaaacgtaaaaagttctaccgcttcctgaccaccgaacagcgcaccgtatcgcgcgaagagtttgccgactaccttgactgggcggccaacggactcagctcgctggcattcagccaggagatccaacgggtggaattcaacgatacgcagcggctgtttgaggtcaccacccagcgcggcaccttccgggcgcgccacgtgtgccttggcatcggtaaaaaaccgctgctgccggagtgcgtcagcgagcagaacgatcgctgcttccacgccagcgaaatggcgctgcgcaacccggatctggccggcaaacgcgtcaccgtggtcggcggcggccagagcggcgccgatctgttcctgaatattttccgcggcgagtggggccagccggtacagctcaactgggtatcgcgccgcaacaactacaatgcgctggacgaagcggcgttcgccaacgagtactttacgccggactacgtggaaagcttctataccctgaacgacagcgccaagcagcgcatgctgacggagcagaagatgacctcggacggcatcaccaccgagtcgctgctggcgatttaccgcgccatgtatcaccgctttgaagtgctgcgcgaaacgccctgggcgcgcctgctgcccagccgttcgctggcggcgatgcagccgcagggcaacggctaccagctggtcacccaccaccacctcgatcagggcaaagagacctttgacagcgacgtggtgattttcgccaccggctatcagccggagcgcccggcgtttctggcgccgctggccgaccggctgcggctgaccgacgacgataactatcgcgtggcgccggactttaccctggaatgggacgggccggcggaaaactgcctgtttgccgtcaatgccggcatgcacagccacggcatcgccgaaccgcagctcagcctgatggcctggcgcgcggcgcgcattctcaaccgggcgctggggcaggaagcgtttgatttaacctcaagcccgtcgctgattcagtggcgtagccaacaatccggggcgacagcacgaaatgagcaatctatgctgaattattctgaattttag

SEQ ID NO: 444451 - DNA, 1752 bp, Serratia marcescens
atgaatctcacggaatacacggactggcagcacgtcaaccgccagatgatcgccaagatcctggcggaacttgagtatgaacgcacgctgcgcgccgaagccgaagccgagggctggcagcgcatcgcgctgggggatgcggtctaccgcttccgcgcccggcgcggcatctggggctggctgcatatcgacgccgattcgctctcctgcggcgaccagccgctggcggcagaccagacactgcgccagctggcgcaggtgctgaccatgagcgacgcgcaaatcgccgagcacctggaagatctgtacgccaccctgcgcggcgatctgcagctgcgggcggcgcgccacggcatgagcgcccaggatctgatcgcgctggatcctgatgagcagcagtgcctgctggccggccacccgaagtttatcttcaataaaggccggcgcggctgggggctggaggcgctgcagcgctatgcgccggagtatcaggggcagttttgcctgcactgggtggcggcgcggcgcgacagcttcgtctggtgcgccgatgacgactatccgctggataacctgctggacagcgccatggacgtcagtgagcgtcagcgtttcgaccggcgctggcaggaactgaagctgacgcaggattggattcccgtgccgctgcatccgtggcagtggcagcagaaagtcgccctgcacttcctgccgcagctggcgagcggcgaactggtggagctgggggaattcggcgatcgctatctggcccagcaatcgctgcgcacgctgaccaacgtcagccgccgctcggcctttgatatcaagctgccgctgaccatttacaacacctcctgctaccgcggcattcccggtaaatatatcggcgccggcccggcggcctcccgctggctgcagcagatcttcgccggcgacgccacgctgcgcgccagcggcgcccagattctgggcgaaccggcggccggctacatggcgcaccagacctacgccagcctgccgcaggcgccctaccgctatcaggagatgctcggcgtgatctggcgtgaaaatccgtccggctatctgcaggaaggtgagcaggcgatactgatggcgacgctgatggaaaccgacaaccacggccagccgctgatcgccgcctatattgagcgctccggcctcagcgccgaggcctggctgacgcagatgttccgggcggtggtgatcccgatgtaccacctgatgtgccgctacggcgtggcgttgatcgcccacggccagaacatcacgctggtgatgaaggattacgtgccgcagcgcgtgctgctgaaggattttcagggcgatatgcgcctggtggagcaggaatttgccgaagcggcgtcgctgccgcagtcggtgaaggacgtcaccgtgcgcctgccggccgactacctgattcacgatctgcagaccggacactttgtcaccgtgctgcgctttatctccccgctgatggccagttgccaaatcagcgaagaacgtttttatcaactgctggcgacggtgctgcaagactatatggcgcagcacccggacatggcggaacgctttgcacttttcagtctgtttaaaccacaaattattcgcgtggtgctcaacccggtgaaacttacctattcagaacacgatggcggcagccgcatgttgccgaactatctgcaggatctggataacccgctttatttggtctccaaggagtctgcccaatga

SEQ ID NO: 444452 - DNA, 951 bp, Serratia marcescens
atgtcgatcgccaaactgatgcatgccgccggcggcttccgctgcgaaatgctggcgcaaaacctgccgctgagcctcgggctggacggcagcgcggtactgcacccgccgggcgtcgccctgcccgacggctggctggtgcaggcgctggatcagctgctggtcgccgcgccgcagctgacgggcatcgccctgccgtatgccgcatggcgtgaagagccgcaggcgcaggcgctgttcgccctggcgcacggcgactatctggcgcgtgaagtcttttaccagctgccgctgtggctgacggcaccgcgcgcgccggccggcggacagatgcagtacgacgccgagcgcgagctgtggtttccgcagcgcccggcgcgtccgcagggcgaggtctaccgccgtttcgacccgcagatcaagcacacgctgagcttccgcctgccggaagtggcgcaggatgcggagcgcttcacccgttggatgaacgccccgcgcgtcgccgcattctgggagatgaccggcccgcaggaacaacaggcggcctatctgcagcgtcagctggattccagctactgctacccgctgctgggctgcttcgacgaccagccgttcggctatttcgaagtctactgggcggcggaagaccgcatcggccgccactaccgctggcagccgttcgaccgcggcctgcatatgctggtgggtgaagaagcgtggcgtggcgcgcagtttatccgcagctggctgcgcgggctgacccactatctctatctggacgagccgcgcaccatccgcgtggtggccgagccgcgcgccgacaatcagcgcctgttccgccatctgccggcggccggctaccagacggtgaaggagtttgatttcccgcataagcgctcacgcctgatcgtcaaccaacgtcacgatttcttccaggggcaagcggtatga

SEQ ID NO: 444453 - DNA, 1746 bp, Serratia marcescens
atgactattcagtttgcaaccgcaaagaacgatgtggctgcgcagtgttttctcaacgcattaatgcgcgaaacccgggattggcaagttcttccggccaccgaccaccagcaacatcctcagctccatattcctcttaatcaccatcaggctatccgcattaatctgcgctacacctcaccgacgcagcaccaccactacctgttcccggcctatctgcatcagtcagacgacggccaggcgacggcgctcagcgtcgagcagctggtggatctgctgctggccaagcctgcggtaaaaggcgaactgaacgaccagaccgtggcgcgcttccgccagcgcgtactggagagccacgacaatacgcagcaggcgatcgccgtgcgtctcgactggccgacgctgcgcgaccggccgctgaacttcgcgcaggcggaacagggattgctggtcggccacgcgttccacccggcgccgaaatcccacgaaccgttcgatccgcagcaggcgcggcgctatctgccggacttcggcgcgcgcttcccgctgcgctggtttgccgccgacaagcgcgtggtgtgcggcgacagcctgactctgacgctgcaacagcggctgcagcgctttgccgctgaaagcgcgccgcagctgctggcgcattttaccgatgacgtctggctgctgccgatgcatccgtggcaggccgaccatctgctggcccagccgtggtgccagtcgctggttgaacaggggctgctgcgcgatctgggcgaggccggcgcacgctggctgccgaccagttcctcccgctcgctgtacagcgaaagcaaccgcgacatgatcaaattctccctcagcgtgcgcctgaccaactcggtgcgtacgctgtcggtcaaagaagtcaaacgcggcatgcggctggcgcggctggcgcaaaccgagcgctggcagacgctgcaggcgcgctaccccaccatgcgcgtgatgcaggaagacggctgggccggtctgcgctccgcagacggcgagattcaggaagagagcctgatggcgctgcgggtcaacctgctgttcgatcgccctgatacgcaaaccaacgtgctggtgacgctgacccaggccgcgccggacggcggcgacagcctgctggcggcggcggtgcgccgcctggccgcacgccttgatctgccgctggcgcaggccgcgcgctgctggctggacgcttactgcaaccacgtgctgctgccgctgttcagtaccgaagcggactacggcctggtgctgctggcgcaccagcaaaatattctggtggagatgcagcaggatctgccggtcggcatgctgtaccgcgactgtcagggcagcggttttacccacagcgcgacgccgtggctcgatcagatcggcgaagccgaagcggaaaaccgctttagcgaacagcaactgctgcgctacttcccctactacctgctggtgaactccacgctggcggtcaccgccgcgatggccgccgccggtttcgacagtgaacaaaacctgatgggacaggtgcgcgacgcgctggccggcctgcgcgccacggcgctcgacacccgctgtctggactacgtattggacagcagccactggaactgcaagggcaacttcttctgttacctgcacgaccataacgaaaacaccatcgtcgaccctgcggtgatctactttgatttcaccaacccgctgcgcgcgcaggaggataaataa

SEQ ID NO: 444454 - DNA, 1203 bp, Serratia marcescens
atgagcctatccccacaaccggacgttcttgcaggcgacaacattgcgcctgccaactggcccctggcgttctgtgccggcttattgggcatcgggcaaaatggtttattggtggcgctgccggcattggtcagcatgacccacctgtctctgtcggtctgggcaggattattgacgctcggttcgatgctgtttttagtcggttccccctattggggacggcagtgcgaagtgcgcggctgtaaatatgtggtgctgatggcgctgggcggctatctgctcagctttgcgctgctggcgctggcggtatgggggttggcggcaggctggctgcccccgcaggcgggcctcggcgcgctggtggcggcgcgtattctgtacggcctgacggtgtccggcatggtgcccgccagccagacctgggcgctgcagcgcgccggccatgaacgtcgcatggcggcgttggccaccatcagttcagggttgagctgcggccgtctgctggggccgctgtgcgcggcgctggcactttccctacatccgatggcgccgctgtggctgatggccctggcgccattgcttgccctgctggtggtgtgccgccagcagaacgatccgccgctgccgccggtggcgcagcagcaaaaccgtttgcaatggcatatgctgccgtacctgctgtgcgctctgctgctggcggcggcggtcagcctgatgcagctggggctggcgccgcatctgaccccgctcttccagaattcgacaacgctggtcagccaccatgtggcgatcctgctgagcgtggcggccggctgtacgttactggcgcagtttctggtggtgcggccgcagcgttttccgccggcgcagctgctgctaattgccgcgctgctgatggtggtagggttggcgctgatgtgcgcacagccgctggcgctgttttatctgggctgtgcgctgacgtcatttggcgcagcgatggccacgccgggttaccagctgctgctgaatgacaaactctctaccggcaaaggttccggggttatcgccaccagccacacgctgggctacggactgagcgctttgatggtgccggcggtggcgaaattttacggcgagtcgcagctgattgcggcggcgctggcgatggccgtcctgctgggcggcgtaagcggctggctatggcgccggcgagaaaaataa

SEQ ID NO: 444455 - DNA, 879 bp, Serratia marcescens
atgtccgcgagctatcgtatttttgatgttcagttaaccgagaaacgccagatttccccgtcgctggtgcgttgcgtcttcagcggtccgcaggtgagccggatgaagctggaagcgccggaccagcgtatcaagctgctgttcccgagtgcggaagggcaggcgttgcagctggcgaacggcgatgactggtatcgcgactatatggcgataccgaaggcgcagcggccggtgatgcgcacctataccctgcgtgcgctgcgcagtgagcggcaggagatggacgttgagtttgtgctgcacggcgacaacggcccggcctccgcctgggcaacgcatgcgcaggtgggcgacgccattcagattgtggcgcccaacgccgattttgccggcgacagcggcggttatgaatgggcgccgccggcgcagatgaaccaggcgctgctgattgccgatgaaaccgcgctgccggcggcgatgggcattcttgaacgtctggcgcagcaggacaacccgccgcgggtgcaggccttttttgaagtgccgctggccggcgactgcgtcagcgtggcgcagttcccgtttgccgaggtgttctggctgccgcgtgacgtcgggccgcagcagttgcacggcacgctgctgctggagtcggtgcgccgtcgggtgacgattcccgattctgcgcgcgccgaagcgcagtcgctggcggaaaacagcctgggcggcgaggtactgtgggaaagggctgagggcgcctgcagcttttacgcctgggtcgccgccgaatcgtcgacggtgaaatcgctgcgccgctatctggtcggcgaatgcgacctggatcgttccacggtcaactttatggcctactggtgctga

SEQ ID NO: 444456 - DNA, 774 bp, Serratia marcescens
atgtcgactttaaaaattaccctgttgcagcaaccgctggtatggcgcgacgggcaggccaacctgcagcatttcgaccggctgctggccgatattcacggccgcgatctgatcgtgctgccggagatgttcaccaccggttttgccatggacgccggcgaaagcgcgctgcccgaacgccaggtgattaactggctgcacggctgggcgatcaaaaccaatgcggccatcgccggcagcgtggcgctgaaaaccgacaaagcggcggtgaaccgttttctgctggtggagccgggcggcacggtgcacgcttatgacaagcgccatctgttccgcatggccggcgaacacctgcattatcaagcgggaaaacgacgggaaatctttgaatggcgcggctggcggattttaccgcagatctgttacgacctgcgcttcccggtctggtcgcgctgccagcaggattatgatttggcgctgtacgtcgccaactggccggcggcgcgcagccagcactggcaaacgctgttggcggcgcgcgccattgaaaatcaggcttacgtggccggttgcaaccgggtcggcgaagacggcaacgggctgagctacagcggcgacagcctgattatcagcccgcagggagagacgctggccagcgccgatgccggtgctgccgcgcgcctggacgccgatctgtcgctggagaatctgcagatctatcacaccgccttccccgcctggcgcgatgccgacgattttctgcgccacgattaa

SEQ ID NO: 444457 - DNA, 1161 bp, Serratia marcescens
atgacgctttccgcaccgactcccgacagtaaactgcccaccctcggcaccaccattttcagccagatgagcgcgctggcgcagcagcatcaggcgattaacctttcgcagggcttccccgacttcgacggcccgggctatttaaagcagcgtttggcctggcacgtcgaacagggcgccaaccagtacgcgccgatgaccggcgtcgcgccgctgcgcgaggccatcgccgacaagaccgccgagctttatggctggcggccggacgccgggacggaagtgaccgtcaccgccggcgccactgaggcgctattcgccgccatcagcgcgctggtgcggccgggcgatgaagtgatctgcttcgacccgagctatgacagctacgtcccggcggtgcagctgtgcggcggcattctcaaacgcatcgctctgcagccgccggcgtttaacgtcgactggcggcagttccgcgaacagctgtcgtcgcgcacccggctggtgatcgtcaatacgccgcacaacccgtccgccaccgtctggcaggccgaagatttacagcagctgtggcaggccattgccgggcaggagatctacgtgctcagcgatgaagtgtacgagcatatctgctttgccgataatggccacgccggcgtactggcccatccccagctgcgccagcgggcgatcgccgtctcttccttcggtaaaaccttccatatgaccggctggaaagtgggttactgcgtcgcgccggccgcgctgagcgccgaagtgcgcaaggtgcaccagtatctgacctttgcggtcaataccccggcccagctggcactggcggacatgctgcgcgccgagccagagcactggcgtcagctgccggcgttttaccgcgccaagcgcgaccgctttgtgcaggcgttaagccgcagcaggctggaaattctgccgtgtgcaggtacatacttcttactggcggattacagagccgtgtcggatctggacgacgtggcgttctgccgctggttaacggaacaggtgggcgtagcggcgatcccgctgtcggtgttctgcgccgatcctttccctcataaattgatccggctgtgttttgccaaacaggatgacacgctggatgcggctgcggagcggttatgtcgactttaa

SEQ ID NO: 444458 - DNA, 615 bp, Serratia marcescens
atgagcgaaaacgagcaactcagcgcgctgctggccgtttgccactggattggcgacaaaggctggtgcccggctaccggcggcaatatgtcgctgcgcctgaatcacgaacactgcctggtgaccgaatccggcagggataagggcagcctgcgcgagcaggattttctgcgggtggagatcgccagcaatgccgcgccggacgggcgcaccccgtcggcggagaccggcctgcatacgctgctgtatcgtctctatccgcaggtgaacgccgtcttgcatacccactcggtcaatgccacggtgttgtcgcgggtggaaaagggcagcgcgctgcggctgcagggttatgaaatgcaaaaatcgctcagcggccagcgcagccatcaggacgaggtatgcatcccgatcttcgacaacgaccaggatattgcccggctggcggcgcaggtgtcggcctatgccgaacagacgccgctggcgtacggttttctggttcgcggccacgggctgtactgctgggggcggcaggtgcaggaagcgcgccgtcaccttgaagggctggagtttttattccagtgtgaactgcaacgtcgtttactggaggcgcaatga

SEQ ID NO: 444459 - DNA, 687 bp, Serratia marcescens
atgattcgcgcgattgttaccgatattgaaggcaccaccagcgatatccgctttgtgcatcaggtgctgtttccctacgcccgccagcatctggccgattatgtacgccgccatgcggacgacggcgaggtggccgaggcgctggcggcgctgcgggcagagatcgcgcagccgcaggccgatgccgagcagctgatcgccgctctgtaccgttttatggatgaagatcgcaaatccaccgcgctgaaggcgctgcagggcatcgtctggcgctgcggttaccacaacggcgactttcgcggccatctctatccggaggtggcgacgcagctggcggcgtggcagcggcagggtatcagactgtatgtctactcctccggctcggttgaagcgcagaaactgctgttcggctacagcgaagccggcgatctgcagccgctgttcagcggttattttgatacccgcgtcggcgccaaacgcgaggcgggttcataccacaatatcgccgcggccatcggcctggcgccgtccgaactgctgttcctgtcggatatccgccaggagctggacgcggcgcacgacgccggctggcacggttgtcagctgattcgcggcgaggacgatccacacagccgccacccgcaggttaaccgttttgatcgtatcgacttaggggagttttgctga

SEQ ID NO: 444460 - DNA, 543 bp, Serratia marcescens
atgagcgccttgaccatttatagcgatgaacagccgcagcagccgctgtggcagagccgcgacggcgagcagatccgccggcagctggagcaggtcggcgtgcgtttcgaacgctggcaggcggatcgcgtgctggaggacgatccgcagccggaggcggtgatcgccgcctatcagcacgccatcgatcggctggtggcggaaaagggctaccaaagctgggatgtgatcgccatgcgcccggatcatccgcagcgcgaggatctacggcagaagtttttatcggaacatacccacggcgaagatgaggtgcgtttctttgtcgagggcgccgggctgttttgcctgcatctgaaccagcgggtgtatcagatcctgtgtgaaaaaaacgatctgatctcggtgccggcccatacgccgcactggtttgatatgggcgccgcgccgcattttaccgccattcgcgtgtttgataatccgcagggctggatcgcgcagtttaccggcgatccgatcgctgacgcgttcccgcgtctggattaa

SEQ ID NO: 444461 - DNA, 1029 bp, Serratia marcescens
atgcgccctcttaacaccaccagtttgatactgcgcgacaaccggctgtggatcctcgatcagcaggcgttgccccaggaaaaacgctggcttgccagcgacagcgttgaagaactcgtcggccatatccacgccctgcgcgtgcgcggcgcaccgctgatcgggctgtccgccagcctgctgctggctctgctggccgagcgcggcctcgcccgcgacgacgtcatgcaggcgctgagcacgctgcgggcggcgcggccgaccgccgttaatctgatgaataatctggatcgcattaagcaggcgctggcgcagccggcgtggcgcgcggcggtaagcgcggaagcctggcggctggtggaagaagatcgcgccctgtgcgaccgcatcgccgaccacggcgcggcgctggtcgcccccggcagccggctgctgacccactgcaacaccggcgggctggccactgccggcatcggcacggcgattggcgtgctgctgcgcgcccaccagcagggcaaagtggaacgcgtgtgggtggatgaaacccgtccgctgctgcaaggcggccggctgaccgcctgggaattgggtgagctgggcatcccctaccggctgatctgcgattcgatggccgccagcctgatggcgcagggacaggtcgatgcggtgtgggtcggcgccgatcgcatcgccgccaacggcgacgtcgccaacaagatcggcacctacagcctggcggtgctggcacactatcacggcattccgttttacgtcgccgcaccgcacaccacgcacgatccggcctgcgccgacggcgccgccattccgattgagcagcgcgccgccgaggaagtggccggcgtcagcggcagcttcggccagtgccgctgggcgccggaagacgccgacgtgtataacccggcgtttgacgtaacgccgtcagcgctgattagcggttgggtgctggacagcggcgtgattacgccgcagcaggtcaaggcggggattttccagcgggcgctggggtaa

SEQ ID NO: 444462 - DNA, 1200 bp, Serratia marcescens
atgtcgctttaccgtacctttacggcagccgatgccgttgaatacgcccgccagttcggacaactggccgatccgcacacgctggtcagcgccgaggagatcggcgacggcaacctgaacctggtgtttaaaatccgcgaccgggaaggcgtcagccgagcgatcgtcaagcaggcgctgccgtacgtacgctgcgtcggtgagtcctggccgctgacgctcgaccgggcgcgcattgaggcccaaacgctgctgacccatggcgagttctgcccgcgccataccgtgcgcgtactgcatcatgacgcggagctggcggtgatggtgcaggaagatctctccgaccaccaaatctggcgcaacgcgctgatcgccgggcattactatccgttggcggtcggccagctggcggagtatctggcgcagacgctgtttcatacctctgatttttaccaaaatgcgcagcagaaaaaggcgcaggtcagccgctttaccaaccccgagctgtgccagattaccgaagatctgtttttcagcgatccttactgcgaccacgaacgcaatcagtttgacgaagcgctgctgccgcaggtacgcgagctgcgccacgacgcggcgctgaagctggcggtcgccgggctgaagcaccgttttctcagcaaagccgaagcgttattgcacggcgatattcacagcggctcgatatttgttgccgaagggcggctgaaggcgattgatgccgaattcggcttctacgggccgatcggcttcgacgtgggtaccgcgctgggcaacctgctgctgaactactgcgggttgccggggctgcttggcccgcgcgacgccgccgccggccgcgaacagcggctgcaggacgtgcgcgagctgtggctgattttcgccgaccgctttctggcgctgtgtcagcaaaagacggaagatgccgcgctggcgacgtccggctatgcggagcgcttcctgcagcaggtatggcaggatgcggtgggctattgcggtaccgaactgattcgccgcaccatcggcctggcgcacgtcgccgatctggatgcgattgaggatgctgatatgcgcgccgaatgccagcgtaacgcgctgagcctgggacgggcgctgatcgttaatgagccgcagatggccaatgtcgatgagctgctggcgcgtattcgccagcacagttaa

SEQ ID NO: 444463 - DNA, 792 bp, Serratia marcescens
atgagcagaatcgcgctgttatttgcgatgctggtttctatgccgatgatcaccgcctgcagcgccagcgagcaggtgcctgaaacaccggttgttaaacagcaattaatgggttcgcccgtctatatccagatatttaaagaagagcggacgttagaactttacgccaagatgggcaatgagttccgtctggtgaatagttttccgatctgtaactattccggcggactggggccgaaacgcgtccagggcgactttaagagtcccgagggcttttatagcgtcgacgtgcgccatctgaaacccgacagccgctattatcgggcgattaatatcggcttcccgaatgcgtacgaccgcgcgcagggctattccggcgcctacctgatgatccacggcgaatgtaaatccatcggctgctacgccatgaccaacggttatatggatgagatctaccgctatgtggcggcggcgttcaacaacggccagcgtctggtggatatcagcatctacccgttccgcatgaccgaacagaacatgatacgccaccgctcctcggtgtacgccagcttctggcgtcagctgaagccgggctatgactactttgtcaaaaaccaccagccgccgaccatgcaggtcgccaacggccagtatgtgctgggcaaaccgctgatgaacggcgggcagtcgaatacgctgttcgcctcgacaacgcagccggcaaccacctccggcgcgcagtcaggcaacccgttcagcccgtcacagcagccgctcaccgtagtgaaataa

SEQ ID NO: 444464 - DNA, 156 bp, Serratia marcescens
atggagaaaaatgttgcgaaaaatgttaccatcttcggcttgataccgctgggctgtggccagcaggtcgggtattggcaagcaaacaaaccgttcgcgttcagcggccgtttcgccagtggcgaagcagcgttgcgccggttgaattgtgggtga

SEQ ID NO: 444465 - DNA, 1347 bp, Serratia marcescens
atgattaaaatcagaaaagggttagacctgccgatagccggagcaccgactcaggcgattcaggacggcccgcatctcaagcacgtggcactgctgggggaggagtatatcggtatgcgtccctccatgctggtgcaggagggcgacagcgttaagcttggtcaggcgctgttcgaagataaaaagaaccccggggtcttattcaccgcgccggccggcggcaaaatcgtcgccatcaaccgcggcgagcgtcgcgtcctgcaatcggtggtgattgccgttgacgacgacgcgcagcaggaaacgttcgcccattactcaccggccgatctggcgcagctggaacgcggcatggtagaaggcgagctgctgagcagcggcctgtggaccgcgctgcgcacccgtcctttcagtaaaacgccgcgtccgggcagcacgccgcgcgccatttttgtcaccgctatcgacacccagccgctggccgccgatccgcaggtgatcatcgccgagcagctggtggcgtttaacgccggcctgacggtgctgacgcgtctgaccgacggcaaggtgcacgtctgccaggcggccggcggcaaactgtccggcgccgataatgcgcaaatcacctacaacgagttcgccggcccgcacccagcagggttggtaggcactcacattcactttatcgagccggtaagcatcaagaaaaccgtgtggcatatcggctatcaggatgtgatcgccatcggcacgctgttcaccaccggcaaactcgacacgcgtcgcgtggttgccctggccgggccgcaggttgaacagccggcgctgctgcgcacccgtctgggcgccagcctggatgagctgaccgcgggccgcctgaaagacggcgaaaaccgtgtgatcaccggctcagtgctgagcggcacgcacgccgtcggcccgaaggcctacctcggccgcttccacagtcaggtgtccgtgctggaagaagggcgtgaaaaagagctgctcggctgggtgctgccttcgtcgaacaagttcaccatcacccgtaccacgctggggcacttcctgaagaacaaactgttcgccttctccaccagcaccaacggcggcgaacgttccatggtaccgatcggcaactacgagcgggtgatgccgctggatattctgccgacgctgctgctgcgcgatctgctggcgggcgataccgacagcgcgcagtctctgggctgcctggagctggatgaagaggatctggcgttgtgcacctttgtctgcccgggtaagtatgaatacgctccggtgctgcgcgacgtgctgaccaagattgagctggaaggataa

SEQ ID NO: 444466 - DNA, 795 bp, Serratia marcescens
gtggcgagtgaagcaaaaaatgacagcatcggtaaaacgctgctggtagtactgttgctgtgtctggtgtgttcagtggtggtggcgggctccgccgtcggcctgaagtccaaacagcaggagcaaaagctgctggataagcagcgcaatatcctggacgtggcggggctgctgcagccggcgatgcccggcgagcaggtgaagcaaatcttcgacaaacgcattgaggcgcggctggtggatctgaacagcggcgatttcgtgcagggcgatgcgacatcgttcgatcaggccgcagcgctgcgcgataacgccaagagcatcgccttgccggcggcgcaggatccggcgggcatcaagcgtcgcagcaaccaggctgaaatttacctggtgcgcgacgacgccggcgcggtcagcaaaatcgtgctgccggtatacggcaccggcctgtggtcgatgatgtacgcctttgtcgccgtcgacggcgatggcgacacggtcaaaggcatcacctactacgaccagggggaaaccccggggctgggcggtgaggtggaaaatgcgtcctggcgccagcagtgggtgggcaagaagctgtttgacgacagcggcaagccggccatccgcgtggtgaaaggcggcgcgcccgcaggggatattcatggcgtggacgccctgtccggcgcgaccctgacctccaacggcgtacagcacacttttgatttctggttgggcgaacatggttttggcccgttcctgaaaaaagttcgtgaaggagcgctgaaaaatggctga

SEQ ID NO: 444467 - DNA, 1032 bp, Serratia marcescens
atgcgcgcgtcagcaatgaaaggctggctaacactggtggcgcttggcgccaccttgttattaagcggatgcggaccggcgcaggtgagcctcgagggtaaaaccatggggacctcctattcgatccgctatctgcccggcgacgatacgccgtcggccagcgagatacagacggagatcgacaaacgtctggagttggtaaatgaccagatgtcgacctaccggccggattcagagctaagccgctttaaccgcagccgcgcggtcgatacgccgttcccagtgtccgccgcgacggcgcaggtggtcagcgaggcgctgcgtattaaccgcgtgaccgacggcgcgctggacgtcaccgtcgggccgctggtcaacctgtggggctttggcccggaagggcgcagaacccaggtgccggaggccgcagaactggcgcagcgccgcgcctggaccggcatcgacaagctggcggtgcagggcaatgcgctggtgaagcatatcccggaactgtatgttgacctgtcgtcgatcgccaaggggtacggcgtcgacgtggtggtgaactacctgcaatcccggcaggtgcgaaactacatggtggatatcggcggcgaagtacgcacccgtggtctgaacggcaaggagcagccgtggcggattgccatcgagcggcccagcgacgacgcgcaacagcgcgcacagctggtgattcagcccggcaatatggcgatcgccacttcgggcgactatcgcaactacttcgagcaggacggcgtgcgctattcgcataccatcgatccgcgcagcggccggccggttgagcaccgcctggcgtcgattaccgtcatcagcccgacctgtatgaccgccgacggcctgtcgaccgggctggacgtgatggggccggaacgcggcatggcgctggccaacctgctcgggatcccggtctatatgatcgtgaaaaccgacgacggttttgaagagcgctattccgcagcctttgaaccgtatatgaagaaaatcctgtga

SEQ ID NO: 444468 - DNA, 921 bp, Serratia marcescens
atgttgccactacgcgctctgcccgcgctgctgctactgctgtgcaccccgctgttgaacgccgttgccgcgccgcagccggcgattatcgcccaccgcggcggcaccgccgacgcgccggaaaataccctgccggccatccgcagcgccttggacaacggcgccgatgccgtgtggatcacgctgcagcaggccaaagacggcgtcatcgtgctgtaccgtcccgccgatctgcaagcactcactaacgcccgcggcccggtctccgcctacagcgccgaacagctggcgcagacggacgccggctgggcctacgcccgcagcggcaaccacccgtaccgcgcgcagggcatcggcattccccgactggcaacggtgctgcaaacttttccgcacgccaccttctatctggacatcaagtcgccggacgccgatccggcccgcttcgcccgcgcgctgctgacgacgctggaaacgcagcacgcgctgacgcgcacccgggtctattccaccgatgcccgttacctgcaagcgctgccgccgcagattgcgcgctttgtcagccgcgatgaaacccgcagcctgctggctaacgtcaccatggcgcaccgctgccagctgcagccgcacggtaatgcgccccgctggtacgggctggaactgacgcgcgaagtcgaggtggtggaaaaatacacgctgggcgaaggacgatccaaggcacagctcagttgggacgatgaatcgatggcctgtttccgctcgcaagggccggcgcagattgtcttattcggcgtcaactcggcgcaggcttaccggcaggcgcagatattaggcgcagacgcggtaatggtggattcgcccaaacaggcgcaacggtggcgggagaaaaatcagggcgcggtcagccgcgccccggaatga

SEQ ID NO: 444469 - DNA, 1065 bp, Serratia marcescens
atgcgtaaaatcattcatgtcgatatggattgcttctttgccgcagtggaaatgcgcgacaatcccagcctgcgggatattccgctggcgatcgggggcagtgccgaacggcgtggcgtgatcagcaccgccaactatccggcgcgtcgctacggcgtgcgcagcgcgatgtcgaccgcgatggcgctgaagctgtgcccgcagctgacgctgctgccggggcgcatggcggcctataaagaggcctcgcagcatattcgccagatctttgcgcgctatacctcgctgattgaaccgctgtcgctggatgaagcctatctggacgtgaccgacagcccgcagtgcaacggctcggccacgctgatggcggaagcaatccggcaggccatttttgatgaactgcagctcaccgcctcggccggcgtggcgccgatcaagtttcttgccaagatcgcctccgatctgaataaacctaacggacagtatgtgatcccgccggcgcaggtggcgccttttctgcagcagttgccgcttggcaaaattcccggcgtgggtaaggtgaccgccaagcggctggaagaattggggctgcacacctgcgccgacgtgcagcgttacgatctggccgcgctgttaaagcgctttggcaagttcggccgggtgctgtgggagcgcagtcaggggattgacgaacgtcaggtctcgtcggagcggctgcgtaaatcggtcggcgtggaacgcacgctggcagaggatattcacgactggtcgcagtgcgagacgctgattgtcgacaaactctaccccgagctggaagcgcgtctgcgcaaagtaaaacccgacctgcatattgcccgtcagggggtgaaactgaagtttcaggatttccagctgaccacgcaggagcacgtctggccggtgctgaaccgggaggacttgctggcggtagcgcagcaggtgtggcgtgagcggcgtgaagggcgcggcgtccggctggtggggttgcacgtcaccttactggatccgcagatagaacggcagctgctgctgccgtgggacggttaa

SEQ ID NO: 444470 - DNA, 1248 bp, Serratia marcescens
atggcacaagccaacctttctgagattttattcaagccctcattcaagcaccgcgagacgtcgacgctgattcagcgtgcgccgcacgcccgctctgccagcatgcactcgccgctggaaggcgacaccgccaataactggtaccgcatgctgaaccgcctgttgtggtcgtggcgcggcgtggacgcggtggagattgtcgaggtgctgtcgcgcattgcggtctccgcggcggaacacagcgacgagcgcctgctcgataccgtggtgggctaccgcaacggcaactggatttacgagtgggtgcatcagggcatgcagtggcagcagcgcgcgctggaacagcaggacccgctgcaggcgggcaggcactggctgcgtgccgccaacttttacagcatcgccggctatccgcacctgaagggcgacgagctggcggagcaggccgaagtgctggccaaccgcgcctatgaagaggcggcgctgctgctgccttatcagctgaaggagctggagttcaagattgaaggcggcagcccgattaccggcttcctgcatatgccggagcagggcaaggcgccgttcccgacggtgctgatgtgcggcagcctcgatacgctgcagaccgactatcatcgcctgtttaacgattatctggccccgctgggcattgcgatgctgaccatcgatatgccgtcaatcggcgcctcctccaaatggaaactgacgcaggattccagcttcctgcaccagcaggtgctgaaccagctgcccggcgtaccttgggtcgaccatcaacgggtgaccgccttcggcttccgctttggcgccaacgtggcggtgcggctggcgtatctggaaccgcagcgcctgcgcggcgtagcctgcctgggcccggtggtgcacggtattttgtgcgatgcccgcaaccagcagcaggtgccggacatgtatatggacgtgctggccagccggatgggcatggccgacgcttccgataatgtgctgaaaatggaactgaaccgctactctctgaaaatgcagggcctgctcggccgtcgctgctacacgccgatgctgtccggctattgggagcaggacccgctcagtgcaaaagcggagtcacagctgattgcctcctcgtcgctggacggcaaactgctggcgattccacgcgtgccggtttaccgcagcttccacaaggcgctgcagcagatgagtagctggctgaatgacaaaatgcgttaa

SEQ ID NO: 444471 - DNA, 402 bp, Serratia marcescens
atgacgttaccgagtggtcaccctaaaagccgactaatgaaacgatttgccagcttggggccgtacctgcgtgaagggcaatgtgagaacgaccggtttttctttgactgtctggccgtatgcgtcaacgtgaaacccgcgccggagaagcgagagttctggggttggtggattgagctgcaggcggatgatgcacgttttacctatacttatcagttcgggctgtttaataaagaaggcgtatggcagccggaaaagattaaagatgctgaagtaaaagacaagctggaaaccacgctgcgggatttccatcagcgtttggcggagctgctgaacgggatggaactgtcgctggaacctgccgacgattttaacgagcagccgatcaaactttctgcttag

SEQ ID NO: 444472 - DNA, 537 bp, Serratia marcescens
atgcaaatttgcagaatgaactataacgatttgtcgccagatggtaggagggtaaagcttcattgctacggcgtcggctcgttcgatgtgttatccggtattgaccgctacatcaataatcctcactgttcagaccgagaaaaagcggctattccgccgggcacctattggattgttgatcgtccagcggggagcattgttaaccaaatcagggcggaggttattgacgcggttcacctctataaaaaccatcactctgaatggttcggcctgttcagcaatgacaccatgagcgatcatgtattcgttaatggtatgatgcgcggtagcttccgcctccatcctctgaatactgacggtagcggtgtttcatggggatgcatcacgctctataaggctgcggagttccaaatcttgcgacgttcactgttgaaccgtaagaaagtccgggttcccggtgggcgtggtcttatggcttatgggcgtatcgatgttcaaggtgtgccggactatagcaagtgcgtggtgtcacgatga

SEQ ID NO: 444473 - DNA, 228 bp, Serratia marcescens
atgagaaagagcctgtgtgtgattgcctttatcgtgctgacaatcctccttgtgtttatcctgcctgatggtttcatctatgactatgtatcgagcaacatagcgatcagtggtgacggtgaggcggcgatgaataactatgagtctgttgttctgctcaccaagctgggggcgtcagcggtgctctctctgcttatcgtctggttagttaaccgtaggttcaaatag

SEQ ID NO: 444474 - DNA, 210 bp, Serratia marcescens
atgttaggtaggactctcatgattctgtgtgctgccctgcttccactaactgccagcgcaggaaggataaccatgagcaacccagaggaaaccaagcagccaaacgggcaaacgctgtgtgtatacagcaacagcatatacacgtttacgtttataactaaagggaagtgcccggcagctaaaacgttcgatacagaggactcagaatga

SEQ ID NO: 444475 - DNA, 459 bp, Serratia marcescens
atgttgcctattgccatcggcgccgatgatgccgccattgaactgaagaatgtgatcgttgcctatctgcagcaacgcgatatcgccgtaaccgattacacccgggatcgcggcgacgataacgggatctaccccgatatcgcctttcaggtggcgcaggccatcaggaatgagcggcaccaacgtggtattctgttatgcggcaccggcattggcatgagcatcgtcgccaataaagtgccggggatacgcgctgcccagtgccacgatacctattcggcacagcgggcgcgcaagagcaatgacgcccagatcatcacgctgggcgcgcgggtgatcggtgccgagctggcgaaaaccatcgtcgacgcctggctggcttccgagtttgaaggcggcggttcggcgcccaaagtggcgaaaatcagccactatgaacaggcgctccaaccacgctga

SEQ ID NO: 444476 - DNA, 771 bp, Serratia marcescens
atgaacaatcagcaacgaacaggcgaaggcgcgctggccttgcagggcaaggtggcgctgatcaccggcggcggtgccggcatcggctacgcgatagccgaacagtatgtgcaacacggtgcgcgcgtggtgctgctggaccgtgcccccgacgtggcggaaacggcgcagcgtctcgacgccgagcgtgcgctgggcgtggttgccgacgtaaccggacaggcatcggtggagcaggcggtggcccagagcctggcgcatttcggccggctggacgtgctggtcaacagcgccggcattgtggcgctgaacccggcggaggaggtgacggaggcggagtgggacgccacgctggcggtgaacctgaaaggggtctttctcaccagccagacggtcggccggcattttatccgccagcgcagcggcagcattatcaacctggcttcacaggcgggcgtggtggcgttgcccaatcatctggcctattgcgccagcaaggccggcgtgattggcctgacgcaggtgctggcgctggagtgggggccgcacaacgtgcgggtgaacgccatttcgcccaccgtggtgctgaccgaactgggacgcaaggcgtggtccggcgagccggcgcggcagatgctcgacaaaattccgctgcggcgctttgccgaaccgcaggatatcgccgccggcgcgctgtttctggccggtgacggtgcatcaatgattaacggcgcgaatctggtgatcgacggcggatacaccattcaataa

SEQ ID NO: 444477 - DNA, 657 bp, Serratia marcescens
atgacagaacagatttcaacgcagtacggtaatgagatggtggaagggctggtggcggtgatcgtcagccatcgcgacgtcctgagcgagatcgacggcgcgatcggcgacggcgaccacggcattaatatggccaagggctttaccctgtgcggcgaggcgatgaagggcaaatctctgtcgctggcgcaggcgttcgatacgctgtccgatgcgctgatggagggcatcggcggttcaatggggccgctgtacggcagcctgtttatggggatggcggacagcgtgcgcgacaaggcgcaactggatgcgccggcgtttctcgccatgttgcagcaggggctgagcgagctgcaggacatcagcagcgccggcgtcggtgataaatgcctgatggatacgctgatcccggcgctggcggcgttcgagcaggcgctgcagcgcggcgacgacttttccggcgcgctggcgcagatgaagcaggcggcggcggacgggcgcgattctacccgcgatctggtggcgaaaatcggccgcgccagccggctgggcgagaggtcgcgcggcgtgctggatgcgggggcggtctcgtgctgtctgctgctgaccacgctggcggaggcgacggaacggcgtttgcagaccgttgccgcctga

SEQ ID NO: 444478 - DNA, 942 bp, Serratia marcescens
atgtcggttaataatcctctggccccgctgctggccgacggacgctcgttgattctcgacggcgcgctggccaccgagctggaggcgcgcggctgcgatctgagcgatccgctctggtccgccaaggtgctgctggaaaaccccacgcttatctatcaggtgcatctggattatttccgcgccggcgcgcagtgcgccatcaccgccagctaccaggccacgccgcagggctttctgcgccgcgacctggatgaaaaacaggcgttggcgctgattgccaaaagcgtgcagctggcgcagcaggcgcgtacggattatctggcgcagcagccgcaggaagcgccgctgctggtggccggctccgtcggcccttacggcgcgtttctggccgacggttccgaataccggggtgattatcacttgccgcaggcagaaatgatcgccttccaccgcccgcgcatcgacgcgctggccgccgccggcgtcgacctgctggcctgcgaaaccctgccctcgttcgccgaactgcaggcactgctgacgctgctggcggactacccgacgctgggcgcctggttctcctttacgctgcgcgacagcgagcacctgagcgacggcacgccgcttgccgaggtcgctgccctgctgaacaacagcccgcaggcgctggccgtcggcgttaactgcatcgcgctggaacaggttaccccggcgctgcgcacgctggccgccctgaccacgctgccgctgctggcgtatccgaactccggcgaacactacgacgcggtcagcaaaacctggcacgcctgcggcggtgagcacggcagcctgagcagccaggcggacgcctggcgacagagcggcgcgcgcctgatcggcggctgctgccgcaccacgccgcaggatatccgcgctattgccgggcagctcgccggacgttaa

SEQ ID NO: 444479 - DNA, 843 bp, Serratia marcescens
atgaaatttttggttttcatcgcggcgctggcgcttagcgcctgtgcgcattttcctgctgctcagcgcgctgagccggttgcgccgccgccgggaaccatcactgatttgcgcagcggtgaaacgctgacgccgtcacagctgttggtgcggctggcggcggcaccgcggctgatcgtcggcgaaaaacacgacaacgcctaccatcatcgtgcggagctgtggctgctgcagcagttgccgcagcagcgcccgcagggcagcgtgctgctggagatgatcaaccccgatcggcaggcgcaggttgatgcgctgcaggcgcgcctgcggcgtggcgaacgggtcgcaccgggcgaactgccggcagaactgggctggcggcagagctggccgtgggcgcagtatggcgatctggtgactgccgcgctggtggcgccgtatccgctgtggtcggccaatctggatcgcagcgagattatggcgatttatcaacggccgcagctgccgccgggcaggcagtccacccgcgccgcggtgcgacaggggctggcggagaccattcgcgcggcacacggcggccagattgagcagcagcagctggcggcgatggttgcgattcaacagcagcgcgatcgccggatggcgcagcggctgctggcggcgccgacgccgagcctgctgatcgccggcggttatcacgcttcccggttggtgggcgtgccgctgcatatgcaggatttacagccggccgtgcagccggcggtgttgatgctggtggaacaggggagcgaagtgggtaaggagcaggccgactatctgtgggcgacgccggcgacggattag

SEQ ID NO: 444480 - DNA, 921 bp, Serratia marcescens
atgagttcacccgatatcgctgaagtaaaatccttcctgctggcgctgcaagaccgcatctgcgagcaactggcgcaggccgacggcggcggcgcctttgtcgaagacaactggacgcgcgcagaaggcggcggcggccgcagccgggtgctgaccgaaggcgcggtattcgaacaggccggggtcaacttttcgcacgtctccggcgccatgctgccggcttccgccaccgcgcaccggcccgagctggcgggccgcagttttcaggcgatgggcgtctccctggtgatccacccgctgaatccttatatccccaccagccacgccaacgtgcgcttctttatcgccgaaaagccgggcgaagcgccggtatggtggttcggcggcggtttcgatttaaccccctattacggcttcaaagaggacgcggtgcactggcaccgtaccgcccagcagctgtgtgcgccgttcggcgacgaggtctatccccgctataagaagtggtgcgacgactatttctttatcaaacaccgcaatgaagcgcgcggcatcggcgggctgttcttcgacgatctgaacagcccggactttgagcactgctttgcctttacccgcgcggtcggcaacggtttccttgatgcctatctgccaatcgtggcgaagcgcaaaaccctgagctggggcgagaaagagcgtgcgtttcagctgtaccgccgcggccgctacgtcgagttcaatctggtgtgggatcgcggcacgctgttcggcctgcagaccggcgggcgcaccgagtcgatcctgatgtcgatgccgccgctggtacgctgggaatacggctaccagccggaagaaggcagcccggaagcgctgctgtaccgcgatttcctgccggtgcgcgactggctgcaggaggaggcgtaa

SEQ ID NO: 444481 - DNA, 888 bp, Serratia marcescens
atgaaaaaacaggcaaaatcttttcttaacttcaccccgctgaacacctcctcctcacgtcgccacctgttgctgtcgggcctggcgtttgccctgctcggcggcaaagccggcgcggcgcaggcgcgggagtccggcggcatgctgcgcagcgcacacgccaaaccggtcgccaagccggcgggcgccaaacggctggtgatgctcgaccccggccatggcggcatcgactccggcgcggtaggtcacgaagggtcgcaggaaaaacacgtggtgctggaaattgccaatcacgtgcgccgctttctgcaccagcacgatcacgtcgaggcgcggctgacgcgtgaagaagaccactttattccgctgttccagcgggtggaaatcgcccatcagcatcaggccgatctgtttatttccatccacgccgatggcttcaccaatccgtcagcctccggcgcatcggtcttcgccttgtccaaccgcggcgccagcagcgccatggcacgctatctgtcaaaacgtgaaaacgccgccgatgaggtagccggcgccaaatacaaacagcaggataattatctgcagcaggcgctgttcgatctggtgcagaccaatactatcaacaacagcctgaccctcggccgccacgtgctggggcagatccgtccggtgcaccatctgcacagccaaagcaccgagcaggcggcgtttgcggtgctgaaatccccttccattccgtcggtgctggtggagacctcgtttatcaccaatccgcatgaagagcagttgctcggcaccaccgcctttcgcgaaaaaatcgcccgcgcaatcgccgacggcatccttgccttcttccatgaggccgatcgccgccggcgtacggcctga

SEQ ID NO: 444482 - DNA, 393 bp, Serratia marcescens
atgaaaaaactgactctggcagcattaatcgctctgtgcagcaccccggttctggcgcaacagggcggtttcaacggccctggttcacagaacgttcagcagactcagcagggcggcttttccggccccagcgcctcgctgaccacggtcgataaggtgaaatcgatgagcgacgacgcctgggtgatgctgcaaggcaatattgaacagcgcgtcggcgacgatacttataccttccgcgacgccaccggaacgctgacggtggaaattgaccacaaacgctggaacggccagaccatcacgccgaaagacaaggtgcagttggaaggtaaagtcgataaagactggagcaacctggaactggatgtgaaaaacatcaagaaaatccagtaa

SEQ ID NO: 444483 - DNA, 459 bp, Serratia marcescens
gtgaagccttcacccgtcttttccccggatgattacgacagccacggcgtattgcgcctgccgctgtggttttggggcgtattaattttgcaggcgcgcacctggctgttgtttgtgatggccggcgcctctcgccagcagggggaaagcatgctggcgctgttttaccctgatacccagcgtttttggtacggtatcgcgctaggcctgccggcggctctggcgtttttgctcagcggacgccgggcgcaatggccgcgtctgtggcgcgcctggcgttgggtactgctgttttcgctgctggcggcgctgggcggttcgctggcgggcgtatggcggcaggaagacggcgcgccgctgcttgacggggtgctggcgctgctggatgcgctggcgctgggctatcttctgtttaatcgtcgcgtccgcgcctgtttctcggattccgcgcagctgtag

SEQ ID NO: 444484 - DNA, 585 bp, Serratia marcescens
atgaatattcgcccgctgttgttagggctgccgctgttgctgaccggctgttcgacgatgtccaatttttcctggtcgagcctgtcgccgttcaactggttcggcagcagtctggaagtcagcggcaagggcgtcggcggcattaacggcggcacgccaatgctggagcacgcgatcgacgagggcctggacggcaattatcgcctgcgcagcggtatgggcactaataacggccagatcgtcgccttttatcaggcgatggacggcgatgacatcaagctggtgatcagcggcgagccgaaaggcagcgtgcagcgggtcgacgtgatggatcaggacgtggtgaccgcgtggggcagcaagctcggcacgccgttcagcgagctgtacagcaaggccttcggcgcctgtaagccgggagagggcgaagacgtcggcaaggtggagtgcgtcgccggccagagccgctacgtcacctatctgttcagcggccagtgggccgggccgaaagatattatgccgccggatgatacgctgcagagctggacggtcagcaaaattgtctggcatgccaaaccgcagtaa

SEQ ID NO: 444485 - DNA, 681 bp, Serratia marcescens
atgaaaatcttactggtcgatgatgacctcgaattgggcaccatgctgagtgaatatctgacggcggaaggcttcaacgccagcctggtgctgaccggcaaagccggcgttgaaggggcgctgtccggtgattataccgccatgatcctcgatattatgctgccggatatgagcggcatcgatgtgctgcgtgaagtgcgcaaaaagagccgcctgccggtgattatgctgacggcgaaaggcgacaatattgaccgggtaatcgggctggagatgggcgccgacgactatatgccgaagccgtgctatccgcgtgagctggtggcgcggctgcgcgccgtgctgcgccgttttgaggagcagccggaggtgcaggacggcgacgctgaaattgtgcagggggacttaatcctgaacccttcgacccgcagcagcgaatggcgcgggcagagcttcgacctgaccgcctcggaatttaacctgttggagctgctgctgcgttcgccggagcgcgtggtgtccaaggatgagctgtcggagaaaggcctgggacgacctcgggaggcctacgaccgcagcgttgatgtgcatatcagcaatatccgccagaagctggccgcgctgccgggctgtacgctcggcattgaaacggtgcgcagcatcggctatcgcgtcaggtaa

SEQ ID NO: 444486 - DNA, 1323 bp, Serratia marcescens
atgatgcgcggcagactgttctggaaaatcctgctgggttactggttgatttttatcatcatgatgcaggtactgtggatctcttttgccgtttacggcaaccgggagccgccggagaatgcattggcccgccgtttggtcaatatgcagattacttcggcggtgtcgatgctgcaaagcggcggcatgccggcgctgaacgcgatgatcgccgactggccggcggaggatcggcgctttctgcgcgtgacgccggcgtcgcagccgccggttggccagctatcaccgccggtagagtcggggcggatgccgaaaaaaatcgtggagtgggtgcgcggggccgatcggcagggctatctgctgagttatgacgtggaaagcctgcgcgcccaataccggatgaaccggcgctggcatctgttccatatcccggagccgatgctgtggatcggtggggttggcggtttgctgtttagcgcactgttggcctggaacctgacgcggccgatgcgtcaactgcgcggcgggtttgaccgtctggcgcagggcgatttggcgatccgcctgttcccttcgatgcggcggcgtcacgatgagctgtcggaggtggcgcgcgactttgattcgatggcggaacggttggaagtactggtcagcgcgcgtgaagaactgctgcacgatgtgtcgcacgagctgcgttcgccgctggccaggctgcagctggctatcggtctggcgcggcagaatccggataacgtagagaattctctgcagcgcattgagcacgaaaccgggcggctggataaaatgatcggcgaactgctggcgctgtcgcgcgccgaaaacagtaaccaggcgggtgaggagtacttcgacctgtacggcctggtgacggcggtagtgaacgatgcgcgctatgaagcgcaggtgccgggcgtggagattgctctgcaggctaatgctgacgatgagtatacggtgaagggcaacgccgagctgatgcgccgggcgctcgacaacgtggtgcgcaatgcgctgcgtttttccggcagcggacagcgggtgacggtggtgttaaagcgtgcggagcagcagttccatattgtggtgagcgatcaggggccgggcgtggaggaatccaaactgtccagcatttttgacccctttgtgcgggtaaactcgcctaaatcgggcaagggctacggtttgggtctggcgattacccgcaaggtgttgctggcgcacggcggtcaggccgaggcgcgcaacggcgagcagggcgggctggtgatcaccctgaaggtgcccggttggcaggcataa

SEQ ID NO: 444487 - DNA, 762 bp, Serratia marcescens
atgtcttattcgcagcaaacttcttcctccgccagcggcgtgcattactttgccgaaggctggcgcctgattacacgccccggcattaaacgctacgtggtgctgccgttactggtcaacgtgctgctgatgggttctgccttctggtggctcttcagcaaactcggcggctggatcccgcagatgatggcgcacgtgccagactggctgcaatggctcagctacctgctgtggccgatcaccgtcatctccgtggtgctggtggccggctatctgttcagcaccatcaccaatctgatcgccgcaccgttctgcggcctgctggccgagcaactggaaggccagctgaccggtaaaccgctgccggacagcggcatggtcggcctggtcaaagacgtgccgcgcattatggcgcgtgagtggcgcaagctggcgtactacctgccgcgcgcgctggtgctgtttctgttgtactttgtgccggtcgtcggccaaacggtagcgccggtgctgtggttcctgttcagcgcctggatgctggcgattcagtactgcgactacccgttcgacaaccataaggtcagctttgccgatatgcgccgcgccctgcggcagaataaggtgcataacctgcagttcggcgcgctggtcagcctgtttaccctgatcccgatccttaacctggtgatcctgccggtggcggtatgcggcgccacggcgatgtgggttgaccgctatcgccgtcagttcgtcgcacattaa

SEQ ID NO: 444488 - DNA, 996 bp, Serratia marcescens
atgatgcaggatttgcgtctgatattaatcgttgttggcgcgatcgccataatagcgttgttattacatggtctgtggaccagccgtaaggaacgctcgtcccttttccgcgatcgcccagccaagcgttctaaaaaagaacgtgaaccaacttctgacgacgacttcgatgacggcgtgggagaagtgcgtgtgcgctccgcccatccgcaagaggagccgtcgttcggtgatttcgatgccgctcgcgaagaaccggtagctgcgccgaagcccgctccggcggccgagccggcgccgcgcgaggtgcagccggctgcccatcagcctgcgccgctgtctcagcggccggactacgatgatgtgctgctggacgactacgaaccggaagcgaaacctgccgaagaacagcagccagcgccgcggcgtgagccgcgcgtcgacgacctgccgccggcagaagcagagcctgcgtttgaacaggaagcagcgcctgcgccgcagcctgaaagcaaaccggccgagcctgtagcggaacctgcgccggcacagccggccccggagccggccaagcgcaaggaaaccgtactggtgctgcacgttgcggcgcaccaaggcggcattatcggcggcgaagtcttgctgcagagcgtgctgcagtccggcttccagttcggcgagatgggcattttccatcgccatatcagcccggccggcagcggcccggtgctgttcagcctggcgaatatggtgaaaccgggttctttcgatccggattcaatgtccgacttctctacgccgggcgtgtccatgtttatgatggtgccgtcctacggcgacgccaatcagaacttcaagctgatgctgcagtcggcgcagcgcatcgctgacgacgttggcggcgtggtgctggatgacgagcgtcgcatgatgacgccgcaaaagctggaaagctataaagcgcgcatccgtgaagtgttggaaaacaacgcctga

SEQ ID NO: 444489 - DNA, 987 bp, Serratia marcescens
atgaaatttctccccgaccgttttaccctgacactgctcgccaccgtgctgttagcttcgtttttgccggcacgcggcgtggcggtcggctggctgaataccctgaccgtcgccgccatcgccctgctgttttttatgcacggcgccaaactgtcgcgcgaggcgattctcgccggcagcaataactggcggctgcatctgtgggtgatgttcagcacctttatcattttcccgctgctcggcgtgctgtttaagtggtggtcgccggtggccgtcagtccggaactgtataacggctttatccacctgtgcattttgcccgcgacggtgcagtccgccatcgcctttacctcgctggccggcggcaatgtggcggcggcggtatgcagcgcctcagcctccagcctgctgggcatcttcgtttcgccgctgctggtcggcctgctgttgaacgtgcatggcgaaaccggcggcctgcagcaggtcggcagtatcgtgctgcaactgctggtgccgtttatcgccggccacctggcgcggccgctgatcggcaaatggattgaccgccaccggaaatggattggcaaaaccgaccagacatcaattctgctggtggtatacgccgccttcagcgaagcggtgacccacggcatctggcatcaggtgggatggaaggcgctgctgtttattctgctcgtcagcctggcgctgctggccgttgtgctgttgatcaatattcagatggcgcgctggctggggttcaataaagcggatgagatcactatcgtgttctgcggctcgaaaaagagcctggcgaacggcatcccgatggccaatattctgtttccggccgccagcgtcggggtgatggtgctgccgttaatggtgttccatcaggtgcagctgatgacctgcgcgatgctggcgcggcgctatcagcaaaaacagctgcggcagcagcaggcatcgcaggtgaaagccctctga

SEQ ID NO: 444490 - DNA, 921 bp, Serratia marcescens
atgaactactccctgaagcaactgcgcgtatttgttgccattgcgcgccacggcagttttagccgcgccggcgaagcgatagggctgacgcagtcggcggtcagccacagcgttaaagagctggaggcggaaatcggcgtgcgcctgctggaccgcaccacccgcgaagtgttgttgaccgacgcggggcgccggctggctaaccgcgtcgaacgtttgctggatgagctgcaggcgtcgctgttggacgcgcgcagctttggcgtgcagcgcagcggcaccgtgcgggtggcttccagccagaccatttcggcacacctgatgccgcagtgcatcgccgccggcgagcggcagtatccggacatccgtatcctgctgcgcgatcaggcgcagcagtgggtgctgaacagcatccgcaacgccgaggtggacttcggcatcgtggtcgatccggtgcaggcgatcgatctggattgtgaaccgatcctgcatgagccgtttttactgctgtgccgggacgatcatccgtttgccgatctgccgcaggtgcattggtcggcgctgagcggcagccggctggtgttgcaggattatgcctccggcagccggcagttgatcgacagcgcgctgcgtcagcagggcgtggaagcggaggtggtgcaggagatcggccatccggccacgctgtttccgatggtggccgcgggcatcggcatcagcatcttcccggcgctggcgttgccgctgccggagggcggtcagctgcgggtgaagcggctgcagccggagatccaccgcgccctgatgctggtgcggcgcaagaaccgttcgctgtcgccggcggcggaggcggtctggcaggtcgtgcgggaacaggcggcgctgttgcaacagcagcgtcaacaacggccggccggctga

SEQ ID NO: 444491 - DNA, 441 bp, Serratia marcescens
atgataaacagcatcatcacgtccgcagtactcaaaccggccctgccggcggtcggccgcctcgccagcgcaccgggcaacgccggccagctgctgatggccacgccgctggacacccatcccaacaccggcaaagcgaagaagaacgatggcaaccagcccgcagcgcccgttgagcacggcgcgccggcgcgtatcaaggcgttgcagcagcaaattcaggatttacagcaacagctgctggagctgaaagactcagacggcgatgctaaacagatcgaacagcaaaaacagctgctccaggcgcgtatcgccatgctgcaggccgagatcgcgcgcatccgcaaagaagagatggaaaaacagcagttagaacacgcgaaaacggccgacggcgtcaaccgccctacgccgtacaacgcgctggacgtctatatctga

SEQ ID NO: 444492 - DNA, 549 bp, Serratia marcescens
atgcagccagagcagcagattattgagtggttacaacaggatgaagcgcgcatcaacgccctgcgcgccgcgcgccgtctggggctgggcgactggtgcctcggcgccggttttgtgcgcaatttagtgtgggatcggcggcacgactatgcgcagccgacgccgctgaacgatatcgacgtgatccattttgatccgcagcgcacccagcccgaacgcgatcgcatgctggaggcgcgcctgcgggagtggttgccgcagccctggtcggtgaaaaatcaggcgcggatgcacctgcgcgccgggcgcgcgccctaccgcagcagtgaagacgccatcagttactggacagagatcgaaacggcggtcggcgcacggctcaacgccgacgacagcattacgctggtcgcccccttcggcctgcaggcgctgttcgccgacagcattaccttcaacaccaaaagcgccaatttcgccgcctatcagcagcgtgttgccgacaaaggctggttgcagcgctggccgcaactgcgacagtctgctgtctaa

SEQ ID NO: 444493 - DNA, 903 bp, Serratia marcescens
atgaacgacacccgttatgccgaacatttgccgatttttctggaagtcgcccaactgggcagcttctccgccgcagcccgcaagctgggcatggtgccctcttcgctggtgcgccatatcgatacgctggagcaacagctggcggtgacgctgtttatccgctcgacccgcggcttacagctgaccgatgccgggaaaatgctgcagagccgcgccgcagcgctgcaagccgatatgctgaccctgcgcgccgaactgcactcgctcagcgatgtgccgcagggcgtgctgcgcatcagttgcctgccgacctttggtaaaacctacctgttgccgctgctgccggaactggcgcagcgctatccgcagttggcggtggagctggatttcaccgagcgccccgccgatcccaaacaggagtccctcgacgccgcgctgcgtatcggcgagcagaaagacagctcgctgtatgcccgccgcatcgccacccaacgctggctgatgtgcgccagcccggcctatgtcgcccgctacggacgcccgagcacgctggccgacctgccacagcaccggctgattgcgcgcttacatcagcagcagccggcctgctgggggcaaattcttgacgccgcgctgcttaaccgctgcaagctggcgttacgctgcgatgatttcaccgcccagcggctggcggcgctcagcggtatcggcatcaccttcctgcccaactgggtggtaggaccggacgtgcatagcggcgcgctgttgccgctgatggacgacccgcgtggcgaggagcaagggatttatctgctgcgcccggtagccaaggtttccgccaggctggcggccttcaccacgctgctgcagcaatatatcggccagccgcccagctgggcctga

SEQ ID NO: 444494 - DNA, 2295 bp, Serratia marcescens
atgaatcgcacactttctcgttattctctggctacctttatcggcctgggtttaggcgcgtccactttggcacacgccgcacagcaaacggatcccccctcaaacgcggaaaacaccgccgccgctgacgataaaaaaccagcaaaaccggccgaagacaccatcctggtgaccgccgccaagcagaacctgcaggcgcccggcgtctccaccatcaccgccgacgaaatcaaaaagcgcccgccggcgcgcgatatcagcgaactgatccgcaccatgcccggcgtcaacctgaccggcaactccaccagcggccagcgcggcaacaaccgccagctggatatccgcggcatggggccggaaaacacgctggttctgatcgacggtatgccggccagcagccgcaactcggtgcgtcagggctggcgcggcgaacgcgatacccgcggcgataccgcctgggtgccgccggaaatgattgagcgcatcgaagtgctgcgcggcccggccgccgcccgctacggcagcggcgccgccggcggcgtggtcaatatcatcaccaagaaacagaccaaagaactgcacggctcgctgaatgcctactacaacattccgcagcataaagaggaaggcgccaccaaacgcaccgacttcagcctggccgggccgttaaccgataccctgagcttccgcctgttcggcggctacagcaaaacccaggcggattcccaatatatcaaccagggtcatcagtccgaccgctacggcgcctatgccgacagcctgccggccggtcgcgaaggggtgatcgacaaaaacatcaacggcctgctgcactgggatttcgcccatctgcaatcgctggagttcgaatatggctacggccgtcagggcaacctgtacgccggcgatacccagaacaccaacagcaatgacctggtgaaggatatgtacggtaaagagaccaaccgtatgtaccgcgaaacctacgccttacgttatcagggcgcctgggacaacggcgtcagcaccaataactatgtgcaatacgaaaacacccgcaactcgcggatgaacgaagggctggccgggggcaccgaagggattttcaacgagaaagacgccggctttaacgataccgatctggacgatatcctgctgcacagcgaagtcagcgtgccgtttgaaatgtgggtgccgcaaaccgccacgctgggcgccgaatggaaccagcagaagatgaagagcagttcaatcgtcagccaggcgctgcagggcggcgatatcgacggtctctccagttcggatcgcagcccctactcgtccgcgcgtattttctcgctgtttgccgaagataatattgagctcaccgacaccaccatgctgacgccgggcatgcgctacgatcaccactcggtgtccggcgataactggagcccgtcgctgaatctgtcgcaggagctgggtgaatacttcaccctgaagatgggcatcgcccgcgcctataaagcgccgaacctgttccagaccaacccgaactatatcctgtacagcaaaggccagggctgcgccaacagctccagcggcgtaggctgctacctgatgggcaacgacgatctgaaggcagaaaccagcgttaacaaagaaatcgggctggagttccacaacgacggctggctggccggcgtcacttacttccgcaacgactaccgcaacaagatcgaagccggctacacgcctgtcagccagaccagcaacggtaaaaccgatatctatcgctgggagaacgtgcctaaggcggtggtgcagggtctggaagggtcgctgaacgtgccggtcagcgaaacggtctcctggaccaacaacctgacctatatgatcgagaacaagaataagaccaccgacgattacctgtcggttattcccaagttcacgctcaactccaccctgagctggcaggcaacgcaggacctgtcgatgcaaagcaccctgacctggtacggccgtcagaagccgaagaagtacaactacaaaggggaagccaccagcggcagtgaaagacgtgaagtcagcccgtacgccatcgtcggcctcagcgccacctacgacgtcagcaaaaacgtcagcatgaccgccggggtagacaacctgttcgacaaacgccagttccgcgccggcaacgcgcagaacgtcggcaacccgaccaccggcgcggtcaatatcgccggcgccggggcggctacctacaacgaaccgggccgtaccttctatatgagcatcaacacacacttctga

SEQ ID NO: 444495 - DNA, 1383 bp, Serratia marcescens
ttgaaaactgaacaacagccaacaagcagtacgttattaacaagcaagcacgtcgggagccatggctggtggctggagattgcccggcgcggcacgccgttggtggaaccgaccgacaacggccgctggaaggtgaccttcctctggcgcgatccgcaggggtgcgaactgacgtccgcctataagcgcgtctggatcaacattaattgcctgaccgaccaccatcagccgaatccgccgcagagtctgcagcgtctgagcggcagcgatgtgtggtactggcaaactgaactgaacgccgactggcgcggcagttactgctttattcccagcatggacgaccgtccgctgcgcgtcgacggggctgatgcccacgccaatatgcatgcgcggcgccattggtggcatcaggtgttcgccagcgcgacgcacgatctgttgaacccttaccgctcctggcccgccgccggcggtaatattgtctccggactgcatatgccggaagcgccgccgcagcctgcctggcatgattttgacaactatgaggttgccagcggccgctgcattccgccggcgccggcgcgtctgcagcagcatacctggcacagcgagcggctcggcaacagccgcaaagtgtgggtgtacatcaccggcgacggcgatccgacgcagcgaccgctggcgattctgctcgacggccagttctgggcacagcagatgccggtgtgggatccgctgatgcagatgacccgtgcaggccagttgccggcagcggtgtatgtgctgatcgatattatcgatttgaaacatcgcgcccaggagctgagctgtaaccccgatttctggctggcgctgcaggaagagctgctgccgcagttggcggagtgggcgccgcacagcgccgaggctgcgcgcaccgtggtggccgggcaaagttttggcggcctctccgcgttgtatgccgggttgaactggccgcagcgtttcggcgcggtaatcgcccagtccggttcttactggtggccgcggcgcgatatgctgcaactgccgaccccgccagaggacgcctgctggctgcagcgtcaggtagagcagggattgggcagccacggcgcgctgaaggtgtttatggaagccggcatgcatgagccgttggtgcatcgggtcagcggccagatggcgacgctgctcagccagcgcggacatcgggtgcactatcgggcggtcgaaggcggccatgatgcgttgtgctggcgcggcggcctgctggatggcctgcaggcgctgtggcagcctgattttgtcaccgcccaccaaaccacgccggttgccgatccccgtctgattcaaggagcccgcgatggacatgccgaacccgtttga

SEQ ID NO: 444496 - DNA, 210 bp, Serratia marcescens
atggacatgccgaacccgtttgacgacccgcagcagcgctgcctgattctgtgcaacgggcagcagcagtacagtctgtggcctgacttcagtccggcgccggacggctggcgtacggtgttcggcccggcagaacgcgccgaatgcgtcggctggctggaaacgcactggcgggacatgcggcccgccgcgcagcgtgagcaacaatga

SEQ ID NO: 444497 - DNA, 3945 bp, Serratia marcescens
gtgtcagaaaattctaatttagcggcggattatcaggcatgcccggagatgccgctggttgcggcgcagcccggcatctgggtcgccgatcaaatttcgccgcacggcaatgcctatgcggtggcgcattatattgaactgaatggcgcgttggacaaagagtgcctgctgcgcgccatcggcctgggattgtccgaggccgataccctgcgcctgcgctttgaagagcgcgacggcgtgccgctgcagtggctggatgcagagtgtgccatccacgcggcggaatatctcgattttaccgactcggcggacgccgaagccgcggcgacggcgctgatggacatcgatctcaacggcgagctgcgtgtcagcagcggaaacccgctgtaccgcaacgtgctgatgcgcgtggcggacgatcgttggttctggtatcagcgctatcaccatatgctggtcgatggcttcagctttaccgccattacccgtcgtgtcgcccacatttacagccggctgcgccgcggcgaaacgccggatccgacgccgttcagcgcatttagcgacgtagtggccgaatatcaggcgtatcaacagtccgccggctggcagcgggatgccggttattggcgcgataaggcagcccagctgccgccgccggcgaccctcagcccgcagccgctggccgggcaggcgccgaccacgcgcattcatcgcctgagccagcactgttcggcggccgatttcgcgccgctggcggcgcttggccgccagcatcagctcaacgccgccgatatggcgatcgcgctgctggcgctgtgggtatcgcgcctgagcggccagccgcacttcagcgccggctttatctttatgcgccgtaccggctccgccgcgctgtgcgccaccgggccggtgattaacgtcttgccgatggagatgcaggtggatccgcaggcgacgttggcggaggtggcgctcacgctcagccgtgagctgaagaaggtgcgccgccatcagcgttatgatgccgagcaggtgcagcgcgatctgggacgcattggcgatgccgagccgctgtacggcacggtattcaattttaaaatgtttgattaccagctggattttgacggtattgccggcattacccacgatctggcctccgggccggtgcgcgatctggaaattgcgctgtttatcggcgacgacggccagctgaaggtagaactgctggccaatgccgagcgttatcagcgcgatgaactggcggctcatctgcagcgtttgccgctgctgctgagccagtttaccgcccggccgcagctgccggtgggggaagccgatatgctgaccgccgctgaccatgcgctgttggagcaggtgaatgatactgcccacccggtggcgccgcagacgctgagcggcctgctggcgcagcaggcgcagcgcacgccggacgcgccggcgctgtccgatgcgcatttccgctttacctaccgcgagacccgcgaacaggtgagcgcgctggcgcgccagctgaccgtacagggcgtgcggccgggcgatatcgttgccgtggcgctgccgcgttcggtattcctgtcgctggcgctgatggcgattgttgaagccggcgccgcctatctgccgctggataccggttatcccgatgagcgtctgacgatgatgctggaagacgccacaccgcggctgattatcactgaaccgtcgcagcaggcgcgttttgccggacagggcgatatcctgctgttcgatgcgccgctggccgccgaccatgccgcgcaggtcgagatgacggggccgacgccgcaccatccggcctatattattttcacttccggctccaccggccggccgaaaggggtactggtcggccatcaggcgatcgttaaccgcctgctgtggatgcaggaccactatccgctgaatgcgcaagacgtggtgctgcagaaaacgccgtgcagtttcgacgtgtcggtctgggaattcttctggccgctgatcgtcggcgcgcagctggtgatggctccgccggaagcgcaccgtgacccgcagcagctgcagcagttgatcgcccgccaccgcgtgaccaccatgcactttgtgccgtcgatgctggcggcgtttgtcagcgcgctggaagggccggaagcggttgaacagtgcgccagcctgcgccgggtgttctgcagcggcgaagcgctgccggccgagctgtgccgtcagtggcagagccgcaccgcggtgccgttgcacaacctgtatggcccgacggaggccgcggtggacgtgacctggcatccggcctggggtgaggcgctggcggcggtaaccggcgccaacgtaccgattggcctgccggtgtggaataccgggctgcgtattcttgatgcgcgtctgcgcccggtgccgccgggcgttgccggggatctgtacctgaccggggtgcagctggcgcacggctatctggggcggccggagctgaccgccagccgttttgttgccgacccgtttggcgacggcgggcggatgtaccgcaccggcgacgtggcgcgctggctgcccgacggggcggtggaatatctggggcgcagcgacgatcagctgaagatccgcgggcagcgcatcgaactgagcgagatcgatcacgcgctgctgtcgctgccgggcgtgcagcaggcggtgatccatgcgctggtgctgaccggtacgccgacggacgccggcggcgacgcgcgccagctggtgggctatctggtgccgcaggcgggggtgacgctggatctgacggcgctgcgcgctgcgctggccgaccgcctgccgccgcacatggtgccggtcgcgctggtggagatggcggagctgccgctcagcgccaacggcaaactggatcgtaaagccctgccgcagccgcaaagcggcacgcgcagcgccggccgtgaaccgctgcccgggctggaaagcgagatcaccgcggtgttcgcccgtctgctgcagcgtgagcaggtgtttgccgacgacgacttcttcgccctgggcggccattcactgctggcgatgcgtctggcggcggaactgcgccgcgatctggataaggcagtttcagtcggacaggtgatggtggcgtcgaaggtggaacagttggcggcgctgctggcggaggagcgtacgcaggaagaggccgaccgctgcggcttcgacagcgtgctgccgctgcgcactaccgacggcccgacgctgttctgcctgcatccggcctccggtttctcctggcagttcagcgtattgccgcgctatatcgatcagcgctggtcgctggtgggcattcagtcgccgcgccctgacggcccgctggcgctgagcgaagatatggatcaggtatgcgaggcgcatctggcgacggtattgtcggtacagccgcacggcccgtaccacttcatcggttattcgctgggcggcacgctggcgcagggcattgccgcccgtctgcaggcgcgcggtgaagaggtggcgttcctcggactgttggatacctatccgccggaaacgcagaactgggacgtgatgctggacgataacgtgctgaaagaagtgcagcgcgaacgcgaacagttccttgcggtgtcggaagatacgctggacccggcgctgggtgagacccgcacggcgatgttcgacaatattgaagccaactacgccgactcggtgcgcttgctgtcccgtacccataccgccaacttccgtggtcaggcgacgctgtttgtcgccaaacgcacgctgcaggaagggatggacgtgcagcagacctgggcggaatatgttgatgcgttgcaggtacacgagctggactgcgcgcatgtggacatcgtatcgccggcatcgttcaaggtgctggggccgctgttgaaccgtatcttgcgtacgctgtag

SEQ ID NO: 444498 - DNA, 195 bp, Serratia marcescens
atgctcaacactaaacgtccgatcgccgagcgccgggccctggcgctcaaccgcctggtccgctcggttcagtcagaacagaaccagccatccaataacccggttattgaagcgtccggcccgccttccggcactacggctgcagataaccccgtgctgcatcggcatgtgcatgccgattccccatcagactga

SEQ ID NO: 444499 - DNA, 624 bp, Serratia marcescens
atggaagatatcgtcaacggccaatgcccgccccggcagaggccgctttctgcaacaacgcataaagaaatcattcgtcaggctctggccgatatgaatacggtgttaattgccggcgggttgaccatcacggctgttcaacacgccgatgaaagctggctacaccacaatatgcatcggctcagactcaactggcgccatttagtatcacgctttgacgaccgcaccatgcgttaccgccaccaggaaggctttgattttgccttcaaactacaaacggaccctacgcagcctgccggcatttgcctgtgtatctacgatgttcacttcaatactctcgaagtcactgcccttgaaaactttgtgacggataacgcacggcacccgctccacggcaaaatgtttaagtacgtgttgtataccttatatttctatgcgctcgggctgatagcacgctgcggctgtgatgaaaaaacgctgcgcataaccatccgccaggcgattaatccgcatacgcttcgctactacttatcccatgccgacttccggcagattcccggcagtatggactgcgttacgcgttttagcgcactggaagcctatattgaaaactacgcgcgctga

SEQ ID NO: 444500 - DNA, 804 bp, Serratia marcescens
atgaatactgtaacgccgctgtccgcgccgctgcgcgccgaaaacctgacgctgggctatgacaagaaaatcgtggcgagcgacctgtccgtcgccattccgcacggcgagctgacggtcattatcggccccaacgcctgcggcaagtcgacgctgttgcgtaccctcagccgcctgatgcagccgcagcagggccaggtgtggctgaatgacaaacccatccgcgactacgccaccaaagaggtggcgcgccagctcgggctgctgccgcaaacgtcgatcgcccccggcgatattaccgtgttcgatctggtggcccgtggccgctatcctcatcagcgcctgttcagccgctggcgggaggaggatcagcaggcggtagaagaagcgatgcgcgccaccggcgtggcagatctggcggaacaggcggtcgacacgctctccggcggtcagcgccagcgcgtatggatcgccatggtgctggcgcagcaaacgccgctgctcttgttggacgaaccgaccacctggctggatatcacccaccagatcgaactgctggagctgatgcgccagctgaaccgcgagcgcggccatacgttagtggtggtgctgcacgatctgaaccacgcctgccgctacgccacccatctgattgccatgcgcggcggaaaggtgatcgccgaaggcgcgccgaaagatatcgtcacgccgcagctgatcgaagaggtgtacggcctgaagtgcatgatcattgacgatccggtgtcgcatacgccgctggtggtgccgctgggtaaaccctga

SEQ ID NO: 444501 - DNA, 1026 bp, Serratia marcescens
atggccagccataccgccatgttgtccgcgccgcaacgcgccgcccgcctgtcgcgcgccaccctgaccgtgctgctgctcaccgccgcctgcgcggcactggccgtctacgccctcggcgccggcacgttgtctttgagcgctgcgcaggtgattgacgccctgcgcggcgaaggccccgccaatctggcggtaatcgtcacccagtggcgtctgccgcgcgtggtgatggcgctgctgctgggcgcggcgctcggcatcagcggcgcgatattccagtcgctgctgcgcaacccgctgggcagccccgacgttatcggtttcaataccggtgcctacagcggcgtactggtggccgtggtgctgtttaacagcagtatcctcggcatcaccagcggcgcgctggccggcggcctgctgaccgcgctgctggtatacctgctggcctggcgtaacggcgttgacgcctttcgcctgattatcgtcggcatcgcggtacgcgcgctgctgatgggtgccaatacctggatgatcgtcagcgcgtcgctggaggcatcgatgaccgccggcctgtggagcgccggttcactgaacggcatcacctgggcgaaaagccagccggcgctgctggcaatcgcgctgtcgacgctgctgttgtgcggcctgtcgcgccgcatgcgtctgctggagatgggcgacgacgccgcctgcgcgctcggcgtttcggtcgatcgatcgcgcgttctgctgttgctgctcggcgtggtgctgaccgccgcggctaccgccgtcgccgggccgatctcctttatcgcgctggtggcgccgcagatcgcccgccgcctgtgcgccaaccgccacgtgctgctgctgaccgcgctgaccggcgccctgctgctgctggcggccgacgtcgccgcccagcggctgtttataccgtatcaattgccggtcggcgtgctgaccgtctgcctgggcggtatttacctgatttggctattaatccgtgagtcacgtagaaaatga

SEQ ID NO: 444502 - DNA, 1074 bp, Serratia marcescens
atgttccggcttacacacaattgctcgcacgctgcttcagcgccccaggaaactctatttttaggtactacgcgcgcctttcgccgccggctctacgcgctgctgttcgccgtactgattctgctgctgatgatggcgctcagcctggcgctgggcgcgcaatctatccccttctccaccgttctgcaggcattaaacggccaatgcagcggcgttgactgcgtgatcatcaccgacgcccgcctgccgcgtacgctgatcggcgtgctggccggcatcgcgctcggtctggccggcgccctgatgcagaccttgtcgcgcaacccgctggctgacccgggcattctcggcgtcaacgccggcgccggtttcgccgtggtgctgggcatgtcgctgttcggcgccaccgacatcgatcaatatctgtggttcgcctttgccggtgcgctctgcgcctcgctgctggtggcgctggtgggtgcgctcgggcgcagcacgctgaatccggtgcgcctgacgctggcgggcgtggcgctgggcgcggtgctggacggcatgaccaccgggatttctctgcttaacccgcaggtgttcgaccagctgcgcttctggcaggccggctcgctggatatccaaaatatgcaggtggtgcgcaccgtcgcgctgccgattctcctcggtacgctgatcgccctgtggctgaccaaagccctcaacagcctgagcatgggcagcgatctggccaccgcgctgggtaccggcatcgtacgtacgcagctgctcggcctgctggccatcaccctgctgtgcggtggcgccaccgccgccgtcggcccaatcgccttcgtcggcctgatgatgccgcatatcgcccgccgtctggccggctccgaactgcactggattttaccctggacgctggtgctgacgccgatcctgctgctcagcgccgatttagtcggccgtttcctggtgccgggcgagctgcgcgtctccatcgtcaccgcgctgattggcgcaccggtgctgattgcgctggtgcgtcagcgtcatatgttcaggaggagccgctga

SEQ ID NO: 444503 - DNA, 1338 bp, Serratia marcescens
atgagtcgctgccccattgcagtagcaagcgtgcaattcctttataaagctgtggtgataaaacacatgagtaagccctcgattttgcttgattttggtttgttaaagaccaatcaggcgttccgcgccgttttctgcgcgcgctttatctctattctggcgctgggattgatggcgattgccattccggtgcagatccaggcgctgaccgattcgacgctgctggttggtctggcggtgacgctggccggcggcggcatgtttgccggtctgctgatgggcggcgtcctggccgaccgctatgagcgccgtcgcctgatcctgtttgcccgctccacctgcggcgtcggttttgtcggcatgtgcctcaatgcggcgctgccggagccgtcgctgacggcgatttacctgctggcggtgtgggacggcttcttcggtgcggtgggcgtcacggcgctgctggcggcgacgccggcgctggtcggccgtgaaaatatcgtacaggccggcgccatcagcatgctgacggtacgctttggttcgattctctcaccggcggcgggcggtctgctgatcgcccacgcgggagtggcctggaactacgggctggcggcgcttggcacgctgctgacgctggttccgttgttgcgtctgccgcagctgccgccgccggagcagccgcgcgaacacccgctgaaggcgctggccggcggtttcgccttcctgttccagaataaagtgattggcatggtggcgctgatcggcgcgctgctgaccatggccagcgcggtgcgcatcctgtatccggcgctggccggcagttggggcgttgacgcttcgcaactgggctttatgtatgccgccgtgccgctgggcgccgccctcggcgccttcaccagcggccgggtggcgcaggtggcgcggccgggctggatgatgctgctgaccgccatcgctgcctttatcgccgtcggcctgtttggcctgatgccgtggtacggcctggcgctggcgtgtctggtggcctttggctatctgagcgcgctgaattccctgctgcagtacgggctgattcagaacctgacgccggatgcgttccttggccgcatcaacggcctgtggaccgcgcagaacgtggtgggcgacgcgctgggcgcgctgctgctgggggcgatgggggcgtttatgctgccggccatgacctcgaccggcttcggcttcggtgcggcgctgctgggcgtggtgctgctgttggtgatgggcagtttgcggcgggtaacgtgcagcgaaccggaggcgaccctccagcccgctgcggcgcagactagcgggaagtaa

SEQ ID NO: 444504 - DNA, 951 bp, Serratia marcescens
atgaagaagatcctgcttttggggctggcgttattggccatctcagcagcacaggcggcttccccacagtggccccgcacgattgaaacctcccacggccccgtcaccctcaagcagcccccgacgcgcatcgtttccaccagcgtgaccctgaccggcaccctgctggcgattgacgccccggtgatcgccagcggcgccaccaaccccaacgggcgctttaccgataagcaaggcttcttcctgcagtggggaaagatcgccacacagcgcggcgtgaaacgtctgtacgtcggcgagcccaatgccgaaagcattgccggcgaagcgccggacctgattgtgatttccgccaccggcggcgactccgcgctgcagctgtatgaccagctgtccgtcatcgcgccggtgctggtggtcaactatgacgataaaagctggcaggaactggcgaaagagctgggttatgccaccgggcgcgacgcccaggccgagaaactgaccgccgacttcgccgcccgcgaacaggcgctgaagcagcacatcacgctgccgccgcagccggtctccgccctggttttccgtcaggacggcaaagccgccaacctgtggaccggcgaatcctcacaggggaaaatgctgcagcagctggggttcaccctggcgcagccgccggccaacctgcacaccagcaccagccaaggctcgcgtgaagatattgttcaactgtcgggagagagtctggcggcggggctgaatggccagacgctgctgctgttcgccaatgacgagaatgacgtacagcgtctggtgaataataaatttctggcgcagctgccggcggtgcaaaataaacaggtctatgcgctcggcaacgaaaccttccgtctggactactacagcgccagcaacctgctgacgctgttggaaaaacgctttacttcccgctag

SEQ ID NO: 444505 - DNA, 1209 bp, Serratia marcescens
atggatacagccgtgaatggtgctcagcagaaggcaccgcacgcgaaagagaacgaacaggcgcaattcggtgtcgatccggcgtcaggcttctttttcacatcaccttttcgcagcctgacgacgcaagggtgctttgccactatcaccctgccggccgccggcggtgatgatatcaacggcgagtttcagcaggccgtgcgtcacgcctttgacgacgcgcgactggccggcattaaaaagccggtgctgtgcggcgcgattccgtttgatacccgccagccgtcgtcgctgtttattccgcagcatacccagtggtttgatcgcgaagcctttatggcggcgcagccggcggccgacgccgacggcccggaaattgacgctctgaatgaactgccggcgcaggcgccctttatgcagatggtcagcgacgccgtggcggcaaccgccagcggtgagctggataaggtggtgctgtcgcgcctgctggaaatcgaaacccggcagccggtcgaccgccaggcgctgatggcgcgcattatcgctcagaacccgaacggctttcatttccatgtgccgctggaagacggggcgctgctgggcgccagcccggaactgctgctgcgtaagtccggcgcgcagttctattccaacccgctggccggctccgcccgacgcgacgccaatccgcagcgcgaccgtgaggtgagtgagcagttgctggcgtcgagcaaagataacgtcgagcacgattttgtcaccgaaggcatgcgccaggtgctgactggccgctgccgctacctgaatatcccgacggctcccgaactgctgagcaccaccacgctgtggcatctgtcgacgccgatcgacggcgaagtggactgccgccgggagaatgcgctgtcgctggcctgcctgctgcaccctacgccggcgctgtgcggcacgccgacgctgaaagcgcgcgatctgattgccgaactggagccttttgaccgcggcctgttcggcggcatcgtcggctggtgcgacgccgaaggcaacggcgagtgggtggtcaccatccgctgcggcaccgtgcagggccgccaggtgcgcctgtttgccggcgccggcatcgttaaagattcttcgccggagtctgaatggcatgaaaccggcaccaagctcagcaccattttgcgtgcgtttggattgaaccaaggataa

SEQ ID NO: 444506 - DNA, 1632 bp, Serratia marcescens
atgagtattgcatttaccccgtggccggccgagtttgcccagcgctaccgcgaccgcggctactggattgaccaaccgctgaccgacattctcgatcgccaggcggacagcgacgcgaccgcactggtcgacgccgagggcagcctgagctatcgccagctgcatcaacagtcagatagtctggccgccgcgctgctgcgccgcggtattcagccgggggaaaccgccctggtgcagttgggcaacgtggtggaattttatgtcaccttcttcgccctgctgaaaattggcgtggcgccggtcaatgcgctgttcagtcaccagcgcagcgaactgaacgcctacgccgagcaaatcaaaccggcggtgctgattgcagacagcaaacatgcgctgttcggcaatgacgattttctggcgaccttccgggcgcagcacccgtcgctgcgcgtggtggcgctgcgcagccaggcgcagggcgaacagtcgctggcggcgatgctggcggaagagcgcggtgatttccgcgcgacgccgtctgcggccgaccaggtggcgtttttccagctgtccggcggcagcaccggcacgccgaaactgattccgcgtacccacaatgattactactacagcattcgccgcagcgtagaggtgtgccgttttgacagtgagacgcgttacctgtgcgcgctgccggtggcgcataactacccgatgagctcgccgggcgtgctgggcgtgttttatgccgccggtcaggtggtgttcgccgccgatccggacgccggtcagtgcttcaaactgattgagcagcatcagattaacgtcaccgcgctggtgccgccggcggtcacgctgtggctgcaggcgattgaagagtggggcggcaacgcgccgctcgccagcctgaagctgctgcaggtcggcggcgccaagctgggcgaaagcctggcggcgcgcattccggcggagattggctgccagctgcagcaggtgttcggcatggcggaagggctggtgaactatacccaactggacgatgacgatcgccatatcctcaccacgcagggctgcccgatgtcgccggacgacgaagtctgggtggctgatgacgacggtaatccgctgccggccggccaggtcggtcgcctgatgacgcgcggcccgtacaccttccgcggttactaccagagcccggcgcacaatgccgacgcgttcgacgccgacggtttctactgttccggcgatctgatccgcatgaccgaagacggctatatctgcgtggaagggcgacaaaaagaccagattaaccgcggcggcgagaagatcgcggcggaagagatcgaaaacctgctgctgcgtcatggtgcggtgattaacgccgcgctggtatcgatgccggatgcgctgatgggtgaaaagagctgcgcctattttatcgccggcgagacgctcaagccggtggtgctgcgccgtcatctgcgtgagcagggcgttgctgaatttaaattaccggaccgttttgtgcaggttgagagcctgccgctgacggcggtcggtaaagttgacaagaaactgttgcgccagcgcctgctggaagcgcagcaagccacccaggtccagggagattga

SEQ ID NO: 444507 - DNA, 756 bp, Serratia marcescens
atgagcaactgggattttagcggcaaacgcgtatgggtgaccggcgcaggcgccggcatcggcttacagaccgcgcgacagtttgcggaagcgggcgctgaggttatcggctttgatctgcggttcgccgagtcggcgtacccattccgcaccgaagtgctggatatcgccgacgccgaggcggtggatcgcgtatgcacgcggctgctggcggagcacggcgagctggacgtgttggtcaacggcgccggcattttgcgcatgggcctgaccgacgccaccagcagcgccgactggatggcctgcctgaacgttaacgccggcggggcgttcaatatgttccgccacacgctgccggtattccgccgccagcgtcgcggtgcgatcgtcagcattgcctccaacgcggcgcacgtgccgcgcgtcggcatggcggcttactgcgcctccaaggcggcgctgcgtagcctgtgccagaccgtggggctggaaatggccgaattcggcgtgcgttcgaatatggtgtcgccaggttcgaccaatacgccgatgcagcgcggcatgtggcaggatgaaaccggcgagcaaaaaaccatcaacggtttccccgagcagtttaagctgggcattccgctggggaaaatcgctcagccgcaggaggtcagcgatgccattctgttcctggcttcggatatggccggccatatcaccatgcaggatattgtgattgacggcggggcgacgctggcggcctga

SEQ ID NO: 444508 - DNA, 1143 bp, Serratia marcescens
atgaaaggacgttggggtaaatacctgctgggcgggttagtgatagcaatcttggcgggctgttcgtcaaagccgaccgaccgtggtcagcaatataaagatgggcagctggagcaaccgctggcgttggttaatcaaccgaacacccgtggcgtgccgatgaacggcgatgattacgccaaccaactgctggagattcaatacgcgtctccttctttgtttaaccgtaacagcagtacctaccaggcggtaaagagctggatggcctccggtgcggacacccgccagcttagccagttcggcctcagcgcctaccagatggaaggggcggacaactacggcaacgtacagtttaccggctactatacgccggtggtgcaggcgcgctacacgccgcagggcgaattccgctacccgctgtaccgcatgccgccgaaacgcggccgtctgccgagccgtgcgggcatttataacggcgcgctggatgaccgctacatcatcgcctacagcaactcgctgatggacaactttatgatggaagtgcagggcagcggctatgtcgattttggtaacggtcagccgctggtgttctttggctacggcggcaaaaacggccatgcttaccgcagtatcggccgggtattgatcgaccggggcgaggtggccaaggcggatatgtcgatgcaggcgatccgcaagtgggccgatagccacagcgaagcggaagtacgcgagctgctggagcagaatccgtcctttgtcttcttccgcccggaatctttcgcgccggtgaaaggcgccagcgcggtgccgctgatcgccaaggcgtcggtggcgtccgatcgatcgctgattcctgccggcaccacgctgctggcggaagtgcctctgctggacaacaagggtaaattcacgggaaaatatgagatgcgcctgatggtggcgctggacgttggcggcgcgattaaaggccagcactttgatatctaccagggtatcgggccggacgccggccacgcggctggtttttacaaccactatggccgggtatgggtgctgaagggcggcaacagcggcgcgccgttgttcagcgcctatcggccaaaggtcagtcagagcgggagcttgctggtgacgcgttaa

SEQ ID NO: 444509 - DNA, 435 bp, Serratia marcescens
atgctagcccctcaccccttcggccacgacattaccgctgcggccctgacagaaaaattcggcgcgctgaaacagtgggaagaccgctatcgccaattggtgatgctggcaaaacagctgcccacgctgccggaagcgctgcgcaacgcggagatagagctgagcggctgtgaaaaccgcgtctggttaggccatcagctgttggatgacaatcgactgcatttttacggcgacagcgaaggccgcatcgtgcgcggcctgctggcggtgttattaaccaccgtggaaggaaagacgccgcagcaactgctggccgccgatcctctggcgctattcgacagcctgggattgcgcgcccagctcagcgccacccgcgccagcggtctggaagcgctggctgcggcggtaaaggatatcgccgcgcgctatgcctga

SEQ ID NO: 444510 - DNA, 1206 bp, Serratia marcescens
atgtcgtcgtttaattcctcacttttccgccgccagtttcccgcgctggcgcagcccggcgtttatctggacagcgccgccaccgcgctgaagccgcaggcggtgatcgccgccacgcagcagttttacagcagcgaggcggccaccgtgcaccgcagccagcataaggccgctcaggatctgaccgtacgttttgaacagacgcgccatcaggcggcggcattgattaacgccgccggcgccgaagaaattgtctggacgcgcggcaccaccgaggcgattaatctggtggcgcaaagctatgcgcgcccccgcctgcagcccggcgatgaaattatcgtcagcgaggcggagcatcatgccaacctgatcccctggctgatggtcgcagagcagaccggtgcctgcgtaacaaaactgccgctgggggccgaccggctgcccgacttggcgctgctgccgacgctgctcagcgataaaacccggctgctggcgctgggacagatgtccaacgttaccggcggctgtccggatctggcgcaggcgatcgcgctggcgcacggcgtcggtgccaaagtcatgatcgacggcgcccagggcatcgtgcactgtccggcggacgtacggcggttaaacatcgacttttacgccttttccggccataagctgtatggcccgaccggtatcggcgtgctgtacggcaaaagtgaactgctggcgcagatggcgccgtggcaaggcggcggcaaaatgctgactcaggcctcgtttgacggctttaccgcgcaaaaaccgccctactgctttgaggccggcacgccgaatatcgccggagtactggggctgggcgcagcgctgagctggctggaggaacaaaatctgccggcggcggaagcctacgcacggcaattaaccgacgacgccgagcatcggttggcacaactggcaggctttcgcagcttccgttgctccggctccagcctgctggcgttcgatattgccggtattcatcacagcgatatcgtcacgctgctggcggagcaaggcatcgcgctgcgcgccgggcagcactgcgcgcagccgctgatggcggcgctgggcgtcagcggcaccctgcgcgcctctttcgccccttataatacgccggaagacgtcgacaggctggtcgacgccatggtgaatgccgtcgatctgctggcagattga

SEQ ID NO: 444511 - DNA, 759 bp, Serratia marcescens
atggccatacatctactgatcgtcgatgccctgaacctgattcgccgtatccacgccgtacaaggttctccgtgcgtcgatgcctgccgtcatgcgctgacgcagctgattcagcacagcaaaccaacccacgcagtcgcggtctttgacgaagacgaccggggcgacagctggcgtcaccagctgctgccggactataaggccggccgttcgcccatgccggacactctacagcaggaaatgccgcagctgcgcgaggcgtttgccagtctcggcgtcgcctgctggcactcccccggcaacgaagcggacgacctggctgcaacgctggccgccaaggtatccggcggcggccaccaggttaccatcgtgtcgaccgataagggctactgccagctgctggcgccccaggtgcaaatccgcgattacttccaaaaacgctggctggatctgcctttcgtgcagaaagagttcggcgtagcgccgcagcagctgccggattactgggggctggccggtatcagcagcagtaaaatccccggggttgccggcgtcgggccgaagaccgccgtgcagcttctgcagcaggcggcggatctggatacgctgtatcagcagttggatacggtgccggagaagtggcgcaaaaaactggaacagcaccgcgagatggcctacgtcagcaaacagatcgccacgctgcgtaccgatctgacgctggacggcaacctgcaacagctgcggctgccgataaactaa

SEQ ID NO: 444512 - DNA, 849 bp, Serratia marcescens
atgtcctcctatcaaaatcatcaggcattatcagggctgacgctcggtaaacccaccgcttaccacgaccagtacgacgccacgctgctgcagccggtgccgcgcagcatgaaccgcgagccgctgggcctttaccccgatagcctgccgttccacggcgcggatatctggacgctgtacgagctctcctggctcaacgctaaaggtctgccgcaggtggcggtaggagaaatcagcctcgatgccttcagcctgaatttgatcgaatcgaaaagcttcaaactctacctgaacagcttcaaccagacccgttttgagaactgggaagcggtgcgctgcacgctgttgcgcgatctggcggcctgcgcgcagggagaggtggaagtgaaactgttccgcctggatgaaattgaagggcgtcctattgcgcagctgcagggcgaatgcctggaccagcaggacatcagcatcgatgactatcagttcagcgccgactatctgcaggatgcagcagcgggcagccccgtggtggaagaaacgctggtcagccatctgctgaagtccaactgcctgatcaccaatcagcccgactggggctcggtgcaaatcgcctaccgcggcgcgcagattaaccgcgaggcgttgctgcgctatttagtctctttccgccatcataatgaatttcatgaacagtgcgtggagcgcattttcaacgatatcatgcgtttttgtcagcctgaacgcctctcggtctatgcgcgctatacccgccgcggcggcctggacatcaacccgtggcgcagcaacgtcgcctttgcgccggcgcacggccgtctggcacgccaataa

SEQ ID NO: 444513 - DNA, 330 bp, Serratia marcescens
atgaatatacataatcaggttcgcctttacttgcagactatcgaacaatccatgcgcgatctggcgctgtggcaggctacgccgccggcgcctgaggcgtttaacagcagcgaaccgttttgcattgacagcatgcaggcggaggagtggctgcagtgggtgatgctgccgcgcatgtatgccctgctggacgccaatgcgccgttgccgacgcgctttgccatcacgccctattttgaagaggcgctgaaagacaaagagcctggctgtctgccgttgttggtggtgcttcagcgcctggatgacttactgaatcaagagccgcagtaa

SEQ ID NO: 444514 - DNA, 771 bp, Serratia marcescens
atgctggagattctttatcaggatgagcatctggtggcggtgaacaagcccgccggctggctggtgcaccgcagctggctggaccgccatgaaagcgtgtttgtgatgcagacggtgcgcgatcagatcggccagcacgtttttaccgttcaccggcttgaccggccgacgtccggcgtattgttgatggcgctgtccagcgaggttgctcatctgttgtcgcagcagtttgaacagcatcaggtagagaaaacttaccatgcggtggtgcgcggctttgtcaatgaagccgcgacgctcgactatccgctgacgcaggagcgggacaagatcgccgataagttttctgatgcggataaagcgccgcagccggcactgacccactatcggccgttggcgcaggtggaaatgccggtggcgatcgggcgctatgacagcgcgcgctacagcctgatggagctgcagccggaaaccggccgcaagcatcagttacggcgccatatgacgcatttgcgccacccgatcatcggcgacagcaaacacggcgatttgcggcaaaaccgcggtatggcgcagcatttttcctgtccgcgcctgatgctgcatgccagccacctgcggcttaatcacccggtgagcggacagccgctgcagatttccgcccgttgggatcaggcctggcagggcgtaatgtcacagtttggctggctggatgttctccctgagctcgtcagggttgagtttccggcggcttacggtcaagctagctga

SEQ ID NO: 444515 - DNA, 450 bp, Serratia marcescens
atggctcaggtcggtattttcgtcggcacggtatacggtaatgcgttgttggtggcggaagaagcggaaaccatccttatcgagcaggggcacgaggtcaaactgttcgaagaggggacgctggaagagtggcaggcctatcatcagcattatgcgctggtggtgacctcgaccaccgggcagggagatttgccggacagcatcgcgccgctgttcgtggcgattcgcgatcgggtcggttatcagccggagctgcgctacggagtgattgcgctgggcgacagcagctatgacaatttctgcggcgccggccgagcgtttgatgcattgctgcaggagcagggggcgacgcgcgtaggggaagtgctggaaattgatgccatggaacagcctgaacccgaagtggtttcctgcccgtgggtagaaaaatgggcggcattgctgaagtaa

SEQ ID NO: 444516 - DNA, 390 bp, Serratia marcescens
atgctggcattacgtcaggtgcaccatattgcgattatcgcgtccgattatgccgtaagtaagcgtttttactgcgatattctgggcttcacgctgcagggcgagtattatcgcgcggagcgtgactcctggaagggcgatctggcgttgaacggccagtatgtgattgagctgttttcctttccgtcgccgccggcgcgggtcaatcgcccggaagcctgcggcctacgtcatctggcgttcagcgttgcggatattgaacaggcggtggcgcagctgcaggcggccggcgtagagtgcgagccggtgcgggttgacccttataccgagtcgcggttcacattcttcagcgatccggatggcttgccgctagaattatatgaacaatga

SEQ ID NO: 444517 - DNA, 1545 bp, Serratia marcescens
atgcaacagcctgtttttcgcgtcggagagtggctggttacgccggctgacaaccaaatcagccgtgacgggcgtcggaagacgctggagccacgtttaatcgatatgttgttctatttcgcctgccacccggatgtggtgctgagtcgggatgaactgatcgagaatgtctggaagcgtaatatcgtcaccaatcatgtggtgacgcaaagtatttccgaactgcgtaaatacctgaaagacggcgatgagcagagtccggaatatatcatcacggtaccgaagcgcggctataaactggcggcgccggtgatatggtgccgcgaagctgaagatacgccgttggcagcgcctcaggtggcggtgattatgcatgagccggaagacggcgatgatgaagaggatgcgccggtctatgtgccgccgcgcccgacgacgtcaacggcggccaaaggcagtgacaggcggttttatcagcgttcgccgttttgggtatggctgtgcttcctggccgcgctctgcgcctgcgtggcgtttgtcggtattgccacactgtcgcagcgcgtgccggtcgctaccatgccgatgctgctcaatccgcgcgatatcgatatccgcattcagggcggcaacagctgcagcaactggatgccgcagctctcctacgtggtgggcatcagcgaactgatcgccgattcactcaatacctattccacctttctggtgcatgaccagaccaactacaactactcggggccgagcagctccggcaagtcgctgaccatcgagttcgtcaaccagcgccactaccgcgcccagcagtgcttcctgtccgtgcggctggtggataatgccgacagctcaatcatgctggataagcgctattttctcactaaggataatcagcgcacgatcctgatggacctgctgagcaatatgtccgccgtactgaaacagccgtggccgccccagttggagacgcggctgaataagctgttgccgaagcaggggccggccctgcagcagttctatcaggcgcaccagctgttgattcagggcgatatggcgtcgctgacgcgcgccagcgggctgctgagcgacctgatgaagagctcgcccgatttcctgtatatcgccgcggaaaaaacgctggtcgatttattgcgtaattcttatcagccgttcgacggcgagcagttggctcagctgcaacgcgatattcagcagttggcctcggtgccggaattacaagacagcccgatcctgcagcagatatataccgtagaggcattggggcaagggcaggttgacgaggcgcatcaggcaattaataaagcgattgatgtgcagatgtcatggctgaattatgtgctgctgggcaaggtatatgaaatgcaggggcaaaatcatttggccgccgactcttatattaccgcgtttaatctacggcccggtgaaaatacgctgcactggattaataatggaatatttcagacatcggtaagcaccgtggtgccttatctgaacaactacgccaagcaataa

SEQ ID NO: 444518 - DNA, 1461 bp, Serratia marcescens
atgcaaacacccacacagccgcgcgcaatctactatgtcgtagcgatacaaatttgggaatatttcagcttttacggcatgcgtgcgttacttattctctatctgacccaccaactcggctattctgacggccatgccatcgagctatacagcgcctacgcttctctggtttacgttacccccattctcggcggctggctggccgaccgcctgttaggcaaccgcgcggcggtgattgccggcgcggtgttaatgacgctcggccatgtggtgctgggcttcagcggcgcatccagccaggcgctttatctggcgctggcgatcattatctgtggctacggcctgtttaaatcgaacatcagttgcctgctgggggagctgtatcaaccgaatgacgcacggcgcgaaggcggtttttctctgctgtacgccgccggcaacgtcggctcgatactggcgcctatcgcctgcgggctggcggcggaacgctatggctggcatatcggctttgcgctggcggggatcggtatgtttgccggcttgacccttttcctgtgcggcgggcgtcattttcgtggcgtgcgcggcgtcaacctggtacagctgcgagccgtctgctggggcgtgccgaactggggctggttggctgcggcgttactgcttgcgccgctgtttttcacctttctgttgatctatggtttgtccggctacctgttgatgctggtctgttcggtggctgtggtgtggctggcgcgcattctttggcgggcggacgccgaccagcgccgggcgctgtggcaaattatcacactgatgctgttggggacgctgttctgggcctttgcgcagcaggggggcagttctatcagcctgtttatcgatcgcttcgtcgaccgacgctggttcagttggacggtgccgaccgcgttgttccagtcgatcaacgcgctggcggtgatgttgggcggcgtggcgctggcctggctggggagcagcggtgaaacagggcgtcgtgcgctgcgtacttggtgcaagttcgcttttggcctgctgctgatcggcagtggttttatgctgatggcgatcaatgcgcggctggggcagttaggtaaacagacctcgatggggatgatgattgccgggctggcgctgatgggtgcggctgaactgtttatcgatccggtggcgatggcgcagattacccgtctgaacattcccggcgttaccggtgtgctgaccggtatttatatgctggcgaccggcgcggtagccaactatctggcgggcgtgattgccagccataccgtggagcagcagaccagcggcgccgccgtgcaggcctatgcgcaatttttcgctcaggtgggttggtgggccggcggcagcgccagcgtgatgattgtgctgctgggcggctggtggctgctggcgcgccgtcaaacgcgggcggttaatgcttga

SEQ ID NO: 444519 - DNA, 1311 bp, Serratia marcescens
atggacagcaatcaattaatcacccgggtggcggagcagttgggaacgtgccggcagttgctactggctttcagcggcgggctggattccagcgtcctgctgcatgtgctgacgcaactgcgtcgccggcatcctgagttgcagctgcgcgcgctgcatgtgcatcacggcctgagccggtttgccgaccgctgggtaatgcactgtcagcagcagtgcgatgcatggcgggtgccgctgacggtgcgtcatgtgcagcttgatccgcgcgccggcggtattgaggcggcggcgcgcgatgcccgctatcaggcgttgcagacggcgttgcagccgggagaaagcctgctgaccgctcagcatctggatgaccagtgcgaaacttttctgctggcgctcaagcgcggcagcggcccggccggattgtcggcgatggccgcctgcggcgcgctggggaaacatgttttgctgcgccccttgcttggcgtcagccgtcagcaactggagcactatgcaaaacagcatcagttggactggattgatgacgacagcaatcaggatgcgcgtttcgaccgcaactttttacgtttgcagattttaccgttgctgcaacagcgctggccgcactttgccgaagcgacggcgcgcagcgccagcctgtgcgccgaacaggaacagctgctggatgagctgctggcggagcagctgcagacgttgctggacgatgagcgatcgctggcgattgacggcttgagcgcctgctccgccgcgcgccgctttgccctgttgcgccgctggatcgcgggctttgcggtcagcatgccggcaagagaacagctgcagcgggtgtggggggaagtggcgctggcccgccgtgacgccgagccgcagctgcgtctggggaactatcagattcgccgcttccgccagcggttatacctgttgccgccgctggcagatttacgcgatcaatgcctggcctggccggatgaggcgccgctggccctgccggacggtcttggcgtgctcagccgcgagggcggcccggataccgtgcgggcaccgctgccgcagcagcgcgtcagcgtacgcttcggcgtcagcggcaccctgcgcatcgtcggacgggcgcattcgcgctcggcgaaaaaactgtggcaggagctgggtattccgccctggcagcgtgaacggatccccttactctattatgatgatcaactgattgccgcgcccggcgtttttattaccgaggcggggcggccgcagccggaacaggcgttctggtcgctgcggtggcagaaaacctaa

SEQ ID NO: 444520 - DNA, 315 bp, Serratia marcescens
atgaaatttgtgagcgttgttattgcagcagccgggctgctgagcctgccggcgctggccgccggcgatgcggcggcgggcaagaataagtccgccagctgtctggcctgccatggcgcggcgggtaaggtatcggtgccgatgtacccgaatctggcggggcaaaatgccctgtatcttgagcatgcgctcaaggcttatcagagcggcgatcgctccggcggtcaggccgaggtgatgaaggcttacgtctccggcctgtcggacgcggatattgcggatttggcggcgtattacgccagtctgaagccttag

SEQ ID NO: 444521 - DNA, 549 bp, Serratia marcescens
atggcactgaaagcgacaatttataaagccacggtcaatattgcggatatggataggcacttctatcacgacgccgcgcttacccttgctcaacacccttcggaaaccgggcagcgcatgatgctgcgcctgctggcgtggatttgccatgccgatgagcgcctgacgtttaccaaagggctaagcgccgatgatgagccggagctctggcagcgcaatgaccacaacggcctggagctgtggattgaattggggctgccggatgagaaacgattaaaaaaggcctgcaaccagtcaccgcgcgtggtgctgtatgcctacggcgagcgcgccgcccaggtctggtggcagtcgatgcagagtaaggttgctgcttaccgcaacctcagcatccgctttttaaatgacgaacatctgacccggctggcggcgctggccaaccgcaatatgacgctgcaggcgacactgcaggagggaactatttggttgtccgatgctcagagtagtctggaaatccagtttgccgaatggcagcaggccggagagtaa

SEQ ID NO: 444522 - DNA, 414 bp, Serratia marcescens
ttgctggaattgtcacgaagcgtggccattgcggaccatgagattgtgctgacggccatccgagcgcagggggcgggcggccagcatgtgaacaaagcctcaacggcgatccatttgcgctttgacatccgggcctccagcctgccagagtattataaagaaagattactggcctttacgcatcatctgattaccagcgaaggggtggtggtgatcaaggcgcaggagtatcgcagccaggaattaaatcgtgaagcggcgttggcgcgactggtggcgttgatccgtcaggcgatggtggtagaaaaaacgcgccgcccgacccggccaagcaaaggcgcacagcggcgtcgcgtggaaagcaaagtacgtaaaggcgcaaccaaggcgttacgagggaagattcgtccctga

SEQ ID NO: 444523 - DNA, 684 bp, Serratia marcescens
gtgaaaaaaataactattgccctgttattagccgcagggacgctgtcattgttcggttgtaacaaccattaccagccaaaagagcaggcgctgcagcctatgaagcagagctatcagggcgtattgccgtgtgcagactgcgaggggctggatacgtcgctgttcctggatgaagacggcactttcgtgctgcaggaaacctaccgtggcagccgtgacggtgataaaaccttcgccaactacggcaaatgggcgcgcacggcggacaagctggtgctgaccgacagcaacggcgataagcgctatttccatccggtggggaaaaatctggagatgctggaccaaagcggcgcgccgattgactccaagctgaactatcagctgcagccggtggaaaaatccttgccgaaaacgccgatggcgctgcgcggcagctacacctatatggcggatgcagcagtgtttaaagactgtgcgactggtaaaaccttcccggtggataacaacctggcgctggagcgcggttacgccaacagcggcgttgaaggcggcgagccggtattcctgatgctcagcggccacttcagcgtacagccgtcgatggaagaggggatgatggagaaagcgctggtgccggatggcaacatcaagtttgataaggccaaaggctgcgacagcaaataa

SEQ ID NO: 444524 - DNA, 708 bp, Serratia marcescens
atgagtgaatttgttgtcaatcagatcggaactatccgctcgccgtataaagaaaaattcgccgttcccaggcaaccggggctggtagaagacggcggcggcgagttgctgttgctgccgccttacaatcaggccgaagcagtacgcggccttgaggcgttcagccatctgtgggtgatgtttatttttcaccaaaccatggatggcggctggcgccccaccgtgcggccgccgcgcctcggcggcaatgcccgcatgggcgtgttcgccacccgttcgaccttccgccccaaccccatcggcatgtcgctggtcgagctgaaaaaagtgcgcattcagggcggtgaggtcgtactggaactcggcagtctggatctggtggatggtacgccggtggtggatatcaaaccctacctgccgttcgccgaaagccagccgcaggccgtggccggctttgcccaggcggcgccggcggcggatatgcccgtcagcttttcaccgctggcggaacagcaactgctgcagcaacaaacgcgctaccctcagctgcgccgtttcattacccaggtgctggcgcaggatccgcgtccagcctaccgtaagggggaagatacagggcgagattatgccgtctggctgctggacttcaacgtgcgttggcgggtcgtcgccggcatgaccgaggtgctgtcgctggagccgcgttaa

SEQ ID NO: 444525 - DNA, 564 bp, Serratia marcescens
gtgacacaaagcgttccagctatttttttagatcgtgacggcacgatcaatgtcgaccatggctatgtccatgaaatcgatgacttccaatttattgatggtgtgatcgatgcatgccgtgaattaaaaaacatgggctttgcgttggtgctggtaaccaatcagtcgggcattgcgcgcgggatgttcagcgaagagcagtttatgtatctcaccgaatggatggactggtcgctggctgaccgcggcgtcgacttcgacggcatctatttctgcccgcatcacccggagggaacggtagaagagctgcgtcaggtgtgcgactgccgcaaaccacagccgggcatgctgctgcaggcgcagcaggaactgaatattgatatggccgcttcttatatggtgggcgataaaccggaagatatgcaggccgccgccgctgcgggtgtcggcatgaaagttctggtgcgtaccggcaaagcggtaacggcagaaggggagcaacaggccgattgggtgttaaatagtctggctgagctgccgcaggcgataaaacagcgggtttaa

SEQ ID NO: 444526 - DNA, 1842 bp, Serratia marcescens
atgagacgattactgacgactttggtgattttactggtagtgctggtggcagggatgtctgcgctggtgctgctggtcaacccgaatgaattccgcagctacatgatcaaaaaggtcgaacagcgcagcgggtatcacctgacattagacggtgatttacgctggcacgtttggccgcagctgagcattctgtccggccgcatgacgctgaccgcgccgggcgccaaagcaccggttgtcagtgcggacaatatgcgtctggatgtcaaactgctgccgctgatctctcaccagctgttcgtaaagcaggtgatgctgaagaacgcggtgattcgtcttacgccggactctgaagagcagagcctgccggatgcgccgattgcgccgggcggcaacaatgctgaagagtcacccgccgcgagttggaaattcgatattgataatctgcaggtggtggatagcctactgatttggcagcgcgccaataatgagcagattaacgtccgcgatatcaacctctcgctgcagcgcagcggcgaccgccaggcagagctggaactgaacagccgtatcaatcgcgatcagcgcgatctgagcgtcaacctgacggccgagctggatctgagccagtatccgcgtcaggccagcgccacggtcagccagttcaactatcagcttgaaggcgccgatattctggtgggcggcattaaaggtcaggggacgctacaggcgctgtatcagcagacgccgcgccgggtgacgctcaaccagctgcagattagcgccaacgacagccagtttgcaggcagcgccagcgtcggtcttggcgatattcctgactatgttctgaacctgagttcgccgaacctgaatctggacgcgctttccggctggcataacagtagcggcggcagcgacgcgcagccggtgcgggcgatgaccgccgggccggtgattgccagcggcacggagcagcagcgggatctgcaggcgctgcgtgattttgatgccaagcttgacttgagtgccgagcggctgacttaccgcggtatggatatcgcgcatctgaaactgcaggccgataatcagcgcggcaacgtgacgatgccaaccctgaaagggcaggttgccggcggtgatttctccttacccggctcgctggacgtgcgtggcgataaaaccgtcgcccaggtacagccgcgtttgcagcagattgacctagcgacagtatttaaagcgtttgatattccatcatttatgaccggaaccctgacgatgaacggcgcactgagcggcgatcgtctggccgtcgacgccttgctgcatagctggcagggcagcgcgcagctggcggtggccaatgcccaattgcacgggctgaatattcagcaactgattcagcaggcggtggcgcgcaatgagcggggcgtgcgtgggcaggataagtaccagcgctataccgaggtgcaacagctggcggccaaggcgaacctgaaccacggagcggtgacgctgcgtgaactgaatgcgcagtcatcgctattgaactttaacggcggcggccagctgaacctgccggagaagcagtgcgacattacgctgaacgtacaggtgaccggcggctggcagggaagcagcaaactgatagaacagctgcagaaaacgccgatcccgttgcgcgtgtacgggccgtggcagcagttgaactatcagctgaaggtcgatcaggttctgcgtaactccttgcaggatcgcgccaaggatgcgctgaacaaatgggccgaaaagaataaagagtcccgcagcgggcaggatctgaaaaaactgctcgataagctgtaa

SEQ ID NO: 444527 - DNA, 636 bp, Serratia marcescens
atggagaatttcccgttggattggcattttctgacctttttcggcgacagtatgctgctgctgcccaccgctttcattttgttcctcgtcttgctctcttcggccgcgacccgccgcgccggctggcagtggggctttatcttcggcggcgtcggcgcaatcgtctgcgcctccaaactggcctttatcggctggggcatcggcagcgccgagtacgactttaccggcttcagcggccattcggcgctctccgccagcatctggccggcatttctgtggctgataagcgccggcagccgcccgctgctgcggcgcatcgcggtgctgctgggctatctgctgccgctcgccatcggctggtcgcggctggtcatccacgtccactccacctctgaagtggtcaccggcctgatactggggctctccgccagcacgctgttcctgctgctgcagcgccgcagcagcccgccgcggcttggcgcggtcaaaaccctgattctgctggcgctgccggtgctcttgatgggtcaccgccagccggcgccaacgcaaagcctgctggaaaaaatagcggtcaccctggcggatcgggagcgcccctatacccgagcagatttgcataaccttctgaaataa

SEQ ID NO: 444528 - DNA, 1236 bp, Serratia marcescens
atgaagggattccccccgctgatcaatacgctgttggccacctcgctggtgctgaccatcggccgcggcatcacgctgccgtttatcgccatttacctgagcgaacacttccgtctgttgcccactggcgttggcatcatcctcggctgcagcctgagcatcggcatcatcaccagcctgtacggcggctatctggtggacaagttcagcaaaaatacgctgatgatcgccgccatcctgctgtacgggctgagcttctttctgatgccgtcgatcgcacggcccggcggcatggtggcgattctggcggtattgcataccacctattcggtgctgaatattaccatcaaggcctgttttgccgaatggctaccggttgcgcagcgtacgcgcgtcttctccatcaactacaccctgatcaacgtcggctgggcggtcggctcctcgcttggcgtctgggtagccggcttcggggttctgctgccgttttacctgtccggcggcctgacgctgctggtggttatcgtgctgcatttccgcctgcggcagccgcaacaaccgccgaaaacggcaggcaccaccgcgcccctgcctgccaactttcgccagacgtttggcatcctgcgccgcgaccaccggctgctctactttaccctcggcagtacgctgggcgcggtggtattcggtcagtttaccggctatctgtcgcagtatctgattatcgccaccagtgcagagttcgcgtaccgggttatcgggctggtgatgctggttaacgcctgcatggtgatcgcgctgcagtatctgatgagccgcggtatgcgtcaggacaatatgctgcgctggctggcattcggcacgttattcttcgcgatcggcctgctgggcttcgccctggccgggcactcgttgtggctgtgggcgctggcgatggcggtcttcaccctgggcgaaattatcgtcatcccggtggaatacatgtttatcgactttattgcgccggcgcacctgaaaggcagctactacggcatgcagaacctcagtaacctcggcggcgcgatcaacccggtgctgtgcggttttctgctcagctacgccgcaccgccgctgatgtttgccatgctgatcgccgcagcgctgttcagcctgttgttcttttgcctgggccaccggctggcgcagcgtcagtcggcgcagccgttggtcgaacaggagtcatctacaattaacccataa

SEQ ID NO: 444529 - DNA, 408 bp, Serratia marcescens
atgaacaagatgctcacatcatgttggcaataccttagagcattcgctttgatttatctgtgtctgctggtcggcaatgcggtttccgccctgctgccgatcgccattcccggcagtatcctcggcatgctgctgctgttcgccctgctggcctcgcagctgctgccggccgcctgggtgcgccccggctgcaacctgctgatccgctatatggtgctgctgtttgtgcccatcggcgtcggcgtgatgcaatattaccgggagatcttcgaccatctggcgccgctggtggttgcctgcgccgttagtaccctgatcgtactggtgacagtgggctactcctcccactatttccatcgtgaacggcctctggtcggcaaacaggataatgccgagggggataagtaa

SEQ ID NO: 444530 - DNA, 885 bp, Serratia marcescens
atgcatccacgttttcacaccgctttcagcaccctgcccgacacattgcaatccgccctgcagccttatctggacgcacctgactttccggccatgttcagcgccgatcaggttgaagcaatcaagcagcacagcgggctggacgatgatgccctggcgtttgccctgctgccgctggccgcggcctgctcgttaaccccgatttctcagtttaacgtcggcgccatcgcccgcggcgtcagcggcaacctctatttcggcgccaatatggagttcggcggcgcgccgatgcagcagacggtgcatgccgagcagtgcgtcgtcacccacgcctggctgcgcggcgaaacggcgctggccgccatcaccgtcaactacaccccgtgcggccactgccgccagtttatgaatgagctgaacagcggcggcgatctacgcatccagctgccgggccgtccggccgccacgctcagccactatctgccggattcattcggcccgcgcgatctggatattcacaccctgctgatggacccggaagatcacggtcaccggctggcgctgagcgacgcgctggagatcgccgcgctcgacgccgccaaccgcagccacgcgccctatagccaggcccacagcggcgtagcgctggaaacggcggacggcaacatttacgccggccgctacgcggaaaacgccgccttcaaccccagcctgccaccgctgcaggccgcgctggttctgctgaacatgtccggcggcgactgccggcaaatccgccgcgcggtgctggcggaagcgcagaacgccgttttcagtcagcaagacgccacccgcgccctgctggccgcgctcggctgccagacgctgcaacatctcaccttctaa

SEQ ID NO: 444531 - DNA, 1182 bp, Serratia marcescens
atgaaccctcctgcatcggcgccgctgccgcgtattgccactctggactgcgcgcgcggcatcgccattctcggtattttgctgatgaacatcagcgcctttgggctgccgaaagcggcgtatcttaacccggcctatcagggccagcctgcactgtctgacgcctgggcctgggcgctgctggatctgtttacccaggccaaatttttggcgatgtttgcgctgctgttcggcgccgggctgcagctgctgttgcaccgcggcaaaggctggatccgcgcgcgtctgacctggctggtgctgttcgggctggggcacggcatctttttatgggacggcgatattctgctggcgtacggcctgatcgggctggtgtgctggcggatgatccgcgaagcgaaagacacctttaccctgctgaaaaccggcgcggtgctgtatggcatcggcgttacgctgctgctgctgttaagttttgccaccgatggtacgccgggcagtttctggcagcccggcccggccgagctgcagtatgaacagctgtggaaactgcagggcgggtttgaggcctggcgcaaccgggtggatctgctctcatccagcctgctggcgatcggcgcgcagtacggctgggaactggcggggctgatgctgttcggcgccggtctgatgcgcagcggctggctgcgcggccactttgcgccggcgtactatcggcggcaggcggcctggctgattccgctgtcgctgctgatccagctgccggcggtggcgctgcagtggcacctgcagtgggattaccgctggagcggttttctgctgcaggtgccgcgcgagctgggcgcgccgctgcaggcgatgggctatctggcgctgtgctacggcttctggggacatctggcaagatggccggtcggacgttggctgacgcaggtcggccgtatggcgctcagtaattatctgctgcaaacgctgatttgcaccacgctgttctaccgttttggcctctaccagcagcttgaccgttggcagctggtggcgattgtgccgctggtgtggctggcgaacctgtgtttttcacagctgtggctgcgctattttgaacaggggccggcagagtggctgtggcgtcggctgacggcgctcggcgccggcgagggagaacgccatctgcggcgttag

SEQ ID NO: 444532 - DNA, 1191 bp, Serratia marcescens
atgtatgacgtaatcattatcggcagcgggctggtggggctgggcgtcgcccatgcgttgcaggaacacaatccgcacctgaaattgctgattgtggataaagagtccggcccggcggcccaccagagcggccataacagcaatgtggtgcactccggcatctactataagcccggcagcctgaaggcgcgcctggccaggcagggcaaccagagcatgtttgccttctgccgtcagcatgagctgtatcatgaccgctgcggcaaggtgattgtcgccacacagttgaaggagctggagttgctggagaatatctaccggcgtggtctggagaacggcctggcggtgcaccgcctgtcggccgccgagctgcgcgagcgggaacctcatgtcaacgggctggaggcgctgctggtgcccgacgccggcatcgtcaactatgcgcaggtggccgccaaactggcggacatcatccggcagcgcggcggtgagattcactttgaccggcaggtggtggggatcgcggagcgcagcgacggcgtcgaggtgcagacgccggggcagagctatcagggaaaatggctggtcaactgcgcggggctgttcagcgaccgcattgccaaactggcgggctatgacaccggcatgaaaattgtgccgtttcgcggtgaatactttgtgctgaacagtgaaaaaaatcatctggtcaatcacttgatttatccggtgccgaacccggactttcccttcctcggcgtacatttcacccgcatgcacaacggcaagcgggacgtggggccgaacgcggtgctggcattcaagcgcgagggttaccgcaaatgtgacgtcagcctgcgcgatctgggcgaagtgctgagctatcgcggcttttggaagattgccggccagtatatgggggaagggctggcggaggtgcggcgctcgctgtcgcgccgccggtttacggaaaatgcccgccagctgattccggcgctgcaagagcaagatattcaacccggccccgccggcgtccgggcgcaggcgctgaccgctgacggcaagctggtggacgacttccacttcgtgaccggccgccgttcgctgcacgtgtgcaatgcgccttccccggcggcgaccgcttcgctggagattggccgcgaaatcgtacgtcagcatcttgctcacctgtaa

SEQ ID NO: 444533 - DNA, 717 bp, Serratia marcescens
atgatcaataaagtcaccagacgaaaagcgtctcaccaggtactggcgcagctcaaggcgggcatccatgacggtacctatccggtgggaaacaagctgccgtcggaaaatgaactggccgacgccttcggcgtcagccgtgcgccggtgcgcgaggcgctgggtattctggaagtcagcggcattatctcttcccgccagggcggcggccaccgggttgagcagcattcgctgctcagcaagtacgaaccgctggtgatggaggtcgctgaccgcagcgaggtggagtcgctgctggagatgcgcgaggtgatcgaacagcaggcggcggccatggccgcgcagcgacgcaatgcgcaggacctgcagaatatcgagcaggctttcctggacttccgccataccacgctgcacgaagggcagatcggccatcagcaggattatctgtttcaccgcgccattatgcaggcttcacacaatccgttttttgtccaaatcctcgacaacatgcatgagctgtatctcggcgtgctggtgtattcgctcagtcacaacctgggacgggccgacgagcgtcagcgggtgatcgatgaacatgaacgggtgtggctggcgattaaggccggcgatgcggcggcggcggccggcaatatgcaacatcacctgagtaacgtgcgcggcaagctgcgcaggctggaacaagagggaaaggcataa

SEQ ID NO: 444534 - DNA, 1956 bp, Serratia marcescens
atgaacaccacgcccttgacgccgcagccggatacctcgctggataaagaggcgggcgccggcagccgcccgctggccggacgctatgcgctgttcgccaccgtgctggcgatcgcgatttcgctgtacgccgtttattccaacgcgttggccaatacccaggagttttatcgcaataccactttcctgaccgggattctggtgctgggctttattttgttcccgttctccaaaaagcacgcgacggccaaatttaacgcctgggactatctgtttatcgtgctgacgctgatcggctacggctatttctattttaactatctcgacctgcacgtggtgcgcaagagcctgcccaataccaccgattacctgatggcggcgctgggcatcggcgtactgtttgaggccgcacgccgcaccaccggcctgtttattcccagcctggcgacgttcgccattatctatgcgctgtttggccagtattttatgggcatcttcggccacagcggtttttcggtcgagcgattgctgtaccggctgtttatgaccagcgaagggattttcggcattaccctgtcgaccgccgccactgcgatcgcggtgtttattctgttcggcgcgttcctcagcgtcagcggcgcgacgcagctgtttaacgatctggcgctggcggtggccgggcgtcgtcgcggcggcccggcgcaggtggcggtgatctcctcggcgctgaccggatcgctgagcggcagcgcggtcgccaacgtcgccaccaccggcacctttaccattccgctgatgaaaagcatcggactcacgccaaaattcgccggtgcggtcgaggcgacggcgtcaaccggcggcatgatcatgccgccgattatgggcgcggcggcgtttatcatggccggcttcctcggcatctcttacaccaccatcgtgattgccgccatcgtgccggcgctgctgtactacgcggcgctgattatcgccatcgatctggaggccaaaaagcaggggctgaagggcatcagtaaggaaaatatcccgcaggtgaaagcggtgctgaaggcgcgcgggctgctgctgttgccgctgtttatcgtgattggcgccttactgctgggtaaaacgccgatttacgccggctttctggggatcgtcgccattatcgccgccagctggctgacgccggacagcgcggtgcgtatgacgccgagaaaaatcgccgaggcgctgaatgaagcggccagaggatcgattcaggtgaccatcgcctgtgcggcgatcggggtgatcatctgcgtagtgaccatgaccggcatcggctcgaccctggcgtttaatattgtgtcgatgaccaacaacacgctgtggatgattttgctggtggtgatgctggtgtgcatcgtgctgagtatggggctgccctccaccgcgctgtatatcgtggtggcggtaacggtgtcgccgattctgatcaaggccggcgtgatgccgctggcggcgcatttcttcgtgttctggtttggcgcgctgtccaatatcacgccgccggtggcgctggccagctataccgccgccagcattgcccgcgccgatccgatgcaaacctcctgggaggcggtgcggctggcgctgcccggttttatcatcccgtttattctggtgtataacccgatgctgctgatgcagggggaagcggtgaatgtgctgtcggtgatccatatggtggccaccgcgctggtgggcatctatgcgctctccattgccagcgccaacttctggctgatgaaggcccactggctggagcgcgtgctgtttacctgcgccgccattctgctgattaagccggggctgatgaccgaccttggcgggctggcgctgattatctctgccggcaccctgcacctgctgcgtttcagacggcgttcggccgcgccggaggagtcggcatga

SEQ ID NO: 444535 - DNA, 1041 bp, Serratia marcescens
atgaaaaatagaaaaatcaaactgttgctgttcgcctctgcggccgttgccgtggcggtactggcggtcgtcggcaaaatagagaatgaaaacaagacattcctgtccgtagcgaccgcctcaaccgggggaacgtattacccgatgggggtcggcctggctaatgtctggagcacccggctgaagccggatggtattcaggtgaccgggcagtcttccgccggctcgatcgagaatatcgatctgctgcagaaggatgaggcccaactggccattttgcagagcctgctggcggttgaggcctatcagggcgtggggaactttgccgggcgcgcctacggcgacctgcgctctatctccatgctgtggcccaacgtcgagcattttgtgatgctggaaagtaaggtcaaggacggcacgctgaacgacatcgccggcagccgtttctcggtggggccgcaggccagcggcacggagcagtcgacgctggttatcctgcgcggcgtcaacatgagcaagaaaaacatttcgccggaatacctaggctatggcgacaccgtctcggcgatgcgcgacgggcggcttgacggcggcgcgctgcctgccggcgtgcctgccgccgcagtgaccgatatgtacgccagcggcgtgccctcgcgcattctggaagtgaccgatgagcagatggccagcattaacgccgtcgccaacgcctggttccgcttcgtgattgcggcggatacctacccgcggcaaaccaaagcggtggcgaccatcgcgcagcctaatattctggtcaccacgcgcggcattgatgacaagattgtctatgacctgaccaaggcgatgtttgagaacctgccggaagtgcatcaggtgcacagcgcggccaaaaacatctcgctggaaaatgccctgaaaggggtgtcggtgcctctgcatctgggggcgtacacctatttccgtgaagccggggttaatatccccgccgagcttattccaccagaagcgcgcgccgatcgcgctacggaggcgctatga

SEQ ID NO: 444536 - DNA, 1158 bp, Serratia marcescens
atggcgctcaaaatagccttaagcggctttatcgctttaattgtagcaatgggcatcggccgcttcgcgtttacgccgcaggtgccgctgatgattgtcgaacaccagttaacgctgaccagcgccgggctggtggcggcgctgaactatctgggttacctgtgcggcgcctatgacgcgatgcgcgccagccgccacgttgaacgccgcctgtggctgggcgtgtggggcgcggtggcgctgacgctgctgtcggcatgggcggaaggcgcagtgtggcacggcgcgctgcgttttgttatcggttgggccagcggctgggcgatggtgctggtggcggcctggaccaacgagcgtctggcgcactacggccgcccggcgctgagtgcggcggtcttcgccggccccggcgcgggaatttttatcagcggcatgctggcggtggccatccacagcctggcgctgagcgcggcgcaggcctggctgctgtacggcgtggcggccctggtgttggtagccactatcagcttcagcctgccgcgcgcgggggagatgcagcgcgctgaagcggcggcggagccgctgcggctgacggcggcgctgaaacggctggtgtggagctacagcctggcgggcttcggctatattctgccggcgacctttttgtcgcagatggccgccgagcgttttcccggcagcctgttcgcccagttcgtctggccgattttcggcggtgcggcggtgctggggattatcatcggcatcctgacccgccatcgcctgaccacccagagccggctggcgctgacgctgtgggtgcaggcgctgggcgtactgtgcgccgaagcgctgccgggcgtcagcgggctgctgttgggggcgctgttaaccggcggcggtttcctcagcgtggtgcagctgtcgattcagcacggccgcgagctggcgccgaaccatgcccgctatatggccgggctgctgaccaccggctacgccgtcggccaactggcggggccgatgctgtccgcgctttccaccgcgctgacccagagcctggagccggcgctgtatgtggcgacgctggggctggtggtggccgggctgctggtgatcaaaatccccgcacgcgccgcgcgacgccagctggcgggggagtga

SEQ ID NO: 444537 - DNA, 1533 bp, Serratia marcescens
atgactcagaaacgtagtgtattggccgttgccgtgctgctggccgcggtcggcagcagcccggcgtgggcggcgaaggatgcggtgatcgccgtggcgtccaatttcacctcgctcgacccttacgatgctaacgacacgctatcgcaggcggtggcgaagtcgttctatcaggggctgtttggttttgataaggatatgaagctggtcaacgtgttggcggacggctatcaggtcagcgacgacggcctgagctataccatcaagctgcatccgggggtgaagttccacgacggcactgactttaacgctgaggcggtgaaggcgaacctggaccgcgccagcaatccggacagtcacctcaagcgctataacctgtttaagatgatcgacaagaccgaggtgatcgatccgctgacggtgaagatcgtgctgaagacgccgttctcggcgtttatcaacaacctggcgcacccggcggcggcgatgatctcgccggcggcgctgaagcagtacggcaaacagatcggtttccatccggtgggcaccggcccttaccagtttgaaacctggaaccagaccgacttcgttaaagtgaagaaatttgccggctactggaaggcggggcagccgaagctggacagcatcacctggcgtccggtggtggataacaacacccgcgcggcgatgctgcaaaccggcgaggccgactttgcgttcccgatcccgtacgagcaggccaaggtgctggagaaaaacgccaagctcaatctggtggtcgcgccgtcgatccagcagcgttacatcagcatgaatgtgacgcaaaagccgttcgataacccgaaggtgcgccaggcgctgaactatgccatcaacaaagaggcgctgatcaaggtggcctttgccggctatgccgcgccggcgcaggggccgctgccgccgaccatcgacttcgccgcccgctatcagccgtggccgtatgacccggccaaggcgcgcgaactgctgaaagaggccggttacccgaacggtttcagcaccacgctgtggtcatcccataaccacagcaccgcgcagaaggtgctgcagtttacccagcagcagctggcgcaggtgggcgtgaaggtgaaggtcaccgcgatggacgccggccagcgtgcggcgcaggtggagagcgtcggggtgaaggacaccggcgtgcggatgttctataccggctggtcggcttccaccggcgaggcggactgggcgctgtcgccgctgtttgccagccaggcggcgccgccgaaacagttcaacaccgcgttttatagcaatccgcaggtggataaggacttgagcgatgcgctggcgaccaccgaccgcagcaaaaagcagcaactgtataaggacgcgcaggatcgcatctgggccgacgcgccgtggattttcctggcgaccgagcgtctgctgtcggcgaacagcaagcagctgagcgggttctacgtgatgccggacacctcgttcagctttgacgacgccgatctgaaataa

SEQ ID NO: 444538 - DNA, 960 bp, Serratia marcescens
atgagcaaaccagtgattgccattcacggcggcgcgggcgcaatcagccgtgcggcaatgaatgcggagaaagagcaacagtatattcaggcattatcgtccgtggtggcggccgggcaggcggtgctggccgacggcggcagcgcgctggacgcggtgaccgaggcggtcaggctgctggaagagtgcccgttgttcaacgccggcaagggcgcggtgttcacccatcagggcacccatgagctggacgcctgcgtgatggacggccgcggctgcgacgccggggcggtcgccggcgtcagccgggtgcgcaatccggtgctggcggcgcgcgcggtgctggaacagagccagcacgtgatgtttgcctgcgacggggcggaaaaattcgccgccgcccacggtctggaaatggtggagccggaattcttttttacccaggaacgcttcgatcaactgcaccgcgctcaggcggagcacggccgggtgctgctcgatcatgacggcgccgcagcgctgcatgacgatcctatcgatcccgatcgcaaattcggcaccgtcggcgcggtggcgctggacgccgccggcaatctggcggcggccacctcgaccggcggcatgaccaacaaacaggcggggcgcatcggcgatacgccgatcgtcggcgccggctgttacgccaacaatgccacggtggctgtttccaccaccggcaccggcgaaaccttcatgcgcggcgtcacggcctatgacgtttccgcgctgattgagtacgccggcctcagcctgcaacaggcgaccgacaaagtggtgatggagaaactgctgcagctgggcggcagcggcgggctgatcgccgtcgatcgccacggcaatatcgcgctgccgtttaacagcgaaggcatgtaccgcggcttcggctatgtcggcgatgccccttcggtgggcatctaccgttaa

SEQ ID NO: 444539 - DNA, 537 bp, Serratia marcescens
atgcataagcaggtgatagatttctggtttgaagagattgatccggcgatgtggttccgcaaagacgatgacttcgatcgtcagctgcatcagcgtttttccgcactgtggcatgcggcggcggcgggggagctggccgcctggcgcgatagcatcgaaggccggctggcggaggtgatcgtgctcgatcagttcagccgcaatctgttccgcggtacgccgcgctcattttcctgcgacggcatggcgctgattctggcgcaggaggcgatacgcagcggcgagtgcgaacagctgacgccggtgcagcgcggctttctttatttgccgtttatgcattcggaatcgccgctgattcatcagcaggcgctggcgctgtaccaggaattaaataaccccgaacagctggattatgaagtgcgccataaggcgattatcgatcggttcggccgttatccgcatcgcaatgccattttaggccgccgcagcacggcggaagaagaggaatttttacgccagcccggttcgtcattttga

SEQ ID NO: 444540 - DNA, 1239 bp, Serratia marcescens
atggaccattgccatactgccgatctgatttcccttgaacaggcgctggacaacatgctcagccaggtgacgccgctgagcgaaaccgaagccgtggcgctgaccgacgccgccgggcgcattaccgccacgccggtgatctcaccgctcaacgtgccgccgttcgccaattcggcgatggacggctacgcggtgcgcctgggcgacctcaacgccaacgccccgctgccggtggccggcaaggcgtttgccggcgcccctttcaatgacgcatggcccgcccacagctgcgtgcgcatcatgaccggcgcgccgctgccggccggcgccgaagcggtgattatgcaggagcaggcggaagtgaccgacgacggcgtgcgtttcaacgccgtggtacacgccgggcagaatatccgtctggcgggcgaagatatccgccagggcgccagcgtactgcccgccggggtgaagctgggcgccgcgcagctgccgctgctggcctcgctggggattgccgaactgcgtgtgatgcgcaaactgaaagtggcggtgttttccaccggcgacgagctgcagccggtcggccagccgctgcaggaaggccagatttacgacaccaaccgttttgccgtgcgcctgatgctggaacagctgggctgcgaggtgcttgacctcggcattatccgcgacgatcagacggcgctgcgcgctgccttcaaccaggccgacagtgaggccgatgtggtgatcagcagcggcggcgtctccgtcggcgaggccgattacaccaaacagatgctcgacgaactgggcgaggtcggcttctggaagctggcgatcaaaccgggcaaaccgttcgccttcggtaaactgcagcacgcctggttctgcggcctgccgggcaacccagtctccgcggcgctgaccttctatcagctggtgcagccgctgctggcaaaactggccggtcacagcgaatggcgtatgccgccacgcctgcgcgcccgcgccctgacgccgctgaagaaatcgccgggccgcctcgactttcagcgcgggctgttcgccagcaatgcgcagggtgaactggaagtcagcaccaccggccaccaaggctcgcacgtgttcagctccttcagccagggcaactgctttatcgtgctggagcgtgagcgcggcgccgttgccgccggcgagatggtggagatcgagccgtttaatgcgctgctgaggagctga

SEQ ID NO: 444541 - DNA, 762 bp, Serratia marcescens
atgctgccggaattaaccgatgccgaaaccctgcgctataaccgccagatcgtcctgcgcggcttcgacttcgacgggcaggagcagttgaaagcctcccatgcgctgatcgtcggcctgggcgggttaggctgcgcggcggcgccttacctggccgccgccggcgtcggccggctgacgctggtggatttcgacagcgtggcgctctccaacctgcagcgccagatcctgcacagcgaccagcgcatcggcatgagcaaggtggcctcggcccgacaaacgctggccgaagtgaatccgcacgtggcgatcgacaccgtggacaagcaaccggacgatgaacagatggcggcgctgatcgccgcctgcgacgtggtgctggactgcaccgataacgtcgccacccgcgatcagctgaaccgcctgtgccacgcgcagcgcaagccgctggtttccggcgcggccatccgtatggagggccagctgagcgtgttcacctatcagccgggcgagccatgctaccgctgtctgagccggctgttcggcgacaccgcgctgacctgcgtggaagccggcgtgatggcgccgctggtcggcaccatcggcagcctgcaggcgatggaagccatcaaactgctgacccgttacgggcagccgctggtgggaaaactgctgatgtttgacgccatgagcatgcagttccgcgaaatgaaactgccgaagaacccgcagtgcgaggtgtgcggcgcagaggccgaataa

SEQ ID NO: 444542 - DNA, 474 bp, Serratia marcescens
gtgtcgataagatctatggatatgagggttaagttagtcctgttagtgatggccggtgtgttaattggttatgctttttggcttcttttacgaccggtagagatcgttgccgttcatcaggatgatgattttagcgctgtgttagtcaagagttttccacttaccgataagggaaaaatatcttggtggatgaaaaataaggataggctgaaagagcgctacggcgttccgaaaccggcgcccgatggcaacttctacatcacattctggctatttggggatggctataaagaggagggcaagtatgacagacgctgctttgacgatatgaagaccaagattaactgtattgaaaaggaggtggttttttcagtcaataacgatagtcgcaaccgaatccattttacgacatacagtggcggcgactatctgctgacggataacggcgaagtggttagctatgagtaccggtaa

SEQ ID NO: 444543 - DNA, 471 bp, Serratia marcescens
atgtcgataaggtctatggatatgagggttaagttagtcctgttagtgatagccggtgttttaattggttatgcctcctggttgttattacgcccggttaaaatcttggcggttcatgaggataggcactttagctcagtgttggtcaataacttcccgcttactactaagggtaaaatagactggtggttgcagaataaagagatattaaaagagcgctatggcatccccaaatcggcatcttatggtgattttagcatcactttctggctgtttggtgacggctataaagaggagggcaagtacgacagacgctgctttgatgatatgaaaaccaaggtgaactgtattgaaaaagatatcactttctctgtaagtaaaagtgagaatctgggcgttatttttgttgtagaacacgggatctaccgaatcgataaaaacggtaagatagcaaaggtaaatatagactaa

SEQ ID NO: 444544 - DNA, 462 bp, Serratia marcescens
atggcaatgatgaataggaaaagattattttcactactaatgttctgcattctaactttttatatctcttggttattgttacgaccggttgaaatcgttgcgattcatgaaaataggcactttagctcagtgttggtcaataacttcccatttaccaccagggggaaaatagagtggtggttgcagaataaggatatgctaaaagagcgctatggcatccccaaaccggcatcctatggtaatttcagcatcactttctggctgtttggtgacggctataaagagaaaggtaagtacgacaggcgctgttttaatgatatgaagaccaaggttaattgtattgaaaaggatatcgttttcaatgtgcgcaatagcaaaaatatgggtgttgtattttttgcgaatggaggaatataccgaatcgataaaaacggtaagataacacaggtaaatatagactaa

SEQ ID NO: 444545 - DNA, 471 bp, Serratia marcescens
atgtcgataagatctatggatatgagggttaagttagtcctgttagtgatggccggtgtcttaattggttatgctttttggcttcttttgcgaccgctagagatcgttgccgttcatcagtatgatgattttagctttgtgttggtgaaaaatttccctcttaccgacaagggtaagatcgattggtggatggataataaagacatgttggaacaacgatatggtattcctcaatctacatcctctggttttttcgtcattaccttctgggattttagtgatggttataaagaggcgggtaagtacgataggttatgtttcaatgatataccgacaaataaaaaatgcatcgataaaaataagttacttaccgttgaaaataataaaaggaaagaattattgtttactgttgacgatggcagatatctgatgaagggaagtggtgaaactataaaaataaacagggaataa

SEQ ID NO: 444546 - DNA, 465 bp, Serratia marcescens
atgactgttataaataaaaaacgaaatgcatttttactactggtggtcggcgttctaaccgtttatatcgcctggtggttttcacgcccggttaaaatagtggcgattcatgaggatgggcactttagctcagtgttggtcaaaagctttccgtttaccaccaggggaaaaatagagtggtggttgcagcataaggatatgctaaaagagcgctatgacatccccaaaccggcatcttatggtgattttagcgtgaatttttggttgtttggtgacggctataaagaggagggtaagtacgataggttgtgctttgatgatatgaagacaagggttaactgtattgagaaggatatcgttttctctgtgagtaaaagtaaaaacctgggtgttgttttctttacggatggtgggatataccgaattgataaaaacggtaaggtagcaaaggtaaatatagactaa

SEQ ID NO: 444547 - DNA, 453 bp, Serratia marcescens
atggttaaatatagaataacattgttgttgatgttatgtattttaattatctatgcttatctgttggtatgtagtcgggtcgagattgtcgccgtccatcagagagataactacagtgatgttttagttaagagtttccctgttaccgataaggggaaaatacagtggtggtttgaaaataaggataagctaaagaatcagtataatatcccacagcctgcatcctacggtgcctttaccgtgaccttctggttgtttggtgatggctatcaggaggaaggtaagtatgatcgtctgtgtttcgatgatatgccaaccaataaaagctgtattgataaaaacttgctgatgatggtcaggtacgctaaaagtaccggcctgtcttttcggttggatggtggggtgtatcgcataaagggaaatggtgaaatgataaaagagaaatataaatag

SEQ ID NO: 444548 - DNA, 465 bp, Serratia marcescens
atgaaaattaaaaataaaaaatcaccactcgctattttattattttttttggtggtggtttatttttcttggttgttttttcggccagtagaagtcatcgcagttcaccagcgaaataatttcagtgccgtgttagtcaagagcttcccacttaccgatcaaggtaaaatatcttggtggctgaagaataaagatatgctgaaaattcgctacggaatccctaagccggcatcttatggtagtttcaccatcacattttggctgtttggtgatggttataaagaagagggtaagtatgacaggttgtgtttcgatgatatggacacaaaacttaactgcattgaaaaaaatgcggttttttcagtaaacaatgatagtcgaaatagaatacactttacggcatatggtggggataaatacttacttaaagagagtggcgaagtggttaaatatgagtatagataa

SEQ ID NO: 444549 - DNA, 849 bp, Serratia marcescens
atgatggctgcactgcagttcccctgcacgatatttaaaacgcaaaagcgcatggacgattacggagcgagcgatatgcgttgtggagacctgtccgcatcacagctaaaaacgcattttcgactggcggacgtttccgccaccgtagacccgtggacgctgaccagaaaacgtcttcaccagacgcacccgcgcgcctatgcgatggtcagccgcctgtccgccccgcaacagacgctgacccgccgggagtgcgccgccatactatttgatgagctgcgccagctgtcgcggatgtttgccctttatggcccctacaagtacctgatcggcaaaatgatcgaccatctgcaatacggcaacggcacgccgtttgccagcccgcatctggacagggcgttaagggagcatattttgggggataaaacggaaaacagttcactgttacggatacaaaagtcattagtggacatgatcgactgggaacaaaaaatctatcctaaggaaagaataaaggaattaacggatgctatttatgaaataaaattacctaaatttgacaggtggcaggataattttaatgggatgggtatcaccgtacacgatacatgggcgacgcatattactataaaatcactacagatttataacgacaatttccacgctgtagtgcactataaagtccaggaccattttggattggatgttgaggatatctcaacgtttaaatttaaccagttcaggttctttcgtatatggtttgtcttacagaggcatagcttttttggttttaagccatttatgactaatatggaagcaacagtagatattctcggagagagaccatga

SEQ ID NO: 444550 - DNA, 345 bp, Serratia marcescens
atgattgcggtaatctttgaattgcacgcggccgaagggcggcaggagacctatctggcgatggcggcgcagctgaagccgctgctggcgcagattgacggctttatttccatcgaacgcttccaaagcctggccgagccggacaaactgctgtcgctctccttctggcgtgatgaagaggcggtgcggcagtggcgcaatctggaggcgcaccgtgcggcgcaggcgcgcggccgcgatggcgtattgcacgattaccggctgcgggtagcgcaggtggtgcgtgattacggcgacagccaacgtgaacaggcgccggcggacagccggcaggcgcatggctga

SEQ ID NO: 444551 - DNA, 681 bp, Serratia marcescens
atgcatcacgatgaaatcgaccagcggctggcggcaatcggcgccgctatcgccgaccgttcgcgggcgcgtatgctgtgcctgctgatggacggccgcgcctataccgccacggaactgagcgtcgcggtcgatgtggcgccgtcgaccgccagcagccatctggcgcggttgcgggatcagcggctgatcgcctgcgtcaaacaggggcgctaccgctattttcgtctggcggacggcgaagtggccgccgcgctggaatcgctgatggcgctggcgggcgcgccgcggccggtggtgaaaagcagcacgccgacggcgctgcagctggcccgcacctgctatgaccatatggccggcgaggtagcggtcagcctgcataaccggctgtttgcgcaggagtggctgtgcggcgacgactatcagctgacaccgcaaggacgcagcgcgctggaacggttgggggtcgactgtgcgctccccgcctcccgccgccgtttcgcctgcggctgcctggactggagcgaacgacgcgaacatctgggcggcgcgctgggcgcagcgctgctggccgccttcgaacggcgcagctgggtgcgcaaacagctcgatagccgtcagttgcacatcacgccggcgggaaaaaaagcgctggccgcacattttggcatatcgctgtaa

SEQ ID NO: 444552 - DNA, 705 bp, Serratia marcescens
atgtttgatgccaccgaatttcccatcaccacccgctggccggcgcagcatccggaacggctacagctctattccctgccgacgcccaacggcgtcaaagtgtcgatcatgctggaagagaccggcctgccttatgaggcgcatctgattgatatcggccagaacgaaacctggacgccggagtttctgtcattgaaccccaacggcaaaatcccggcgatcctcgatccggccgggccggacggcaaaccgctggcgctgttcgaatccggcgccattttgctgtatctggcagagaaatgcggtgagttcctgccgcaggatccggtacagcgcattgaaaccatccagtgggtattcttccagatggcggcggtagggccaatgttcggccagctcggcttcttccacaagttcgccggacgcgaatatgaagacaaacgcccgctgcagcgctatcagaaggagtcgcagcgcctgctcggcgtgctgaatgaccggctggaaaaccgcgagtggatcatgggtgcagattacaccatcgccgatatttccctgctcggctgggtgcgcaacctgattggcttctacgaagcgcgcgaactggtgtcgttcgacagcttcccccacgtcggcgcctggctggagcgcggtctggaacgcccggcggtgcagcgcggcctgaacatcccggcgcgaccataa

SEQ ID NO: 444553 - DNA, 1587 bp, Serratia marcescens
atgagaaaattactcgttctgtttttctgcgccaacctgttcggccttggccagcaggccgtcgccgcagaaaataaaaacgtcgacgttatgctgatcggcggcggtatcatgagcgccacgctgggcacttacctgcatgaactggagccggactggaccatcgatatggtcgagcgcatgaactccgtggcggaagagagctccaacggctggaacaacgccggcaccggccactccgcgttctgcgaaatgaactacaccccggaaaaagaagacggcaccatcgatatcagcaaagcggtgaccgttaacgaatctttcgagatctcccgccagttctggtcttatcaggtcaaaaataacgtcctgggcaatccgaaatcctttatcaacagcgtgccgcacatgagctttgtctggggagacgataacatcaacttcctgcgcaaacgctacgccgcgctgcagcacagcaccctgttccgcgggatggagtactctgaagaccctgcgcagatcaaacagtgggcgccgctgatgatggaaggccgcgatccggcgcagaaaatcgccgccacccgcatgccgctgggcaccgacgttaacttcggcgtgatcacccatcagctggtggacagcctgtccaaagacaaaaaattcaacctgagcctgggccatgaagtacgcgatatcaaacgcaacccggacaacagctgggcggtgaccatcgccgatctgaacaacggcggtaaagaaaccaccaccaacgccaagttcgtgtttatcggcgccggcggcgcggcgctgcacctgctgcagaagtccggcattccggaagcagacggctacggcggcttcccggtcggcggtcagttcctggttaccagcaacccggaagttgccaatcagcacctggcgaaggcctacggcctggccagcgtcggttccccgccaatgtcggtaccacacctggatacccgtatgctggacggcaaacgcgtgctgctgttcggaccgttcgctaccttctccagcaaattcctgaaaaacggttcgctgtttgatctgatcgtttccatgaacagctcaaacctgatgccaatgacccacgtcggtctggatcacttcgatctggtgaaatacctggtcggtcagctgatgatgaacgacgacgatcgctttgccgcgctgaaagagtactacccggacgccaagcaggaagactggaaactgtggaccgccggccagcgcgtacagatcatcaagaaagatgctgataaaggcggcgtgctgcagttcggcaccgaagtggtcagctcgcaggacggcagcatcgccgcactgctgggcgcgtcaccgggcgcttccaccgctgcgccaatcatgctgcacctgatggaaaaagtgttcaaagacaaagtggcaacgccgcagtggcaggccaagctgaaagagatcatcccgtcctacggccaaaagctgaacggcaacgtggaaatgaccaacaagatccgcagctataccagcaacacgctacagctgaactatgttgaagtgaaaccggaagctgctgaagcgcagtaa

SEQ ID NO: 444554 - DNA, 456 bp, Serratia marcescens
atggatcgcgccaatatcattcacgacttactggactggattgaaactcacctggaccaaccgctgctgctggataacgtggcggcaaaatcgggctactccaaatggcacctgcaacgcatgttccgcagcaccaccggccacgccctcggcagttacatccgcgaacgccggctgtcgaaagccgctcaggcgctgcgatcgacgccgcgcccgatcctggatatcgccctgcaatatcattttgattcccaaccctcgttttcccgtgcgttcaaaaaacagttcggcaaaacgccggcggtttaccgtcgcagcgactggggcagctttgacgacacgccgctgcctgccgctgcgcagccggcacaacatcaggattcgccggggctgcagctgctgtacgccaaacagtgcgtcgacggcaaatgcagcaactggatggggcagcgctag

SEQ ID NO: 444555 - DNA, 615 bp, Serratia marcescens
atgaaacgctgtgtatcattgctgattgccggaatggggtattgcgcgctggcacaggctgcgacgccggatgccgacggcggccgggtggattttctgggcaaaatcaccgatacctcctgctccgtctcggtcaacggccagggcagcgacgccaacgtttatctggcgccggtctcgctgcaggaagtgcataaccgtggcgccggcgcttatctgaagccgaagtcttttaccattcagctgagcaactgccagattatggaaggctctgcggaaacgctctcggaggccgatctgcgtaacatcagcgtcagctgggtgggaggcaatctgctgcagggcgcgaatgaggacgccggctatctggcgaacagcctgagcgacggcgccagtaatattgcgctggccctgtcggtaaacggtaacgataccctggacaagtcgaataaaattattccggccgatccggatcagaacagcgtgcagccggagatcggcgccaaggacgtcggcacctttacctattacatcggctatgtgacgcaggcgccgaaaaaaaccacctccgggccgattcatagctacgctacctatgagattcgctataactaa

SEQ ID NO: 444556 - DNA, 990 bp, Serratia marcescens
atgtcagtaaaaaatctctgtcgttggctggtggtgattgccgctctggccgccgggcaggcctatgccgcctgtacccgctacaatacgccgaccgtgcagctggatatggtggtcggccgtgtggtggtggacccgaacgcgccgattggctcggtgctgtatgaaaagagctggaccatgagccagagcggcatcaactactactgcaccggccgcaacgacttttccgccagaattgtcgccaccggcgtgcaggatctgggcaacaaggtatattccaccaacgtgccgggcatcgggctgcgtttccgccgcggcgggtcgatccagttcacctatccggaggtgaaaaactttgatggcgggcgtggtacgcgctactacctggcgggttctacctatactctgcaggtgatcaagaccgcggcggtaaccggcagcggcagcgttgccagcggtaaatatacctcgtatgactatgtgtacggctccaacccgattctggaaacttacctgagcgccaatgcgctgaccatcgtttcgccgtcctgtacggtgatgggcggcaataacttcagcgtggatatcggcgcgattaaaaccagcgacctgaacggcgtcggcacctttgccggcgggcgaaaattcccgattcagctgcagtgcagcggcggcgtcagcgtggccggctatgccaacgtcaatatgacctttgacggcaacctggcgaccggcactgcgctgagccagggggtgctgaaaaacgagcgaaccgacagcagcgcggcgcagggcgtcggcgtgcaggtgctggacagccggatgaacccgctgcagtttaaaaaggcgtataacgtcggccgtctggcaaataaccagatgcagtatatcgacctgtcgtacaccgcgcgtttttaccagtacctgtcgaagattacctccggcgcggttgaagcccatatggtgtttaacctgacctacgactaa

SEQ ID NO: 444557 - DNA, 2496 bp, Serratia marcescens
atgaaacagtgggtgccgataaaagcattgggttgcaagctctctgtgacgatcgtggtttcggcttgtatttctccggccggcgcggcggagccgcaggaaaatcaacagccgctgtatcaatttaacgatggctttatcgttggcagcaaggagaaggtcgacctgacgcgctttagcaccgtagcgatcagcgagggaacctattccgtcgatgtctacaccaacgatgagtggcgcgggcgttatgacctgcagatcacccgcgataaacagtccaaactgggcgtctgctacaccgccaaaatgctgtcgcagtttggcgtggcggtggagaaactcaatgaggcgctgagcaaaaatcctgagttttgcggccgcctgagcgagtggcgccaggatgacaacctgaaagacaactttaaccagtcttcgctgcgtctggatctgtcggtgccgcagatctatgaaaaccgcatgtacaaaggttatgtagcgccggagttctgggacgaaggcatcccggcgctgaacctggcctataccgccaactactacaacaaccatgtctcttccgcgcagggttcagatgactccagcgcttatctgggcatcaatgcgggtttctcctatgacggctggctgctgaaacacatcggcaacctggattggcagcagcagcggggcagcacgcgctggaactccaaccagacctacctgcagcggccgatcccgcagatgaagtcgatctttaccggcggccagttctttaccaacggtgagttcttcgacagcgtggggctgcgcggggtgaacctggcgaccgatgacaacatgttcccggacggcatgcgctcctatgcgccggagattcgcggcgtggcgcaaagcaacgccctggtcaccgtgcgccagagcggcaatatcatttatcagacctcggtgccgcccgggccgtttaacatcaacgatgtgtatccgtccggctatggcaacgatctggaagtgacgatcaaagaggccgatggctccgagcagcactttaacgtgccttactcgtccgttacccaactgctgcgtccgggcatgatgcgctataccttcgccgtcggtaaggccgacgccgatgacctgcgtaataagccggcgattgtgcagggcacctatcaatatggcgtgaataacctgttcaccggctatttcggcgtcagcggttttaacgactatcagtcggtgctgctgggcagcggtatcaataccggtatcggcgcgctgtcgctggatatgacgcagtcgcgcctgaagctgaaagatgaagataaaaccggccagagcttccgcctgagttttaaccgcatgttctccagcacgcagaccagcatcgtactggcggcgtaccgctactccaccaaggattattacaacctgagcgatgcgctgtacaccatcgacagggagaagagcggtaataaccgcgaaatctggcgggagaaaaacggcttcagctataccgtcaaccaggatctgccggaaggctggggcggcttctactttaccgggcggattgccgactactggaaccgcagcggcaccgagaagcagtatcagctgagctacaacaacatgtggggccgcatgacgtataacgtcggcgtgcagcgtgtctactcggccaataacggcggtaacaacaaagacgatcgcatttcgcttaacttcagctatccgctgtacttcggcgaaaaccgccgggcgaacctgaattcgaacaccgtcttcaacaattcgcactttggcaactcgcaggtgggtctgaacggctccttcggtgaagagaacaacctgagctacggcgtgaccacctcggtggcgcgcggcggcgaccacaatgtcggcctgaacggcagctatcgcgcgccttattcgacgctgaccgccagctacagccagggcgaaggctatcgtcagagcggcctgggcgccagcggctcactgattgcccacggcggcggggtgacgctgtcgccggaaaccggcaccaccatggcgctgatcgaagccaaagacgccaagggcgcgatgctgcccggctcgccgggcacccgggtggacggcaacggctatgcggtgctgccttatctgcggccgtaccgtatcaatgcggtggaaattaacccgaaaggcagctcggaagacatcaactttgagaagaccgttgcgcaggtggtgccgtatgagggcagcatcgtgaaggtgaaattcaacaccaccgttgagaagaacctgaacttccgcgcgcggcagagcaatggcgaaccgctgccgttcggtgcggatatcgtggacgaaaacggtaaatatattggcgtcgtgggccagggcagcacgctgtttatctcctcggacaccgcgaagcaggcggtaatcacctggagcaacggtcggtgcactatcgccctgaacccggcctcaactaaggatgcggtatgtcagtaa

SEQ ID NO: 444558 - DNA, 702 bp, Serratia marcescens
atgaaatttattgccctttttttctgtttcattttcagtttctctgcttccgccaacaatattatcgctaacggcacgcgctttatttatccgggaaatgaaagagaaataacggtgcagctgtccaactcagctgatcgaccggcgctggcgcaggcctggctggataatggcgacgcgaatgccacgccggatactatcgtgacgccttttttaattacgccgccaatttcccgtgtggatgcgaaaagcggtcagaccctgcgtattaagctggcgaataaatctggcctggcgacgaataaagagagcctgtggtggctgaatattctggagatcccgccaagcaataccgagcgccagcaggaagggcagaacgtactgcagctggcgattcgctcacgctttaaattcttctatcgtccgagcgggttgggcaatcgcgacgccgcgccgcagcagctggtgctgaaggcggcgggtaatagcctgacgctgaataatccgacgccgttttatatcaccgtgaccaaggtttcacgcgatggcaaaacggcgctgaacgaacgcactctgatgctggcgccgcaaagcagcggaacgctgaacaccaagacggcgttcaaagcgggcgaaactctggttattaacaatatcaatgattacggctcagatgttgccattaaactcgcggtaaaatag

SEQ ID NO: 444559 - DNA, 597 bp, Serratia marcescens
atgaacaaagtattactctccgcagtagcgaccgcttttctgggaatgtctgccgcacacgctgcatccgaaaatgttggcggcggtcaggttgacttctacggtaaagtaaccgacgtatcttgtactgtttctgttaacggtcaaggcagcgacgccagcgtttacctgtcgccggtaagcctgagcgaagtgaaaaactcaggtgccaacacttacctgaaacctaagtctttcaccattgacgttaccaactgccaggcggccgataccgaagtcagcgctgacaaactgggcgttaactggactggcggtaacctgctgaccggcgcaagcggcaccaccgcaggctacctggccaacaccgaaggtaccggtgcgcagaacatccaactggtgctgtctgccgacgatgcgaaaaacctgaccaacaaaatcatcccgggcgatgccaaccagaaagcagcgaccagcgttgctgacctggacggcggcaagcgcttcacctactacgtaggctacgctactgcgaccccagacaccgtaaccagcggtgtggtcaacagctacgcgacttacgaaattacctatcagtaa

SEQ ID NO: 444560 - DNA, 1014 bp, Serratia marcescens
atggaagcgctgtacccaagtttgatcatttttggtttaggtgcttttttagcctgccttttaacatataaataccttcaaaaaatccacacccgaaagattgataacattgagaataatcacagaagattacttaatgatgaaataagcgaaaaagaagatgtcattgagaaatgcaaaaaaaatgacatccttagagaagccgaacacgagcgattaaaaaacgagctcaatgctgttattgaaacaaaccgcgtaaagagtaaagcgatattcgataaagccgtggattatgcgttcgacttcgaaaagcacttccttgcacaacatcagacagcccaagctgagatacaaaaagtactcgatgacagttaccgctataaaagaaaaaccctattggcttcggtaacgttaaagaactttgagaaaaaacttgccgatatcagaaaagaaaaatctatctatcagacgctcattgcgaaatatgactttttcgagcttcgcgatcactctgactggaaaacggttgaaaaagaatttcgcgataaggttctggcacttcaggaggcccaggatgagcgcgatgctcagaatgaactaaagcgacagatgcgcgaggaacgccagagagcggaagagcttgagcgccaacagcaggaagcagaagccaaagagcaagagctcgaagcccggcgtaaagctgttgaagatgctctccaggctgcggatgaggaacatcgttttgagttagaggaaacccgacgtcagttggagcaggagattgaagatgttcacaagcaatacgagcgtgcgaaatccatggcccaaatgacgaagcaagggcatgtgtacgtcatttcaaatatcggttcttttggtgagaacgtttataagattggcatgacccgccggctagaaccactcgaccgtgtaagtgagctcagtggtgctagcgtacctttcgaatttgatgtgaatcgccacgggtttaacagacacctcagagtcatttaa

SEQ ID NO: 444561 - DNA, 285 bp, Serratia marcescens
atgccggtgatcacgggtcgccatcagttgaaaaatctggcggagagctggggcctgcgctataccctggcaacgggcgtttttatcgctgcctatagcgtggtggatggcatgggcgtgcgcgtgtccggcaacgcgctcgcctataccgtgtggatgagcgcattatggggagtgttgataccgctgctttatatcgtgctgcgcgacggtaagagcttactgcaccggcgggcccggcatgctccacgcggcagcaggcggtctggtttcgctgcttgctaa

SEQ ID NO: 444562 - DNA, 159 bp, Serratia marcescens
atgctccacgcggcagcaggcggtctggtttcgctgcttgctaatggcatcatcatttacgccatgacggccgcaccgatgggcgccgtctctgcgctgcgtgaaaccagcgtgctgtttgccgccgtattgggctatctgttcctcggcgagcgttaa

SEQ ID NO: 444563 - DNA, 891 bp, Serratia marcescens
atgtctgaccatcccacgcttgcccttctcgggccgggtgctatcggcaccaccatcgccgcgttactgcataaggctggccgaacgccggtcctttgcgggcgtagcgcgcatccgcagttaattttgcgtcacgatgagggggaagtcgtggtgcccgggccggtattgagcgatccggcggcgatccgccatccgttcgatctggtgtttgtcgcggtgaaaaccacccaggttgctgactgcgccggctggctggccgcgctgtgcgacgaacataccgtcgtctgcgcgttgcaaaacggcgtcgagcaggccagccagttgacgccctacgtcaacggcgcccgggtgctgccttcggtcgtgtggttcccggcgcagcgcgagccggatgcctccgtatggctgcgtgaaaaaccgcgtcttacgctgcccgatgtgccgcaggcgcaacgatttgcggatgtgctcggcggcacaggctgtgcggttgaactgtccgccgattttgtctccgtcgcatggcgcaagctgttgcagaacgcggtcgcgggcctgatggtgctggctaatcgccgtgccgggatgttcgcccgggaggatatcaccgaactggcgctggcctatctgcgcgagtgtctggccgttgcgcgtgcgcacggcgcatcactgagcgataacgttccgcaggagatcgtggagcgttttcatcgcgcccctgcggatttgggcacctcaatactggctgaccgacaggccaaccgcccgctggagtgggatatccgcaacggcgtgatacagcgttatggccgcgagcaggggatccccacgccgatcagcgatgtgctggtgccgttgctggcggcagggagcgaggggccaggctga

SEQ ID NO: 444564 - DNA, 1125 bp, Serratia marcescens
atgaagaagaaaatagcagatttactagactttaaaacaaatatattagaagtgttcgttgttgcggtattaattgctttgggtgtgaatatactttcttcagggattgttggtttttttaatttgtcatttttgaaaatgattgtcgctggttctctacttataattttaggtgctgtatttttcctacgtaacgcttaccctatgaataatggtaaatatgattttaaaggggtggtgtgtttagataatgaaaaaaaagaattggtatcaattgaaggctacgatttttctgaggaagttagtcgttacctaaaagcgttatgttcagaaaataaggctatctataaattatggactgaagatccaattggatatagttatgatattaaaaggagtatgatgaccaggaagaaaagtaaagcaaatgccttatttattgaagcaatagaatactatgttttaaaaatgctcgcacttcatttaagtagtcattttaacggcaataaatctgtttctgaggattatttagttaagttagataggaaaagtatccccgatgttcttatggggaatagatttattgatactttttctagacctatggatgaacgtgagcaatttattgaccatggttcttcaccatttataggtaaggtcgtatatgcatatggtaagggaggcgcaatttttgaccattttgaaatggttcttcccaaaagtagttcggtcataagagagagcgattccagcataagtgtaattactaaaagatttaaaattaattatcgaccattgttcgaaggatggggtgataatctaccaagaaaatttgaaaatctttatttagggaagggcgttaattcattgtcaacctattcagtaggcttagtggttactgtggattttaatgttaagtcgttactaacaactaaaggttgggagtattattggtggcttgattcttttttaggaaaattggagcaatcattttccaaaaaaatgttcttatctaaaatctcttgggagcagaatgctgcaatgtttattatggctgaaaacaggaacaaggtgcaacacaagagcgaagttttaaataaggtactagacaaggaggaacaatga

SEQ ID NO: 444565 - DNA, 894 bp, Serratia marcescens
atggatttcctgtgttatgtgccaagtaagagcgcgtttcagttgagtggtaaatgttccgggctgattgccgtggttgtgccaaaccttgtcaatcctcacttttgcgagttactggcgacgtttgaagaggaagccaggtacattggaaagtcggtgatcgttaagacccaccagaatcaacctctgcaggataagcagatcatccacgctttaattggtatggggatcgacagtttgctgtgggttccgacagaagcagaggccgaactttcggagtggttaaccgccaccaatattccggttgcggtggtgacacaggtttcacgcttttttaattccgtctctattaaccagggtaaaggtgcggaaagtatcgcggaacacttcatacaaagcgggcataccacatttggctttgttgcccaggaaggtgtcgataatcgcaaggtttacgcctggagtaaaaaaattaccgggcaggggttaaatctggctaaagaaaatcaattctggatagcgaaaggtgaaggggaaaaaacatctggccatatcggtatactggatgaggttatcgaaaagctgtctgcccggaaaaatgtgtgcacatctctttgggtctataatgacgttgccgccagttatattatcgacgggttaaaagaaaaaggcgtggctgttcctcaggatattgctattgccagtttcgataataccttgctggcgcaaactaaagggataaccagcgttgcccagccgataaaagaaatcgcacatctggcatttcagatggttaataacgagaaaaaacaggagagcatcgaaatgtatgaaattgtctcccggctgattatccgcgagagtagcgtgactattaatattacgacgctttaa

SEQ ID NO: 444566 - DNA, 1422 bp, Serratia marcescens
atgtctgcgactgccatggaaaagcaaagcgcttacggaaagctgcgtctgaaagaaaagatcggttacggtatgggtgacgccggatcctgtatgatctggagcgtactggcgctgtatctgacatggttttataccgatgtctatgggctggctcccggcgtcgtaggaacattatttctggtgatccgtatttttgacgccttcagcgatccgatcatgggggcgatttgcgatcgtacacaaagtcgatggggtaaattccgtccctggctgttgtggatggcggtgccatttggcctgggcgccatactgatgttcaccacgcccgacctgagcatgaacggaaaaatcatctatgcctggctcacttatctgattatgtcgttgatttataccgctatcaatattccctattgctcggtagcgggcgtgattacactgaaccaacaggagcggctgggctgtttgtcatggcgtttctttctgaatggcctggcgacgcttattgtctcttcctccattttgccgttaaccgactggctgggtaacggcaatcgcgcatccggctttcagctgacgatgatgatcatgggtggtgccgcgacgctgatgttcctgttctgtttttccagtattaaagagcgcgttgtttcgattaagtccaacgactcgttaatgaaagacctgaaagatatcgctaaaaatgaccaatggctgttgatgatttcaattacctttctgaatgtttttccggcgttcattcgtggcgctgtcaccatttattatgcgacctacgtgatgcaggcttccgtcggctttattaccttttttatggcgctcggcgtcgcctgcaatatgctgggcagtgtcatcgccaaaccgctgaccgaccgttttgataaggttaagttgttccgaaatattaatattattctcggtattctttccttcgcgctgtggtttgtcgacccgaaatccctggtgccactgctcacgctctttgtgatcattaatatcctgcatttaatccagtccggccctattctgtgggcgatgatgtcagacgttgacgactacggcgattggaagttcggcaagcgcctgaccggtatctcttttgccggtaatctgtttatgctgaaaatgggattggcggtagccggggcgatcgttgcctggatattgtcatataccggttatatcgccaataagccggagcaaaatgcacaaactatccagggcattattatcatgttctcgctactgccgatggtgagttattttatcagcgcatttatggtgcgctacttcaagttgaacaacatttttatcgaaaagataaaagtcgatctcgccaaacgcgaactggaaaagggtgcgcttcaaccgcaggcgcttaaagatgttcccgtccattaa

SEQ ID NO: 444567 - DNA, 1362 bp, Serratia marcescens
atgtcgagtagcaactattacgatgtcaccgagtggaaggaagggaatccgtatcaggatattggtgaggtcattaatagcattatcgcagatattaaagccaggcaaacggatgccgacattaataacggcggaaagcccggtgcagtcatctatattccaccgggtgattatcctcttcttacccaagtggtgatagatatcagctatctgaaaatcatggggtccgggcatggtttcacctcttccagtatccgttttaatacgccggagagtgaatggaaaaactggcacgaagtgtggccgggaggcagccgcatactcgttgagatgcaaccggcagcaggcggggaggcgtctgccggggctgccttctatatcgaacgcagcggagacccgcggataagttctgtcgagtttgctgatttctgtattgatgggttgcactttgtggacgatggctcagggaatgacgatcctgaaaatacttatctcaatggtaaaacaggtatttatattgccagtgcgcaggattcattccgtatcagcggcatggggctggtgtatttagagcatggtgtcactatttataacgctgacgcgctggcgatacataataacttcattgctgaatgtggccactgcattgagctgcgcggctcggggcaggcatcgaaaataaccgacaatctcatcggtgccggttacaggggatattccatttacgcacaaaattttggcggtttgcttatcactgccaataatattttcccgcgcggaaaaagcagcattcatttttccggcgtagtgcgttcctctgtcagcaataatcggctccattcattttatccgggcatgctggtctttgaagacaactgcgcagaaaacctggtgtcggccaaccatttcttccgtgagcgcgaaccctgggctccgatgcaggcttacaacaacggcttggatgatttatacggactcctttatatcagtggcgacaataattcgattattgccaatcatatatcggagactatagatacccagtatattaccccgtcaggcgccaccccggtgataatccgcgtggtgtccgggcaggggaatcatatttcagataatcatatcgttgccaccaccgaaacgtcacaagcccatgatgcggccgcaagtgcttgtttctccacgcaggtaagcgcgttgctggcgactgacggactggcagcgcttgatgtcatcaccgtgcggatcgaaaaagagtcccggcaaaatattgtcctggattcaggcggtgatgctcaggtcgtgctggacagggcggtgaatgccttcagggccactcccgttccgggccagagctgttaa

SEQ ID NO: 444568 - DNA, 480 bp, Serratia marcescens
atgagtatcacgattcgtcaggcccgcccggaagatgctgccgccatttacgccatgatctatgagctggcggtgtatgaaaaagccccggaagaagtggtcaccacgccggatgaaatccgggaaaccctttttggcgcaggcagtaacaccgaagcgttgatcggtgagatggaaggtaaaatcgtcgggtatgccgttttcttcaccagctattccacctggctcggacgtaacggtatttatatggaagacttgtatatttcccctgactatcgcggccaaggtgcgggcagcgcgctgctgaagcatatcgcgcaatgcgcggtgaaacggcagtgcggccgccttgaatggagcgtgctggactggaaccagcccgccattgatttttaccagagcatcggcgcgctgccgcagtccgaatgggtacgctatcgccttgatggtgaagcgctgctgaaatttgccgaatcgtaa

SEQ ID NO: 444569 - DNA, 933 bp, Serratia marcescens
atgatgaatattatgcatccggcgctgaggcgtcttgatttaaaccttctgccggtttttgacgcggtttatcgtcaccgttccgtgcgtctggcggcggatgaactggcgatgagcacatcggcgctgagccatgcgctgtcgcggctgcgtatcgccctcaacgatccgttattttaccgcgaaggccaccgtatgtgccccagcgtatatgccacgcagctcgcgccttctatcgcttcggcactgaaattcctcaatcaggagctgacgccgccgccggagtttgccgccgccgccagtacggagtgtttacaaattgcgattacggattttaccgcgttgtgtattttccccgtcctgatgcagcaactgcagcacgaagcgcccggcctgcgctttgagctactctatttgccgcacagcccggcgctgacggaattgctggcgggcgaagtggatctggcgcttgggttcagcacgccggatgatatccgccatccggaactggaagagatcggctggtttgaagatgagtatgttgtcatcagcaacacccgccggacacggctgacgctggaggattatctcgccgcccggcatctggtggtgacgccctggaatgagaagcggggcgtgctggatttacagcttgagcagatgggctatacgcggcagatagcgatcaaaacgccatcgatgctcagcgcgccgtttatcgttgcgcaaagcgatctgctgatggcgattccccggtttgccgcagagacgctgatgccggcaacggatatcaggatttttgcattaccgtttgcgatacgcccgtttgaagtgaagatttattcccataaacggagtggtaagcgcggcgcgacgaactggctgaaagagaaactgcagatgctggcgcaagaggttaatgcagggcggtga

SEQ ID NO: 444570 - DNA, 1005 bp, Serratia marcescens
atgaatgaccaaaccattattcttaccggcgatcgcccaaccggcccgctgcatctgggccactttgtcggctcgctgcgccagcgtgtggccctgcaacatgattatcaacagtatgtgttgatcgccgacctccaggggctgacagataatggcagcaatccgcaaaaaattcgggacaatattcctgaagtgctggccgattatcttgctgcgggtatcgatccctcgctcacgaccatttgtctgcaatctgcgctacccgcccttgccgaactgaccgcgctttatatgaacatcgttaccgtggcgcgcgtggagcgtaatccaacggtaaaaaatgagattgcacagaaaggttttgcccgttcattaccggtcggctttctggtctatcccatcagccaggcggcggatattaccgctttcaaggccagcagggttcccgtcggtgatgatcaattaccgatgatcgaacagaccaacgaaatcgtgcataagatgaacagcctgtttcccgaaccggtattacgccactgcaaggccatgttgagcgacaccggccgcctgccggggatcgacggcaacgccaaaatgtccaaatcgctgggcaatactttgcttctttccgccagcgaggagaccatccatcgcgcggttagcgcaatgtacaccgacgaaaaacacctaaaggtgaccgatccggggcagataaccggcaacatggtattcacctatctggatgcgtttcacacggataaagcgaaagtcgcagagatgaaagcgcattatcaacggggcggactgggtgatcgggcatgcaaaaatgagctggagacgtgtttgcaggagctgattgccccaatgcgcgagcggcgtgcgacttatattcaggacaaaggcatgctgatggcactgttgaaacagggcagcgaacgagcgcatgaagtcacgcagcgcaccttacaggaagtgaagcgggggctgggcgtgccggtattctga

SEQ ID NO: 444571 - DNA, 957 bp, Serratia marcescens
atgaataaccgcatcactgaacgcttgcatatccgctatccgctcatacaggcccccttgtattttctgaccaatgctgaactcgtcgctgccgtttcaaacgccggagggctgggcacgctggggccacacgccgggcaagacagcctgcccggctcgcgttatgtcgcactggatcgcatgcgggaggagatcagaaaagtaaaagaactgacggaaaacccttttgccgcaacgttaattaacggacctgatatgagtttctggcgagcaaccgcagaaatgctcgttgaagaaggcgtggaagtagtactgatcaatgaagtgctggacgctgaaatatatgatttttttaaaagtcaccgcataaaaatgctttaccgtgccctgacgcccactatcgccaattcgcaagaggcagagaaattaggggccgacatcatcattgcaaccggttttgacgaagggggcaccgtgccatcccgcgtgacggggacgttcagtatcgtgccaatgatagcggatagcgtaaaaatcccggtcgttgccgccggcggtatagctgatgtgcggggtgtgcgtgccgccatggcattgggagcggaaggggtatttgccggcagcctgtttttgacggccctggaaaaccccgcagatgagaaagtcaaacgcctgattgtagagtcgtgcgctgaagatctgctgcttttccgtacgctgccggcgtattaccgcaccctgcccaccactctgagcccgaagctggcagaattagaagcgcagggcaccgaccgtgaaaccatgtttaaggtaatgaacggataccactctttgtggcaggccatgcggctcggcaattttgatcaaggggtcgtctccacaggcacgggtatttccgtcatcaaatcagttcgtccggccgcagaaatcgtttccgatcttatgcaagacttttaa

SEQ ID NO: 444572 - DNA, 882 bp, Serratia marcescens
atggaaaggaaagtggactttaacgcaacgaaattgttcatcgcggtggtgaatgcaggcagtttttctgcggccagtgacagaatgggtgtgccgatctcaaccttgagccgaaaaatcaatgagcttgagcaggcgttaaacgtacagctcctggaacggtcgaggcatggggttaagccaacctataaaggacaacagttctttgaacaggcgcgtctgggcgtcgagctgctggaggatgcacaaaaatcggtaacctcagcccacaaattacagggcaaattacgtctgtctgtcccccctaacttctcactctggtgggatttactgctcgaatttcagcagcgttatcctgatataaaagtattttgtcattcaagcgaaagagtcgtcgatttgtttgaggatggcgtcgatgtggcgctcaggatgggtaacttaaatatcgatgatgtgattgccaaacctgtcatgacggtggagtctttgtttgtggcaagtcccaaactattagcgcgttacggcacgccaaagacgctggctgaaatggcccggctgcccgttgccggctgggaaagtctgaaccatggtttttttgaatgggactctggctcagaaaaggttaaatacgagccattcttttccaccaataatgcacaggcattgattcattatgccttgagtggcatgggcgtctcacaactgttggatttttcagccaggccctggctggaaagcggggagctggtgcagcttttacccgggacggttaaacaaaccctgccgttacaccttatctatgcccgccataaacatccttcagcacttgtgcgggcttatctggatttttgtgctgagtgggtgggaaagctgaagtag

SEQ ID NO: 444573 - DNA, 801 bp, Serratia marcescens
atgaaaaaaacagcatctgttctggcaacgttaatgttgctatcgggttcggccatggcaaaattgcaggattatggcaaaggcaatgtggatatctatttcgtccgtcacggccaaacaatatttaacctgtatgaccgcgttcagggatggtcagatacaccgttgacgcaagcaggcgaaaaagtggcccgtcaattcggcgccggcagcaaagacatcggtttcaaaaaatactattccggcgatcttggaagacagcgggaaacattatcgttgatcatgcaaagccaaaatagccaggcggctcctaaagaacttaaagcattacgcgaagtattttttggcggcttcgaaggcttacccaataatgaaatgaatacggcggcaggtaaagcgctgggcttaaaaagcgatagtgcaatgactgaactgcgtcagcaagggaaaatgtccctgacagaactggcagatgctatcagtaaggctgatgagaagcatgatgctgaaaccgcaggccaggtcagagaccgtatgcaatcggctctgggcatgatggtcaaagatgcgcttcagcaccatgataaaaatgtattggccgtatcctccgggatgtctatcggtattatgatttcagatatgacgaacgatccgctgaaaaataaagggatggggaatgcggccgccgtcaaaatagaataccgcgatgggaagtatcaggttaaagatatcggggatatgcgttatgtcgaggcagggaaaaaaattatcgacgccgccgacgccaagcgttcccattaa

SEQ ID NO: 444574 - DNA, 1170 bp, Serratia marcescens
atgccatttgctctctgggctctggcgataggtgcattcggtattggtaccactgaattcattattgccggccttctccccgtgatcgccaccgattttaacgtcagcattcccgttgccggcaacctggctacgtcctacgcgctgggggtgtttgtcggggcgccggccctgattattctgggctccaaagtaccgcgtaaagccatgctggtcttcctgatggcgttatttgtcgccggtaaccttgttacggcatttgcgcccacgctgggcatcgccattttgggcagagtgattacctctatgacccacggtgcattctttggtatcggctcgatcattgcggcagatatggttacgccctcgaagcgcgtgcgggcaatcgcattcatgtttatgggcctgaccgtagccaacctgatcggcgtgcccgccggcacctggattgggcagcacctttcctggcgtgacgcctttatggcgattgcggtcattggcatcgttaccgttatcagcattggtatgctgatcccgcaccagccccgtccgcagaaccataacttcgcccatgagtttaatgccttcagaaacgtcaatgtgctgcttgccatgggcattaccgtcttcgggccgggcgcgttctttacctccataacctatatcgcccccatgatgacggaacaggccggctacagcgaaagcagccttgcctggctgatgctgctgttcggactggggctgtttgtcggcaaccaactggggggcagatatgcagaccgtgctctgatgccgatgctgtatatcacgctggcggcccaggccatagtgctactgatttttaactttaccacccacagccaggccatgtcggccgtctgtattttcctgatggccgcgttcggctttgcgaccgtttctccgatccagaagctggtgatggataaagcgcgggcagcgggtgcgcccacgctggccgccgccgttaacattggccttttcaaccttggtaacgccattggcgcctggctgggcggcgccgttattggcgcgggtttcggcctgcagtcgcctaactgggcgggcgctggactttccgtcgttgcgctgatcttggccgtattatccggcctgacggacaaaaccgggcaaacggcagagctgcattaa

SEQ ID NO: 444575 - DNA, 930 bp, Serratia marcescens
atgtctaccggatttacagcagaatccctgcggggcattacacattttgtcattacggcaaaatcgagcagttttactgaagccgcagagcagctgggcattacaaagtccgcggtcggtaaaagcgtggccaggcttgaggcgcggctgggaacgcgactgtttcaccgctccacgcgtaaactgagtttgaccagtgacggggaagcctatctcacaagctgcctttcggcgctggaaatcctggactctgcggaaaacacgctcagcaagcgtcaggacaaccccgcaggtaccgtccggatagatatgccggcgtcatttggccggaacctgatgatgccggtactgcttgagctgattagccgttatccggctctgcgactcgccctgacttttaacgatcgtctgatcgacccggtggaggaaggcgttgacctcgtgctgcgcctgggagaacttcagagtaccgatgcgttgatcgcccggcgcctgggccggcagcgcctcatactgtgcgcctcttccgcttatcttgagcagtacggtgtgcccggggacacggaggcgctaaaagcgcacagctgtattatgggctaccggcggggagccccccttgcctggcggctgcgcccggcgggagaacgagaagtgaaatttatctctgctgcggcgcaccagatcagtgacggagacgccatgctccaggcctgcctggcgggagcgggtattgcgcagtttccggagtcgatggtgaagagtcatctcgacgcgggccatctcgtgacggtaatggcggatcatatgcccgacccggttgagcttaacgtcatctggccccgaacccggcatcttattcccaaggtgcggatcatcgttgatgaactgcttacaaaatcttctgaggggtattttggcgacctgaagtag

SEQ ID NO: 444576 - DNA, 954 bp, Serratia marcescens
atggattacagcaaaattatcaaagaaatagggcgcggcaaactgcacgcgcgcagtctggaccgggaaacggcgcgccgtctgtatcaggcgatgctggccggcgaggtgccggagctggaactgggcggcgtgctgatcgctttgcgcatcaagggcgaggcggaagaggagatgcttggcttttaccaggcgatgcagcagcaggtgacgcagctgcagccgccggcggggcggccgatgccggtggtgctgccgagctacaacggcgcgcgcaagcaggccaacctgacgccgctgctggcgctgttgctggcgcgggtcgggctgccggtggtggtgcacggcgtggtggacgatgccacgcgcgttaccagcggggaaatctttcaggcgctggggatcaaggccgccgcggacgccgcaacggcgcagcagcagcttgatggcggcgaggcggtatttatgccggtgaccgcgctgtcgccggcgttggagcgtcagctcggtttacgctggcgcatgggggtgcgcaacagcgcccatacgctggccaagctggcgacgccgttcggcgagcatgacgtgctgcgccttgccagcgtctctcacccggaatacgtggatcgcgttggctcgtttttccgtcagatcggcgcgcgcggcctgctgatgcacggcaccgaaggcgaggcctacgccaacccgcagcgctgcccgcagattcattttatcgccgacggcgaacagcgcgtgctgctggagcgtccggcgctgaatgaaacgccggccttaccggcggcgaaagacgccgagaccaccgcgcgctggattgagcgctgcctggccggcgaggtggcgatcccgcaggcgctggcgctgcaggtcgcctgctgtctggtggcgaccgggcaggcgacgacgctggaacaggggctggcgcggctggcgtaa

SEQ ID NO: 444577 - DNA, 1854 bp, Serratia marcescens
atgcaacaggctctcgattactttaatcagttaaatcaggactatcttcaggtgcaccagaccaaggaggagttgttctggcagcagtatatgggcaccggcgccgatgacgtgtcggcgcgctttaccgcggcggaaagcgcctataagcgctttatcggcgagccgcgccgcctggcggaaatccgtcagctgctggcgcagttggaagaggaaacgccaagcgaggcgctgcgcgcgctgcagcacggcctgaacggctggctgcgtttctttgactgcaacgcggtggaagatcccgaggcgcagaatttattggatcagatcatcgccgccgaggccgatctgttcgatcgtcgcaaagcctatccggtcacgcacctgaacgcgcagggcgagcgggtggcggcgtcgctgggcgagctgctgaccaatcaggcgaccaacgaaaatgaggcgtaccgacgcagttcacaggacgcgctgcgcgatctggaacagtggctgctgcacaacggcctgccggaactgatcggcctgcgcaaccgctttgcgcgccagatgggctaccgcaactacttcgattacaaggtgaataaaaccgagcgcatgacgccggaacagctgttcgccattctcgaccgctttgagcagcagacccgcgaggctaacgcgcacagcctgcggcagctggcggagcaacagggcgaacaggcgctgcagccgtggaacatccgttttgccagcgccggcgacgttacgcggcagctcgatccctacttcccgttctcgcagtcgctggagcgctgggtgaacagcttcaagcggctgcatatcagtttccgcggcgcagcgctgaatctggatctgctggtgcggccgggcaaatacgaaaacggctttatgcacggcccggtgccgccgttcgtgcagcaggggcagtggctgccggcgcagattaacttcaccagcctggcgcagccggggcaggtgggcagcggcgcctacggcctgaataccctgttccacgagggcggtcatgcggcgcattttgccaatatcgcgcagaacgcgccgtgcttctcgcaggagtttccgcccacgtcgatggcctatgcggaaacccagtcgatgttctgcgacagcctgctggacgacgccgactggctgaagcgctatgcgaaaaacgccgccggcgaggcggtgccggatgcgctgatcaaggccggcatcgacgcgcgccagccgatgcgcgcctttaacgaacgccatattctgctggtgccttactttgagtgggcgctgtatcagtgggatgacgcgcagcgtacgccgcaggcgatagcacagctggcgcgtgacgttgagcagcggatcctcggcgtcagcggcagtccgcgcccgacgctggcaattccgcatctgttgtcgctggagtcggcctgttcgtatcagggttacctgctggcgctgatggcggtagagcagacgcgccacttcttcctgcagcgtgacggctacctgaccgataacccggccatcggccccgatctggcgcatcactactggctgccgggcaacagcgtcagccacgacgacaccctgcgcagcctgaccggcgaaggctttaacccggactacctggcgacggcctgcaaccagacggtggagcaggcctggcaggcggcgcagcagacgatggccgcggcggcggcgcgtccgcagccggcggcggatttcaatctgcaggcgcatatccgcgtggtggatggcgatcgcgtgctggcggataacgccgacggcgacgcgcagatgtgccgcgactttgccgcagcgatagaggaacgctcgtaa

SEQ ID NO: 444578 - DNA, 636 bp, Serratia marcescens
atgagcagtgaatcacgttattactatgaacccgccgccggccacggtctgccgcacgatccgctgaacgccattgtcgggccgcgcccgatcggctggatctcttccgtcagcgccgacgggcagcgtaatctggcgccctacagcttctttaactgcttcaactaccggccgccgatcatcggcttcgccagctccggctggaaagacagcgtggctaatatcgtggaaaccggcgagttcgtctggaatctggcgacccgcccgctggccgaggcgatgaacaacagctcggcgtcgctgccgcgccatgaggatgaattcgccttcgccggcctgacgccgctggccggccgcaaggtcaaggtcgaccgggtggcggaaagtccggtgcactttgagtgccggctgagccagtgcatccagctgcagagcgcggccggcgacaaggtcgatacctggctggtgctgggggaagtggtggcggtgcatatcgagcgcgcgctgctggatgagcacggcgtctaccagaccgccgccgcacagccgatcctgcgcgccggcggcccgacggcgtactacgccatcgaggaaagccaccgtttcgatctggtgcggccggacgcgctgaagtag

SEQ ID NO: 444579 - DNA, 999 bp, Serratia marcescens
atgccgcagttcccgccagtaagagtacgtcaggtgcaaaaaaagaaaaccttcccgcagcagaaaaacggcctgcatccccgcaaccgccaccgttcccgttatgattttccgcagcttatcgccagttgtccggccttggcgccgtttgtcacgccgaatcagtggggcgatgagtcggtagactttgccgacccggcggcggtgaaaatgctgaaccgcgccctgctacagcatttttacggcatcgagcactgggatattccggccggctatttgtgcccgccgatccccggccgcgccgactacctgcatcatctggcggatttactggcggccggtaacggcggcgcgattccgcgcggtaagggcgtggcgatcctcgatgtcggcgtgggcgccaactgcatttaccccatcgtcggcgtgcgcgaatacggctggcgttttaccggctccgaggtcgagagcggggcgctgcagtcggccaaaatgattgtcgcgatgaacccgcagttgaaaaacagcgtgcgtctgcggcagcaaaaacagccggcgcggatttttgacggcatcatcggcgctgccgagcgcttcgatgctacgctgtgcaacccgccgttccacgcttccgccgaggaagcgcgcgccagtacccgacgcaagctgcataagctgggcaaaggcgaggtggcggcgcagccggtgcagaatttcggcggcaagaacaatgagctgtggtgcgcggggggcgaagaagccttcgtgtgtgcgatggtggcggagagcgtcggtaaagcgcaaaactgcctgtggttcacctcgctgatttccaaaagcagcacgctgccggcggtctatcaggcgctgcggcaggcgggggcggtggaagtgcgcaccgttgagatggcgcaggggcaaaaaatcagccgctttgtcgcctggacgttccacacggcggagcagcaggccgcctgggccgccgaacgctggcgctga

SEQ ID NO: 444580 - DNA, 1059 bp, Serratia marcescens
atgaaaaccattttgtgtacccggcttaatctgcagtacccgttggttcaggcgccgatggcgggcgtctccacccctgagctggcggcggcagtcagcaacgccggcgcgttaggctccatcagcgtcggcgcctccacgccggagcaggcggaagtgatgatcggcaaaacgcaggcgctgacggccgggccgataaacgtcaatgtattctgccacccgccggtgcagcgcgatgcggcgctggagcaggcgtggatccaacgcttcgcgccgctgttccgccagtacggcgccgagccgcccgctgaattaagcgagatctaccaaacgttccaggataacgcacgcatgctggaagtactgttaaccctgcgcccggcggcggtcagcttccacttcggcatcccgtccgccgcgtttatcgcccggttaaaagcgcacggtatcgtcaccttcgccagcgccaccacgccggaagaagccagccggattgcggccagccagattgactttattgtggcgcaggggattgaggccggcgggcaccgcggccagtttaatctgcaggatgacgaccgccggctaaccacctttaccctggtgcaggcgatacggcgggtcaccgacgtgccggtgattgcggccggcggcattatggacggcgcggggatggccgcgatgctgaagctgggcgcggccggcgtccagatgggcaccgcgtttattctgtgtccggagtccgccgccaatcaggcttaccgccgcagtttgcaaagcccgcaggccgccgatacggtgatggtctccgccatctccggccggccggccagatgcatcaataacgcattctgccggtttacccgcgacgtcgcgcaggacagcattccgccctacccgctgacctatgcgctgggcaaagcgcttgccgccgctgccgccgcccggggcgagccggggttcggcgcccagtgggccggccagggcgcaacgctggcgcgggaaatgcccgcggcgcagctggtgcaaacgctggtcgccgagtggcaggccggctga

SEQ ID NO: 444581 - DNA, 888 bp, Serratia marcescens
atgaaccatacttcactggaaatcttcaaagtggtggcggaagagctgagcattaaccgtgccgcccgacgggtggggcgggttcagtccaacgtcacaacgcgcatccagcagctggaagaagagctggaggttcagctgtttatccgtgagaaccgggcgctgcggctgtcgccgcagggcaagaaattcctggcgtataccaaaagaatgctcagcctggcggaggaagcgcgccagtctctgcatccccacagcccgagcggccagctggcgtttggcgcgatggagtgcaccgccgccagccggctgacgcagccgctggcgacgttcagccaggcctgcccggcggtgcggctgagctttaccacgctgccgacgcgccagctgacggaaaaggtgcaagagtgggaactggactgcgcgctggtggcgctgccggctgatgaagaaggggaggtgatgtgccctgacggacttgcctgccagccgatgtttgtcgagcggctgatgctgctgcaggcggcggaaggctgcgacgccgggaatgggcgcaccgcccggaagctggccgcctttgttgacggctgcacctaccgggaaattgctctgcgcctgctggccggcggcacgggcgatcgaccgcctgaggtgcaggcagtcggttcttaccatgcgatgctggcctgcgtcgcgtcgggcagctactgctgtgtgctgccgcaaagcgtgcttgagctgctgtcgctgccggcggggctgagcgtgacgcctgccggaacggccgttacccagtttatctggcggtcggagagccgttcgccggcagtggaaagtctgcgccgcacgctgctggcgacgtccaatatggcggagatgtcacggtga

SEQ ID NO: 444582 - DNA, 504 bp, Serratia marcescens
atgagtaccgcaaaactggtgaaaacgaaatcttctgaccttctgtatacccgcaatgatatggatgacaaaaccaagctggcaactatcagcatcctgaaccaccagctcacacagtttattgacctgtcgctaatcaccaaacaggcgcactggaacatgcgcggcgcaaactttatcgccgtacatgaaatgctcgacggcttccgcaccgcgattaccgatcatctggatatcttcgccgagcgcgtggtccaattgggcggcattgcgctgggcaccgtgcagaccgtcaacgcggccacgccgctgaaaagctacccgacccatatccacagcgtacaggaacacctgaaagcgctggccgaccgttacggcatcgtggcgaacgacatccgccaggcaatcagcgccgtggatgacgaagacaccgcagatatctttaccgccgcttcgcgcgatctggataaattcctgtggtttattgaagccaatatcgaataa

SEQ ID NO: 444583 - DNA, 1209 bp, Serratia marcescens
atgaagacgctaaccgcagtttcaatcgctatctctttgatttcaggctatgcctctgcgcaaaccatcgtgttgaccgacagtgaaaaaggcattgaacagggtaactggcagaccgacagccacaagctgaagctgggcggcgccgatttcagcctgcgtcagcaggtgttgcacggtggcaaacaggaggggtcgaaagtgattaccctgaccagccccggtgggttgaccatcgcgctcagtccgacgcgcggcatggatattttgcatgtcaacggcgccggcgtacggctggggtgggattcgccggttgacgaggtggttaacccggcctatatcaatctggaaagccgcaacggtctgggctggctggacggctttaatgaaatgatggtgcgctgcggctttgcatggacggggcacccgggcgttgaggacggcacgctttatacgctacacggccgcgccggcaatacgccggcttccaaagtgctggtggagattgatgaaaaagcgccatatacggtgcgcatccgcggtttgctgaaggaaaacacctttaagaaaagcaacctggaaacctggaccgagctgcgctacgtgccgggaagcaccgcctttaccattgaagatagcctgaccaaccgtgcggactacccgcgggactatcagatcatctaccacagcaatttcggcaagccgttactggaagaaggcgcgcgattcaacgcgccgatcaaggagatctcgccgtttaatgactatgcccgcgccggtttgaaaaactggtcgcagtatcaggggccgaccaaaggctttgatgagatggtgtttaacatcgtgccttacgccgatgccgaggggaaaaccctggcgatgctcagcaaccggcagggcgatcgcggcgtttctatcggttttaatacccgtcagttgccgttgctgacgctgtggaaaaacaccgataccgagcggcagggctacgtcaccggcattgagccaggcaccaattacgcttatccggtaaacatcgagcgcgaacaggggcgtatcaaacagctgcagccggggcagagcacgcagttcgcgctgacctacaccctgttgcagaatgcgcagcaggttaagcaggccgaggagcgggtcaaggcgctgcagggcgaccgcgatgtcaaactggtggcgcagccgatagcggtggaataa

SEQ ID NO: 444584 - DNA, 474 bp, Serratia marcescens
atgattttaaatagtttatttaatccccgttatggacagggactgtcttcagatctggctgacattctgacgcaggtacgtcagcaagatctgcctaatctgcccctgggacgccataacattgacggcgatcgcatctttatggaagtggtcgaactaaccaccgaacctgccgaacaaaaacgcgccgaactgcactaccagtatctggatatccagatactgctgagcggtgaggagcgtatcgactacggcctgccgggcagcgagatccactgtgaggcctatcagcagcagcaggattgtcagcgggccgatatccgccgcccgtggcagacgctgcatatgacgcccggcatgttcgtgctgttcttcccgtttgaacctcataaagccggctgtcagctgcaaagcccgcaacacatcaagaaagcgatcgtcaaagtgctctatgaaccgccgtatgatttctaa

SEQ ID NO: 444585 - DNA, 888 bp, Serratia marcescens
atgtcctcgtcggtttctgcaaaagcgtcttctatactgctgccggtgtgtttactggtggtcgccatggtgtcgattcagggcggcgcctcgttggcgaaaagtctgtttcccctggtcggcgccgaagggatcaccacgctgcgtctgtgcatcggcacgctgatcctgtttattatcttccgcccatggcgcatgcgtttttgcgccggtaaccgcctgccgctgctgatttacggcctggcgctgggggcgatgaactatctgttttatctgtcgctgcgcaccgtaccgctgggcatcgccgtagcgctggagtttaccggcccgctggcggtggcaatgttctcatcccgccgggcgatcgactttgtctgggtagcgctggccatcaccgggctgatcttcctgctgccgttcggccacggcgtcggcggcatcgacccccttggcgccgcctgtgcgctgggcgccggtgcctgctgggcggtatatatcattttcggtcagaaagccggcggcgatcatggcccgggcaccgtggcggtcggctcgctgatcgccgccctggtgttcgcgcccatcggcgcctggcacaccggcgcggcgctgcttaacgtggatatcctgccgctggcgctgggcgtcgctattctgtccaccgcgctgccctactcgctggagattatcgcgctgccgaaaatcccggcgcgcaccttcggcaccttaatgagcctggagccggcgatggcggcattttccggcatgcttttccttggcgagcacctgacgcaggtgcaatggctggcgctgagcgccattatcaccgcctccatgggcgcgacgctgaccatcaagcccaaaccgcgtattgaaagtctgccttaa

SEQ ID NO: 444586 - DNA, 519 bp, Serratia marcescens
atgaaaaaaattgcatgtctttcagcagtagcagcttgtgtattagcagtgaccgcaggtaccgcgttcgctggccagagcaccgtaaccggtggctacgctcagggcgatttccaaggcgttgctaacaaagctgacggcttcaacctgaaataccgttacgagttcgacaacaacccactgggtgtgatcggctctttcactcacgtagagaaagaccgtgctgagaacggtacttacaacaaagctcagtacaactctatcactgcaggtcctgcttaccgtttcaacgactgggcaagcatctacggcgtgatcggtgtgggctacggtaaaaacgttgctaacgcacaagacggttctcaccgtggcggcagcagcgactacggcttcacctacggtgctggcctgcagttcaacccaatccaggaagttgctctggatgttggttacgagcagagccgtatccgcaacaccgacatcggtatctggagcgttggcgtaggctaccgtttctaa

SEQ ID NO: 444587 - DNA, 540 bp, Serratia marcescens
atgaattcaccccgcttgactgcagctccccgcctcaccaccgaacgcttaatcctggacacttataccctgaatgacttcgacgccgtggcggcgatgagcgccgatccgcaggtgatgcgctatattggcggcggcgccgcgcgcgatcgagaagagagttggggacgcctgctgcgctatatcggccactggcaactgctgggttacggttactgggcggtgcgggagaaacacggcggtcagtttatcggcagcctcggcttcgccaactatcagcgcgatatcacaccggcgctggaggccccggagatgggctggacattgtgctctgccgcccacggcaagggctacgcgacggaggccctgcgggcggtgctggcctgggggaaaactgcgctgccgggcggcagaacgcagtgcatcatttcaccgcacaaccagccttcgattaagctggcgcataagctgggctttcgtgaaacccaccgcgccgaataccatcagcggacggtgttggtgatggagcagacgctctga

SEQ ID NO: 444588 - DNA, 777 bp, Serratia marcescens
atgcctaaatttgccgccaatttatcgatgatgttcaccgaactgccgtttctggatcgcttcgccgccgcagccgacgccggttttaaagcggtcgagtttctgttcccctatgactaccccgccgagcagctggcggaacagctgcgtcagcacggcctgcagcaggtgctgttcaataccgcgccgggcgatgccgccgccggcgaatggggcctggcggcgctgccgggccgtgaagccgaggcgcacgccgatatcgaccgcgcgctggagtatgcgctggcgctgggctgccccaacgtgcacgtgatggccggcgtggtacccgccggcgcggatccggcggcctatcgcacggcctttatcgacaacctgcgctatgccgccgacgcgttcgcgccgcacggcgttaacgtgatgattgaggcgctcagcccgcaggtgaagccgaactatctgttttccagccagcatcaggcggcggcgctgcaggcgcaggtcgatcgccctaatctgtttatccagttcgactttttccacgcgcagttggtggacggcaacatcagcggcctgatgcaggcgctggccgggcgctacggccatatccagatcgccggggtgccggatcgtcacgaaccggacagcggcgagctgaattacccctggctgttcgaacagctggaccgcctcggttacggcggctggatcggctgtgaataccagccgcgcgcggcaaccgacgccgggctggcgtgggtcagaccctatctgtaa

SEQ ID NO: 444589 - DNA, 1260 bp, Serratia marcescens
atgttacttggcgtaattgctgatgattttaccggcgccaccgatatcgccagctttctggtggaaaatggcctgtcgacggtacagctgaacggcgtaccggacaacgacgacgccgtacacgcacaggcggtggtgatcagccttaaatcgcgttcctgcccggccgaacaggcggtcgaacaatcactgcaggcgctggactggctgcggcgtcaggggtgccaacggttttacttcaaatattgttccaccttcgacagcaccgcccgcggcaatatcggcccggtgaccgatgcgctgctcgatgcgttgggagaaagccagacggtgatttcaccagccttgccggttaacggccgcacagtctatcagggttacctgttcgtgatggaccagctgctgtccgaatccggcatgcgcaaccacccggtcacgccgatgaccgacagtaacctgctgaggctgatggaggcgcaggccagaggccgctgcgggctggttgacgccgccgccatggacgccggcgccgatgacgtgcgcgaacggctgcaacagctggcgcaacagggcgtacgctatgtggtgctcgatacgctgaatgaacaacacctgctgactcagggcgcagcactgaaggacatgaaactggtcaccggcggctccggcctggcgatcggcctggcccgccagtgggcgcagccgggccagacgcaggctcaggccgccggcgcgccgcagggggagaaggccgtggtgctgtccggctcctgctctaccatgaccaataaacaggtcgtccgttaccgccagcaggcggcggcgcaggccatcgatgtggcgcgctgcatcagcgacgccgagcgtgagcgctacgcccgcgaactgagcgactgggtgcagcaacagagcggcgatctcgcgccgctgctgtatgccaccgccgagccggacgcgctgcggcagacccagcagcaatacggcgtcgaggccgccagccaggcggtcgaagcgctgttcgccgcgctggtgcggcgactgtatcaggccggcttccggcgctttatcgtcgccggcggcgaaacctccggcgtggtgacacaggcgctggacatccgcggcttccatatcggcccgtgcatttctcccggcgtaccctgggtgcgcgccattgaacaaccggtctccctggcgctgaaatccggcaatttcggcgacgaaaacttctttgccagagcacaaacggagttcccgctatga

SEQ ID NO: 444590 - DNA, 915 bp, Serratia marcescens
atgacacaagccgctaactataccgtttgcatcgtgggcctcggctccatgggcatgggcgccgcgcaatcctgtatcaacgccggcttaaccacctacggcgtcgatctcaatccgcaggcgcgcgccaccctgcaacaggcaggagcaaaacaggttgccgccagcgccgatgattttgccgccgaactggacgcggtgatgctgctggtagtgaatgccgcccaggtcaaacagatcctgtttggcgagcgcggtctggccgggcagctgaaacccggtacgccggtgatggtctcctcaaccatttccgccgccgacgccgccgatatcgccgaacgtctggctgcgcaggggctggcgatgctggatgcgccggtttccggcggcgcggtcaaagccgccgccggagagatgacggtaatggccgccggcagtgaagccaccttcgcccggctacagccgctgctcgacgccgtggcgggcaaagtgtaccgcgtcggcgacgaaatcggcctcggcgctacggtgaaaatcattcaccaactgctggccggcgtgcatatcgccgccggcgccgaagcgatggcgctggccgcccgcgccggtattccgctggatgtgatgtatgacgtcgttacccacgccgccggtaattcctggatgtttgaaaaccgtatgcgccatgtagtcgacggcgactatacgccaaaatcggcggtggacattttcgtcaaggatctgggactggtagccgacaccgccaaggcgctgcacttcccgctgccgctggcttccaccgcgctgaatatgtttacctccgccagcaacgccggctacggtaaagaagacgacagcgcagtgatcaaaatcttcaccggcattgaactgccgcaaaaacaggagttgccataa

SEQ ID NO: 444591 - DNA, 765 bp, Serratia marcescens
gtgattccggtagaacgccatcaacaaattctggccttggttgccgagcgcggcgtggtcagtatcgccgagctgacggagcggctggcggtgtcgcatatgaccatccggcgcgatctgcagaagctggaagagcagggggcggtgatcgcggtatccggcggggtgcaggcggccgaacggttggcgattgaaccgtcgcaccaggataaggaaggaatgttcagccagcagaaggctgcgatcggtgcgctggcggccagcctgattccggccaacagctgtatttatctggatgccggcaccaccacgttggcgctggcgaagcagataggtgagcgcggcgatttaacggtggtcaccaacgattttgtgatagcggcttacctgctggaaaacagccagtgtgagctgattcacaccggtggcacggtatgtcgggaaaaccgctcctgcgtgggagaggccgcggcgcaggcgctgcgccagttatttatcgatctggcctttatttccgcctcctcctggagcatgcgtggcctgtcgacgccgagcgaggataaggtggcggtgaaaaaggccatcgttgacgccagccggcggcgtattctgctgagcgacacgtcaaaatacggcaaggtggccacctatctggcgctgccgatcgcggtgtttgacgccattattaccgacagccatctgcccgacaccgcccaaactgctattcagcaggcgaatatcactctgcatatgaccggcgagtag

SEQ ID NO: 444592 - DNA, 783 bp, Serratia marcescens
atgaaatatagaattaatggacagattctttttgatacggacagcggcagcctgggattggagggattcccggaagaatcgctggctatttctaatccgtcaaagcggctattgcttttacttattgcgcaccacggtgagcaggtcagccgcgagttgatattccgcaaggtgtgggatgattatggcatggtgtccagtaataataaccttaaccaatgcgtgagcaaattacggcgggtgctgaaaacgttaggtattgatgacgaagtcattattaccgtacccaaagtcggatttatgctggcgcataatatcacgctggagacggatgaaccgcacatcacgccgccgcagaacatagcagccgaacagggtgagcggcgcgccgtatcctggcgcaacgccgggcggcgtttgcgtacgggcgtggcgcttggtgcgttgcttttgttggttatcagcgttggcatctggctgatttatcgtaacagtgcggtcagacaggagcgtttaattggtgaggtgaataactgcaaggtatttttatcggcgccgcgtgctgcgctgaatggtaatgcggatcaggttaacgatatgctcgcgtatattaatgccaatcctgaatcgtgtaagagcggcgaatatttactgttgctcagcagtaatcaggtagggtcctatattaaaggcgtttcccggctgtttattttgaaatgccgggtggcgcgagaataccgtgttgaggtgtgccgcagtcagaaagacggaccgctgttttag

SEQ ID NO: 444593 - DNA, 645 bp, Serratia marcescens
atgaaaaataacgatcggagccgccattttattttatatgatgcgatgccgtgggttggcatggggctggaggcttttctacgcccgctgagtgcgacgactcaaccggttgccagcctcagcgagctgaaggcgatactgatgcagcagccccggcaaacggtgattatggagctgtacggtgcgcaggagtgcctctatgacggcctctattttatactgcatgagaaagccttctggccgaataccccctgggtggtgctgacggatatcgagaatcacagcgttttgcgcctgctggcgtcgataccggatagcgtactggtatccaaacgcgacggcttagaggcgattttggacgccatctctgcggcgcatcatgccgtgcactatctcagtccggccatccggcgcagtatcgccggccagcaggagagcggaacgttcaagcacctgtccggcagtgaatggcgcatcctggcgttaatggcggcgggcttctctgccaaaagcatcgcgaccaccacctatcgttcctataaaacggtgagcacgcataaactgaatatcatgcataaacttggccttaatcagagcggctttatccacctgctgctttctctgcgtacgcgttggccgtgctga

SEQ ID NO: 444594 - DNA, 534 bp, Serratia marcescens
atgactatcaccaaaatcgctctcgctgttgccgccatgatgctgtccggcgtcgccgccgccgccaacaataccattcagtttcagggcgaagtctcagaccagacctgtaccgtgagcatcaacggcaatgcctccaccccggtggtgctgctaccgacggtatccaaggctgacctggcggccgccggcgccaccgcaggccagacgccgtttaccatcggcctgaccggctgcaccgccgatgcagcgaacgccaccgccgttaaaacggtattcgtcgccaacaacctgaccgccgacggccggatgggcaacaccggcagcgcgaccaacgtttcgctggagctgattgatccggcaacgccggctgcgccgctggatctgagcggccaggcggggacgccggggttgagcctggcggccggcgcgacctccgcctcttatgactttgccgtgcgttactactctgagggcagcgcgaccgccgggtcggtattgggcagcgtgcagtacgcggtgtcgtatcagtaa

SEQ ID NO: 444595 - DNA, 735 bp, Serratia marcescens
atgacgaacaagggattttgtcagtcactttgtctcaccgccgcgctgctggccgggccggcgatggccagcgtggtgatgctgaatacgcgggtgatttatccggcggacgctcagtcgcagaccgtacagttcaccaaccatagcgacatcccctatgtaatgcagatgtggaccgacgtgaataatccgtcgtcaacgccggaaaatgcagacgggccgtttgtcacggtgccggcattgttccgcgttgagccgaagaccggccagtcggtccggctggtgtttaccggcaaggatctgccgcaggaccgtgagtcggtgttctatctgaattcggcgcaaatcccgccgaaaaacgccgtcaacggcgccgagaaccagatgctggtggtgctgcgtaaccgggtgaaaattttctatcggccgaagaatttgccgggcaatgcagacggcgtcggcggacagctgcgcttttccctgcgtcagcagggcgggcagtggcggctgaatgcctataacgattccagctattacgcctcggtaattggcgcagcggtgctggtcggcaagcgggccgtgccgttcaaaacggacatgatcgcacctaaatcacaggccagctggccgttattgacgcgtacgccgtcgccggccggcgcgcagaaagtcacatttaccctgatcaatgactacggtggccatatcaaggcggaagcgcgtctgagtcaataa

SEQ ID NO: 444596 - DNA, 2598 bp, Serratia marcescens
atgcaaacaacaatcatatattccggcagcgcgcggaagagtgcgtcgcctggcgtgatgcctggctgcggcgcgcgtctgaaaccgctggcgttgacgctggggctgctgacgccgcttgcggccggcgccgggcagtttgaatttgacgatagtatgctggtgggcagcgcgggtcagcagagccttgcccgcttcagccgtgcaaatacggtgacaccgggcgactatcaggtcgatatttttatcaacggcgcttttctctcccgccagacgctgacgtttaccgcgcaacccggtcaggacgtcgttttcccctgttttagccgcgacgcgctgattgccgccggcatattagccgtcaatattaaaagcagcgccgaacaggccactgccaatccttgcctgcctctggagcagcaggtcgccggcgccggcagccgctttgattttgcccgcctgcggctggatatgtccgtgccgcaggcgctgatgaagcgtgtggcgcgcggttcagtgccgcctgaggagctgtccgttggcgaaacgctggggttcgtcaattacgacagcaactattaccgcagtaaaagcagcggtacgaccagtgattcgacttatctcgggctgaacgccggctttaacctggggctgtggcagctgcgtcagcagtcgagctatacccgctacaccagcgaccatgcccctacgctcagcagttggaagtcggtgcgcacctacctgcaacggccgctgccggcgctaaacagccagctgacgctgggcgacagttttacttccggcaacctgttcagcagcctcggttttcgcggcgtgcggctggaaaccgacgatcgcatgctgccggagtcgcagcgcggctatgcgccgaccatccgcggcgtggcctcgaccaccgccaaagtgagcatcacccaggccggcacgcagatttatcagaccacggtggcgccgggcgcctttgtgattgacgatctctatcccaccagctatcagggcgatctggtggtggaaattcaggaagccgacggccgggtgtcgtcatttaccgtgccgttttcggcggtgccggactctttgcgcccggggcgctcacgtttcaacctgtcggccgggcaggtgcgcaacctgggcgacagcgatgatatgttcgccgaactcagctaccagagcgggttgagcaacgctgtaaccgccaatagcggcgtacgcattgccgacggctaccaggcattgctcggcggcgcggtgctggccagccgctacggcgcgctggggatcaacgcggtgtattcgcgcgccgatatgtggggcgatacgctggacggctggcgcgtcggcgctacctacagccgtacctttacccccactaacaccacgctggcgctggcgggctaccgttattccaccgaaggctaccgcgatctgggcgacgtgctggggctgcgcaacgcgcgcgatcgcgacgcggtctggagctccagcacctatcagcagagcgagcagtttgtcgccaccgtcagtcaggggctgggggcgtacggccagctctatttttccggctcgaccagcagctaccgtggcgggcgcggacgcgacacgcaataccaactggcgtattcgcacagctaccgcagcctcagctataacctgtcgctcagccgtcagcagaccggcagcacccgctatggcctgcaggatgcgacctatgttgcgagcggcacgacgcaaaacgtggtgatgctgtcggtatcactgccgttgggcagtggctcgcgctcgccgattctgtcggccggcgtcagccatcagagcggcgatcgcggctatagccattatcagtcggcgctgtccggcacgctgggcgacgaccagagcctgagctatgcgctgaacggcgcgtatgacacggccggcgccggcagcagcttcggcgccaacctgaccaagcagacgtcggtcgccacgctgggcggcaacctgtcccacggtaaacattacacccagggcggcctgagcgcgcgcggcgcgctggtggcgcatgcgggcggcgtcaccctcgggccgtacctgagcgatacctttgcgctggtggaggcggaaggcgtcagcggtgcggaagtgatgaacggcatgggggcaaaggtcgaccgttttggctacgccattgtgccgtcgctggtgccttaccgttacaacgacgtcacgctggacgccaaaggggcggaaaacgtcaacgccgaactgacggagaaccagcagcgcatcgcaccgtacgccggggcggcggtgaaagtgcgctttaaaacgctggaaggctacccgctgctgatcagactcagcccgtccggcggcgtgctgccgctcggcgctaatgtgtatgacgagaacaatgcggtggtcggtctggtcggccaggggaatcaggtttatgcccgggcgcagaaagcccgtggcgagctgcgggtgaaatggggtgagtcggccggcgcgcagtgcacgctgcgctacgacttacgcgctcaggctgtgaaacagtcgctttatcgtctggcgttgccatgcgcgggccagtaa

SEQ ID NO: 444597 - DNA, 1353 bp, Serratia marcescens
atgatgaacatattctcgcgcgccgcgctgctgatgctggccggcagcgtgtggctcggtcaggcgcaggcgacctgctaccggattaccgccaccaacactaacgccagttcgaactattataccgatccgagtaaaggcatcggcgccgcctggagcggctcgaccgatacctccggctctatcggcacactgccgacgacggtaaatatcaataacagcctgtttcagccggacggtacgccgatcgccagcggcaccgtcagcgcgctggaggccggttccggcagctacagcgccgatcagatcctgttccgctgtaccgccgatgaagccggtaagctgtatgaatactatgccaccaacggcgactcggagtgggccggcaaggtggaggtcggagcggcgtccggcctgccggaaacctaccgcacctatgccaacggcatggcgctgcgggccaccaatctggcgaccggcgaatactattcccgctactggaaagcgcggccgttaaccaacctggaaacggattcgcagggatggatattggtgaaagccaagaacttcagcgatacgaaggtggagctgttccgcctgagcaactccacggggccgatgaccaccaccggcgtctatccccagtcgcagccggccacctatatcgcttttcagggcggcgggctgtcgccgtccctgagcgtcggcgcggattcgctatcgcaattcagcggctggtacggcgcctggcccggcgcggtgaacctgtataaccggttatatattcgccgctccgccacctgctcggtaaccaatgtgacgccgctggtgcgctttacgccgattaccgccacccagttgcgcgccggtgaaacccgccagatgccgataaccattcagtttgactgccagaccggtacgccggcgaccagcggcgtcggcgcatttgccagcggcatcgccgccaaccagacggcgatgggcattctggtcaacccggcgaatgccgctgcggcggtggcggaaggcgtaggcaccgccggctccggcgtcagctatctgctgtcggacggctacggcgtcgatccgaacgtcgccaccggcgtcggcatccggatttcccgccccggcggcgcgatattaaacctgctcagcacgctgagcggtgtggtggccggcggcaaccgcgccggctggtatccggtgctggatgacgccagcgccggggcggtaaccaacggggtgacccgctacagcaaaaccctgaccgccacgctgcaggcgctgccgggaaaaacggtcaccgccggcagcgtgagcgccagcgcccaggtgattattcaggtgcaataa

SEQ ID NO: 444598 - DNA, 732 bp, Serratia marcescens
atgatgatgaaatgtttgaaggccgctttgtgcgcctggctgggccttggcggttacgcatatgccggggtgattgtcgagtcgtcgcgcgtggtatttgccgccgccgatcgtgaacgctcgctgctgttggtcaacggcaacgactatccggtggtggtgcagacctgggtggacgacggcgcgccggacggaacgccggaaacggcgggcgaggtgccggtgatgccgttgccgggcattttccggctggagccgggggagaagaaaaacctgcgcctgctggcaacgcaggtggcgcagccgtcggatcgtgaatcgctgtactggctgaacgtgtatgaaatcccgccgaccgatgcgcatttgccgccgggcgtatcggcgctcaaagtagcggtgcggctgcagctgaagctgttctaccggccggacgggctgcaggggcaggcggaacaactggcggcgcgtcagcgtttcagcctgacgcggctgccgggcaagctgatgctgacggtgagtaacccgacgccgctgtacgccacctacggtcaggcgcagctgaatggcgacggccgacagacggcgttggcgatcggcatgctggcgccgttcgccagcaaaacgcttgatgtggatgagcaacgcgacggccggccggcgagcgtcagctatgtgctgatcgacgatgacggctacggcgtcgccgagcgtgccgtactgaagccataa

SEQ ID NO: 444599 - DNA, 591 bp, Serratia marcescens
atgcctaaaaataatgtccttgtcattagtgagtgtaaatacagctacgtcggcctgtccgtgctgttgaaaaaacattacggccaatatgatatccgcctgttttccgactttatgcacggcggcgccaaggcggagaagatcgtcaaacatgacatcgcgctgatctttacctcgcagaacctggagcagagcgtcaatgttatcgagagcctggtcgccatgcacaacggttatcgcagcaatacccgcattgtggtgttctacgacgatgaacgggtggtcaatctgctgtcggtgctggggatcacggtcgaactgatctccgcgcgcatgccgctttattcgctgcaagaaaaattgcagcagctgttcgacagcccgatggccggcggcatccgggtgcagaaaacccgtgagctcagcccggcggaaagcgacgtgctgtttaacctgctgcgcggcgacagcctgttgtgtatcgcgcaaaagcgcggcacgcatccaaaaaccatcttttctcagaaatacagcgccatgcgcaagctgcgcctgcgcagcatgagcagcatttttgttgcggccaaataa

SEQ ID NO: 444600 - DNA, 717 bp, Serratia marcescens
atgagcacttcttttatagagagaaataacggtatctattttacctttcagccgatgttcaccagaacggggcagttgatcgccgttgaatgcctgtcgcgttttaccctggacagcgtattcgctcattgctcgccggagcagttcttcaaaagcgcggacggcctgacccgcatcgaaatcctgcaagagcaggtcgaactgatagagaaatatcaggcctggttcaatcaacatcaggtgattgtcacgctaaatgttgacgatcactcactggcttcattagccagcagccagtttgcagaaagaataaagtccatacgttgcatccattttgaaatcagcgaaagcgcgacgcgcctggtaaaagatcgcgtccacctcgatccgacgctggagggatattcgttttggcttgatgattttggttccggctacgcgggcttttccgcactttataacagccgtttccgtttcgttaaactcgaccgcttcctgttgtggaattttatgcaacggcccggcggcgaaggtttaatgcgcgcattactgcgttttttttacctgaataattataaggtcattatcgaaggtgtggaaacgcccgaccataaaaggtggttgaacgaaatgccctattacgcactgcaaggaaagctgtggaaggagtccgacatcagggacttaaattcgcttctgacagctgaatacttctaa

SEQ ID NO: 444601 - DNA, 282 bp, Serratia marcescens
atgcgtatacccgaaaatacaattttatcgaccctgcgaaacggtgggtgcattaaaagcttttaccggcgagcggcgcggagtccccgacaggagaaatcagtgctggccgacggctatatacttgaatcacccgatgaacagggtgagatcatactgagtcatgccgatttcttgtcagtgaaagagaaactggcagaaacagaaacttgggagcaggtcgtgggtaacatacttttcggtggaagcagctggatgctttgctccgatgtggacgattaa

SEQ ID NO: 444602 - DNA, 444 bp, Serratia marcescens
atgcctttgatccgaaaagccttccagcggctgcattatcccgttgatattatcgaccagtgtgttcgctggtacctcgcttatgccctgagtctgcgtaatctggaagaaatgatggcggagcgtggtatcatcgttgaccattccacgctgcatcgctgggtcatccgcctggtgccgttactggataaggcatttcgccgacataaatgtgccgtggggcgccgctggcgcatggacgaaacctacatcaacgtcaaagggcagtggaaatacctataccgcgccgttgacagcgcgggacagaccatcgattttctgctgaccgccaaacgggatacggcagcggccctacgcttctttcgcaaggctatccgtcaccatggcgaacgtagcgcccctgcggggcgagcacggctgctttgcagcctcaaccgtctttaa

SEQ ID NO: 444603 - DNA, 924 bp, Serratia marcescens
gtgattgacagaacgaaccatctgattagcgactggctgatttatatccgggtagtggagtgccagagcttttcagccgccgcacagtatctgaaccgtagcgtgtcggctgtcagcaagtcggtgtcaaaactggaaaacaccttaaacacccagctgatcagccggaatgctaggaattttgagatgaccccggccggggaggcaacctacgagaaagccctggagatgtaccgggcttatcgggatttggtcgcgaaactgcaggcatcttccggtcagatacagggaacgttgaggctttccgctccgaccgtgctgagtgactgcatcattcccggctggataatggcctacacggacagtcatccgatggcggtcatcaatcttcagtcacgggagggaagcagcttttccagcaactcgcaggagtttgacgacctggtaataaaaagcggctacatagacagttccgacctagtgcataaaaaaatcaacccggtccctctcgggatttatgcgtccccggactatctgtcctgccgtcagatcgttcatccggacgaactggtaaactgcagtatactcaaactgcagcatccgtcgctggccgggccgttaacgttcacgggaaaggacggcgacaatgttcatgtcgctgaaacccgcccggtttttacgtccaataatgttagcagcctcgttcagatggccacgcaaggtagagggatctgcctggctgtacctgcgtggactgtcaggcagcaccttgaagacggacgcctccagactgtgctgccggactggtctcttcctgcgctgccctcctatctggtctggcgctaccgaagtaattattccctgctgttcagggacttcattacctttgttgaacagcagtggaatgatttattcagcaactaa

SEQ ID NO: 444604 - DNA, 291 bp, Serratia marcescens
atgaaaaaataccacatcgcagtattgctaaccatgatggtgagtggttgcgcacagcaggcgttcaccctgaaaaatgaacctgccggaatgccggacagaactgtaacccatcacttcttcgtttccggtatcggccagaagaaaaccatcgatgctgccgctgtatgcgggggagccgacaaggtggttcgtactgaatctcaggttacttttgttaatggactgctcgatgttattacctttggtatttatacgccgcgtgaagcccgcgtctactgttcccgttaa

SEQ ID NO: 444605 - DNA, 639 bp, Serratia marcescens
ttggctaaagttaatctactgcttgccggtgcattactggcgttattgcttcccgctgtcgctgtggcggcggattaccgcgcgggcgaacaatatactcgcctagataaaccggtggcctctgctcctgcggtggtggagtttttctctttctattgcggtccctgctatcagtttgccgatacctaccatgtgggcagcaccatcagccaagcattgcctgcgggcactaaactgaccaaataccacgttggcctgatgggaaaactgggtaatgagctgaccgaagcctggtcggtggcgatggtgatgggcattgaggacaaaatagaaagcatgctgttcgacgagctgcagaagaagcgcgccatcaacagtgacgaagatatccagcgggtgtttgcagctgccggtgtggatgctgttacctatgaaaatgcgcgtcacagcctgctggtgaagggcatgattgccgaacagaatgaggcagtcaaggcgctggacgtgcgtgcaacgccttcattttatgtatccggcaagtacaaaatcgacaatgccggtatggcgagccaaagcgttgacggttatgccaaagagtatgccgccgtggtccactatctgttgaccacccaaccttaa

SEQ ID NO: 444606 - DNA, 621 bp, Serratia marcescens
gtgctaacactttttatcaccgttggaggcattcatctgctggcctctatgatgcccggtcccgattttctctatgtttcatcaacatcggcagcccgcaaccggcaagccgcacttgcggccgtgtttgggataacagcgggtgttgccatctgggcgtttattgcgctaaccggccttacagtactactgcacaggatggcttggctgcagcagatcatccagatttctggcggggcttttctgtgctggacagggttgcagatgatgaggcaagcagccagacaggaggctacatctggagcagggccgagcgatagttacttccgagggaggcacgttttcttccgggggctgctgactaatttgtcgaacccaaaagtctttgtgtattttggttccgtattttctttatttactggtgatgatattccttatcaagctcgctggatcctgctggtaatgatggtactcatctccttcttctggtttttcctggtagcaaccgtgttttcgctcccgcgcgtgaagttgggctaccggaaatggaccagtaagataaataaaatggctggcgttatgtttaccgcttttgggctgcacctcattttctctcactag

SEQ ID NO: 444607 - DNA, 582 bp, Serratia marcescens
atggcggagcgtggtatcatcgttgaccattccacgctgcatcgctgggtcatccgcctggtgccgttactggataaggcatttcgccgacataaatgtgccgtggggcgccgctggcgcatggacgaaacctacatcaacgtcaaagggcagtggaaatacctataccgcgccgttgacagcgcgggacagaccatcgattttctgctgaccgccaaacgggatacggcagcggccctacgcttctttcgcaaggctatccgtcaccatggcgaacctgaagtggtgacgatcgataaaagcggcgccaataccgccgccctgaccacgttcaatgccgacaaccccgaggaggaaagcatcaccgtcaggcaaagcaagtatctgaacaacctgattgagcaagatcaccgtcatatcaaacgtcggatacgacagatgctgggattcaaatcgtttcgccgagcacagacgctgctgattggcatagagctgctcaacatgatacgtaaagggcaatatcaacatccgcaaagtgatggattgtcaccagcagaacaattttatctgttggctgcctaa

SEQ ID NO: 444608 - DNA, 579 bp, Serratia marcescens
atgatttcaagttctaactcaatgcagaaaaaactaatcaccatttcaataatggccgtgctgggcctggggtccggtttcgtcaatgcagcatcaaccggtacgattacttttaatggtaaagtaacggatacaacctgtaatgtaaatgtcgacggtcagggatcgaatgccacaatagtattgccgacggtatcaacctctgagctgggaagtgcagggaagacttcgggacgtaccaatttcaatatgaacctgaccgattgtactgtgagtgaacatggggcaaacaccgtttcggctttctttcagacaggcgcaactgtcgataataataccgggcgtctgaagcaaactaaaagcgatggtgcctctaacgtttctctgcaattacgcgatggtactaatggtaatgccatttttgctggtaaccagaatcaggcgacaagaaatgccttttctgaaattaagactggcgaaaatgtagtgttaccttactctgttgaatattatgcagaaaatcaagcgactgctggcgctgtaagttccagtgttgtatacaacctgcagtacaaataa

SEQ ID NO: 444609 - DNA, 741 bp, Serratia marcescens
atgattgtgtcagaccatattgaatggcgaaaaattaaactggctatttgttttatgcgaaaaatatttttgtgtatgttattgctgtgcacatctcaggttatggccaatgttgttattaccggaacacgtgtaatttatccggctgacgagaaagaaatcactgtaaaactgaacaataaaggtaatggacctgtcctcattcagacatggattgatagcgggaatgttaatgccactcctgatgatattcgcgttccttttttgataacgcctccaatgaaccgtgtggatccacataaaggccagacgttgcgcatttcttatacagggatgcctcgtcttccggatgaccgggaaagtgtattctggctgaatgttctggaaatccctcccactaaaatgaatggcgctggtgataataaattacaagtagcattccggtcacgaattaagttattttaccggccagcgtctctgaaagatgatatgacctctgcagcagaaggtatacaatggcaggtaagtggaggaaaactggtcgcggttaattcatccccttattttattacgttgctcggcgtacaatctgcacacggtaaaacagagtcaccagaagaaatgctcatcccatttggtcgactcacgtttaaaaacaagaagggacacttcactgccggagagaaaatgatttatcagtatatcaatgactggggagccgttaaaaaaatcgaaagataa

SEQ ID NO: 444610 - DNA, 2346 bp, Serratia marcescens
gtgcagattttcatcaacgacctgagcatgggatataccaatgttacgttcaaagaagatgaacacgataacatcactctgtacatgacgccggcatccttgcgtaaaatcaatctgaatgaaaaacagttaccggccagttcagtcgctgatatgagacagactggtgacagttgtctggatgtgaaaaaactgcttcccgaagttgatattaattatgattcgggcactcaaaacctgtacctgaccataccacaggcttatctgcgtaacagcaacgacggttatgtcagccaggaatactgggatgagggcgtatccgctttcatgctgggatatcagagtaattattacaccatgtcttcgcacggtaaacgttatgattcggctcatgtggggctgaatgccggacttaatctgggagcatggaaactgcggcataacggtaattacaactggatgcaggagagcggcagttcataccaacggaccaatgcttatgtacagcgcgatctgccgcttatccggggacgttttcttgctggtgaaaataacaccagtggtagcgtcttcgacactctggcatttcgtggtgtggaactgcgtgatgaagagcgtatgctgccgcagtcagaacgcggttatgcgccggaagtccggggtatagcccatacgaatgctaaagtgaccatccgtcaaaacggacagattatccgggaaaccactgtaccacccggtccatttataatcgatgacctttaccctaacggctatggtggtgagctggaggtgacggtaacggaagctgacggttcagttcaacgcttcagcgtgccttatgcctctgtggctcagttgctgcgtccgggaacccatcattacgatgtggtggtcggtgaatccagtgacagccgcgccgcaaggcggcgtgggctttaccagctgacttatcagcgggggctgaccaatacatttaccggctatggcggattccagagcagcaacgctgactattattccatcctgctgggaaccgggattaataccccctttggagcactggctgttgatgccagccactcccgtacgcattttaatggcccggtatcaggggacaacaatctgtccggacagagctaccgggtgagttacagtaagtttgtgccgcaaaccagaagtaatgtttccattgcggcctaccgttattcgacctcaggttatctggattaccgtactgcaatactgatgcaggacgaagttgaaaatggaagaagtgtacaaaatatctaccggcccaaaaaccggttcaccaccacgctgaatcagggacttactgatgggtatggtcagttatacatgacggggtatacgcaggattactggaataaaagctcacattcagacctgcaataccagctcggttacagcaacaatttccattcggtcgctttcggatttaatgccggacgcacccgtaacggaagcagtaagaaagagactacgttcatgttcaacctgagcatgcctctgggcggtgtggggatggccaatacgcctaacctgacggcaggattaagccgtgacggtcaggggaattatggtcagcaactgggcctttccggtacagggggtaaagaacatcagttcagctatggcgctaccgccacccgatatggaaacggtacaggtaacagcggtaccctgaatggtcagtacagaacaccatacagtaatctcagtgcgtcagtcagtaaggggaaaaattacaacagtgcttcagctggtgccagcggaaccctgttagcctggtcagatggtctggtcttgacaccatataccagcgacacatttgcgctggtcgaagcggagggtgccagcggtgctacggtcgggaattacacaggggtgaaaattgacaactttggtcatgccgcagtgccatatctgaacccctatgaaatgaatgaagtggcactggatccaaaaggaatttcaccgaatgttgaactggaaaataccagccagcgtgtggcgcctcatgcaggctccgtagtgaaactgacttttgcgacacggaaaggctatccattgctcctgagtcttgacaaccgggacctggtgattccgtttggggcggaagtgctggataccagcggcagtaatgttggtattgtcggccagggaggggagatctatgcacgagtggataaagaacaagacattctgcatgttcattgggggcagagcagcaatgaacaatgtaccattccttattcactcagtcagttacaaactgaaagtaataaactgatttcggtgagagcaacctgtacctttaataaataa

SEQ ID NO: 444611 - DNA, 1122 bp, Serratia marcescens
atgactaactggataaaaaaatctgtaattcagggaatggtcctgattacgacactgatgggatattcaacgctgctcagggctgacgttgcttgctttgttaataatccttttagtatttctgttccattgcacgccagtatttatgccggtagtgacttacccgttggtacggtgctttaccgtacacatttagaaacgaattatggccctgatttcggttgtgattcaggatcagaaccatgggagattaaagccaccagtattgccgcaacggaaccatcgggtccacccttcagtgtgaccggtatgccgtttaatggagatatctacccgacaaatgttgatggagtgggtatcgcattacttgtagggaataatacatttactgcatccaggccgtttaacattactcagggtgcgaaaaatggctcaatacatatgaacagcggactacgctatgacattgcattgataaaaacgggtaatgtcacatctggttcgcagatacagggaagcgcattacccataataaaattcagaggagtagaaacccccggttataccgggttgccgatggatttacaaacactgtcgtttaccggaagcgttactgtcacaacgtcgacctgtgaaacacaggatacgactgtaccattaggcgaatatgagttgcgcggtacgtttaaaggtaaagggtctgtaacaccgtggaaagacgcatccattatgttgactaattgccctcgttttattggctactatgggctgcatggtggtcaatcatctctgaacgaagcccccccttcagggggaggaacacctaataagctgctggtcacgctgaccgcaaataccggtgtcattaatgcggaacagggattgatcaaaataaacgaatcgtctccatcctccgcatccggtatcggcattcagctggggtttggcgacaccagttccgctgtaccatggaatttagccggggcgcaggaaatcacgccaccggcagacggttcacagacaatcagaatccctctggctgcacgatactatcaggttgaaaatgttgttataccgggaaaagcggatggacaggtaatgtttaccattaactataactga

SEQ ID NO: 444612 - DNA, 591 bp, Serratia marcescens
atgctgctctctgagcccgccatggcaggcaccctgtccggcgtcactgttgccggctcagtcgaggccctgcccccccacgcgtcacgcgccgggtgctccttgccccgctctctcgctcgcagtctgattgtgcacttgccgccctttcccccggctgccctgttgttattgcttcaactggggggagggaaggcgtgcctagcgcattatcaccaactgattgtgtgcagtccattttccagcgacgtgactcgcaccgccctgatgggaacggggataccggggattgtccgtatcacaccgggacggcagccgttgaccgccctgtaccgtgcggccgtgatgccctcgcccgagacctttttttcgcgctcatggcaagcggaacgactccccctgttacccgacggccggctgacgccaacagagctgcgggttctgcaacaatcactgcgcgaagtgtccgttcattggcaggcaaagctgaactacgtcagcacaaagaccatttacacccacaggcgcaaagcgctcgcgaagtttgggtgtcggggagtgacggatttgctgaacatgttttcagggtaa

SEQ ID NO: 444613 - DNA, 696 bp, Serratia marcescens
atgtccctgatccaaaaatcctttaaacgccttcattatcccaccgatattattgctcagtgcgtccgctggtatctggcttactccctgagcctgcgtaatctggaggagatgatggctgagcacggtatcaccattgaccattccacgcttcaccgctgggtaattcgtctggtgccgctgctggataagaccttccgccggcataaaagttcggtgggatgtcgatggcgaatggatgaaacctacataaaagtcagggggcagtggaaatatctgtaccgtgcggtcgataccgaaggcaggtcaatcgactttctgctgacggcgaagcgggatgccacagcagccctgcgcttcttccgcaaggccatttgccatcacggtacaccggaagtcgtcaccatcgataaaagtggcgccaacaccgcggcactggccatactcaatgccggtaaaccggatgaagaaaccatcgccatcaggcagggtaaatacctgaataacgttgtagagcaggatcaccgtaacatcaaacgccggataaaactgatgctgggattcaaatcgtttcgtcgggcacaggcgctcctggctggcatcgagctggtccacatgatacgcaaagggcaatatcagcatccggacggggagggattatctccggcagatcagttttacctgttgggtgcctga

SEQ ID NO: 444614 - DNA, 246 bp, Serratia marcescens
atgactgaggcagtaccggatgaatttattgatgccttcgaccacttgtggcagctaccggcgggcatgacagataaagagatctcggactcccatgcgttccgggaatttaggcaaacggttaatagatgttcctatgcccacgtcacgctctttatggaatggcatctgatccggggattaaaaaaactgggtgtgccctgttttttcctgccggtgacccacttgcggctaccgacaggatga

SEQ ID NO: 444615 - DNA, 675 bp, Serratia marcescens
atgactacactgaacatgaccaaaccggcccgtgctccccggctcaaccctgagcacgttgaaaaagcgttgatccaatcgcgcatagataacgtcggcaaaaaatttgttgctgcactcgatgccgtggatgaaaacaaattactgtccttattaaccctgtccgacgatgagttctggtcggaagttaaaatcatggccctcactcagtcgctgattaataacgtcagcgaggaaaaagaggagcaggaatattatgccgaagcccggctggcattcttaaaaagtctggagaaatacggcggcgttcataaatcaacggccgtgaaaaatatactgggtgtgtcggtgccgaccgtccacaaatatagcaagcagaacaagctgattgttctagactggggtgttgaaaagctctatccggtatttcagttctcggttgatgaaaagaacagtgaaaacggcatgcttaaaggcgttccggaattattggcatgcatcacccataacgtgagcaacctgcgtaaatgcaacttctttacccgtcaggttgaaatgccaggcagcggtgagaaaatcagcgcgctcgatattttgcgccgtggcgccaccgatgaagaaatggcgcacctgcgtattctggccgcaaacttcggcacgcagaacgcggtgtaa

SEQ ID NO: 444616 - DNA, 1389 bp, Serratia marcescens
atgcgaaatttttggcgccacctgagaactccaacgctcgtacggcgaattatgatcgcccagatgttactgcttacactgctttggtgtctttttctgacctacattttgtgggagaacttgcgtagccccccgatgctaacgggcagcaatacctacgaaaccattcttacattggttgatcgtatggatgatcgcccgcaggatcgcaacgctgtgctggaaaagttcagcacagcgttgcgggaaggttatggcggaggtgaagatccgaaactgtcaatcagcctaatcgttcggaagaataaagagataatttattcatctgatggcgctccggcaggggtgacaaacaccctgtatgggaaaattcagagcattcagagtgaaggtcgcacctggactagccgtactctcaagtccgggaggtccgatgcggaggtaacacttgtcacgcctgccggaggctggaacttttttatatacctgaactcgcgtggatactacatattgccgctgctggtgtgcattccttttcttttgtttcccgcgtggctgtcaatccgtattgcaatgcgaccctggaacaaggtgataaatgaaatttccttacgaacttcagaagatctctctcccttaaaagaagtgccaaagcacatggagcttcgccaaatggtggacgctactaatctatttcttgccagggtgcaagagagttctgatagggaacgggttttcattgcagatgccgctcacgaactgcgtaccccactggctgcgatgcgaatcaatgtggaggctttgcagtcctatgtaagcagcaataatcaacaggagttgcttgcagggattattcgcagcaatagccgtgcagcgcgtcttgtcaatcagttgctgctgatgatgcacagcgaagtgcgcattgacactgttatggagcctgtgccgctgacaacgctcatacaagagcgaatggctgcactggcaccgctagcggctgagcgcagggttgagctcgaattctactctgatgatgaagtctggatcacaggcgtcagggaacgcctgatgtcgctgattgataatttaattgaaaatgccgtgaagtacagccctgagggcggacgggttgaggtagatgtacgatctattgataaatctactcagctacgtgtttcagatgcagggcccggcattctatttgaattgagggagcgcgtgttcgataggttttttcgcgatcccaatcagatacaaagcgggagtggattgggacttgcaatagtcaaagcggttgcgcagcaacacaacagcagcgtatgcctaagtacgtctgcagaaggtgggctcatggttactgttgactttccaaactacaagtccgcctga

SEQ ID NO: 444617 - DNA, 678 bp, Serratia marcescens
gtgaaaattctcctcatcgaagacgacctggatctcggcaacggcgtacgtattgcccttgcagatcaaggattagatgtaatatgggttcgccgcaaagtggatgcgctgcatcaactcgatgcctgcgtgccggaacttgtgttgctcgacctcggactgcccgacggcgatggcatgagcctgatggcgtacttgcgccagcagctcaaggggatccccgtcatcattctgaccgcgcgaggcactctgcaggatcgcctgtgcgggctggatgccggtgctgacgactatctcgtcaaaccttttgttctcgccgagttgttggccagggtaagagcacttgcgcgacgcagttacggttttaagaatgaggtgatagaaattcgtgggttatctctccacgtgccgactcgtcgcgtgacagtgagcgcgcggaatgttgagttgacggcaagtgaatatgcgctgcttgaaactttaatgatgcgcactgatcgcgtgcttacacgaaggtttctggaggaaaggatattcggcgcaaaagaaaatatgagcaatgcactcgatgtgcatatgggtaatttacgtcgcaaaatcggcgacggttatgtacgaacggtgaggggcatagggtatgtcattgataccgtaccgattcagaaaggggccggttga

SEQ ID NO: 444618 - DNA, 837 bp, Serratia marcescens
atgagcaacttcgaactgcgtcataagttcccctattcactctcaggacgcaccctgaaaaaaatgctgccgggcgcgctgctggcgttactggccaccccaacacttgcggcagaaccacaacagggtaacgccttaacgttgggaggaggcgtggatgttacgccactttattctggttcggatgaaaaccgcgtcacgacagccctgttacttgattactcgatgcataatgggttcttcgtgagtaccacgcggggtatcggttacggcaacagcaccggcaagctggattacagtactgcgctgagctatcgcgcaggccgtaaggatcatgacgtggacagcgactcactgagcgatggcagtgacgacttgcggggtatgggcgatgtcaaaggctcggctatcggggcattgggtctggggtataaggtcaccgactggcttcatttgcaattgcaggctgaggtgccgttttctcaacgggacaatggcgcggccgtgcatttcggtattatcagcccgctttataactcatcggaaaataccgtgacgatggcgctgaccagcagttggggaacaggcaactatatgcaaacttactacggggtaagttcatcacagtcagccgcatcggggtttagtcaatatgatgccggttccgggatttatgcctattcaatgaatatggactggacgcacaagttcaaccaagactggagtgtagtggccgctacaggctttacgcagttggctggtgatgcacgtaacagcccgattgtgcaacgaaaagcatcgcccaatggaagcttgaaagtgacatatagcttctga

SEQ ID NO: 444619 - DNA, 372 bp, Serratia marcescens
atgacgaaatcagagaacaaagacctgcggccccgtcggggcggcaggtttggccggggagtcaaacgtttcctgcagctgcttgccatgcttgtggttgccatggtcatggcgctggggctcgcgcactggggcgttactcaccccggtgaaaccgcagcgctgcgtagctgggtgcacagtacacgttacggctggctgttctggcgtctggcgctttatgcggcgctggcctgggcattctggaaaatctggcatgcacccggggttaaaccggaacatcgtcagcccctcaagcgtatggccatcgcttgcgcgctgtttgccctggcgtgtgaatactccatcttcggcggagggctgacgctatga

SEQ ID NO: 444620 - DNA, 432 bp, Serratia marcescens
atgcctgatttttcccgctgcgccttttctgaaggcagtgttgctttgccggacggttatagcgatcgtactgtcaacgtgttgttggccggtgatgacttctccccctccctgaatatctcccgcgatgcgctgcagcccgatgaggcgctgaccgactacatcacgcgtcagctcgatgagttgtcccggggcctcaagggctgggtgctgaaaaagcgtgaaccggccgtgctgggccaaactcagctgcagggcgaatgtgtacacgccagctatctgcgcgatggcaaacgcgtctggcaacgccaggcagtgtttgcgctgcaggaagggcgcgtattggtattcaccctggcacatacgcgtaaattattgccgcaggatgatgtcttgctgcagcaggttctggacagttatcagccggcataa

SEQ ID NO: 444621 - DNA, 879 bp, Serratia marcescens
gtgaaactgaaaatgcaggatttgaggctgtttaatctcgtgtttgagagcgatcctggctggatactggatttctctaaccgcaccttgtctgctttttttgatgaagaactgaacattgatattgatgatgaatgttatcaggaagagggaacgtcaaaagccaaacgagttaggtgcttgctgaaacaggctgatcgtgagaccgctctgcgggttcttggcgctctctggcagtataaaacggaatccatgcctgaacaggctgaacaaagccgtaatgactatcttgcactgatttcccgcttagaaaacgctgacaccgatgaagccaaaggcgtaaagcctgtccaggcatggcatggtgttgactggccttcacttatcgctgaaatgaacgagatgaaatctctgccgccacatccacgtggttttcggtttgaagcttggcttgctgaactgttcagtatctttaaacttgctccccgttcgtctttccgaaatacaggcgaacagattgacggaagtttccgactgaatgatgaattttacctgatggaggcaaagtggcatcagaaaagaacgtcggctgccgatctccatatatttgaaggaaagctcagtaccaaggcaacctggacacgcggcgtttttatcagttggatggggtttacgcctgaaggtctgacggcttttggtaaagggaagcgggttatctgtgtcagtggttatgatctttaccactcactgagtcatgggatccctttgcccgaccttctggatgctaaaacccggcacgccgctgaaacgggagagccctatgctgagttcgaccgactatatgcactgaagaacaaacagttcggcacgctgaaataa

SEQ ID NO: 444622 - DNA, 909 bp, Serratia marcescens
atggatataaatcagctgcgctgctttgtggtattaggtgatgaacttcactttggccgggctgcccgtcaactcgaaatgatgcctgcgtcactcagtcgtttcatcaaactgctggaagacgacctggggataaggctactgaatcgatcgacccggaacgtgtcgctgacgcccgaaggcgcagagtttttacatgaggccaaagccgtgattgctgattttgatgcgctacggcgtcggttccgtaaaaatgcgctgccgcaaaaaaggacgctgcggatcggtgctattgacagcgcagccagagggttactgccggaattgcttaatctcttcgtcaggctgtttcctgatgcggatattcatattacagaagataagtcgcacaatcttatcccgcggctcatttccggatggctggatgtggtttttgtacgtccgcctgaacatactgatgctacgctgacgacgcgttttattgcgaatgagacctgtgtgctcgccgttcctgctgaccaccggctggtcacttatgacgaagtcagtatcgctgattttcgtaatgaacccgttattgtgccggaaagacgtacccgtcgtcacagccatgacctgactatgaatatattcaaagagggtggcagtctgcctgtcattgcgcagtatgccgaagagaagcagaccatcctgagtttagtcgctgccgggttgggcattgctcttgtgcctgcatcgtataaaaatatgaatgctgacggtgtcaaataccttcctctttcgccaaagcaacatgttgaagggcttccactgagcgtaatgtggcatcaggggaataataatatttatgtgagatcactactggatatgctttccagaaatatcgaagaactgacaagtaagttgtga

SEQ ID NO: 444623 - DNA, 1311 bp, Serratia marcescens
atgaataatgacctcgaaaaaaaggttatgcgaaaggttaccctgcgcattattccttttattatgctgctgtatttcatcgcttttctcgatcgggtaaacattggttttgccgccctgaccatgaacgaggatttggggttttcgcccacagtgttcggcctgggcgccggcattttcttcctcggctactttttgtttgaagtcccgtcaaacttaatcctgcataaagtaggggcccgcatctggattgcccgcgtaatgatcacctggggccttgtatctggctgcatggcttttgtacagggtacaacaagcttctatattctgcgttttctgctcggcgtagcggaagcgggtttctttcctggcatcattctttatctcagctactggttcccggcagccagacgcgcgcaggtcactgccatctttatggccgcagccccgctctctacagcactgggctcgcctatttcagcatctctgctcgagatgcatggcttcctcggctatgcgggatggcagtggatgtttgtgctggaagccttgcctgcgctgatactcggggttgtggttctgttctttcttaccgatcgtccggccaaagccaaatggctgactgacgaagagcgtgcatggctggaaaacaccatgcaggccgaggaactggctcgggctgcaaaacaaagccacagcagcgcatggaaagggcttgcggataagcgggtactggcactcgcgctggtttattttggtacttccgccggattgtacacacttggcatctggtcaccgcaaattatccgcagcttcggtgctacttcgctggagattggtttcctgaacgctttcccggctgtcatcggcgtcatcgccatgatcctgtgggcacggcattccgaccgtaccaaagagcgcagctggcatgttattggtgcctgcctgctggcggcagccggtctgatttacgccggtaacgtcagcacactgtttaccgtgatcgtcgccctaacgctggttaccgcaggcatcagcgcatcaaaaccgccactgtggagtatgcctaccgtgttcctgagcggcccggccgcggccgcgggtattgccacgattaactccatcggcaacctcggcggctttgttggcccgatgatgattggcgtgatccgccagcaaaccggtacctatacctggggcctgtactttgttgccggactgctgactatctcggctttcatcgtcctgattctttctgccagagcaaacaagccgcaagcggcagaactcactcatcctcatacccattaa

SEQ ID NO: 444624 - DNA, 1089 bp, Serratia marcescens
atgcgtaactataaaattgccgccatacctgccgacggtatcggcccggaagtcatctctgctggggttgaggtgctgcatgcgctgacacgccacgattcgcagctgaagtttgaggtagagacttttgactggggatcggactattacaaaaaacatggtgtgatgatgccggaagaagggttgaatacgctgaaaacgtttgatgctatttacttcggcgcagtaggcgccccggatgtgcctgaccacatcactctctggggcctgcgtctgccaatttgccagggctttgaccagtacgccaacgtgcgtccaactaaaatcctgccgggtgtcacctcaccgttgcgaaaccgcgggccgggcgatcttgactgggtcattgtgcgtgaaaactctgagggcgaatattctggtaacggaggtcgtgcacaccgtggcttaccggaagaagtcggcactgaggtggccatcttcacccgcgtcggtgtgacgcgtatcatgcgatatgccttcaaactggcacagtctcgtccacgcaaactgctgaccgtggtgaccaaatccaatgcccagcgccacggaatggtgatgtgggatgagattgctgctgaagtagcgctggaattcccagatgtgcagtgggacaaaatgctggtcgatgccatgacccaccgcatgacgctgcatcctcagacgctggataccatcgttgccaccaatctgcacgccgatatcctctccgatctggccggcgcgctggcgggcagtctgggcgtagcgccgaccgccaatatagatccggaacgccgcttcccttccatgtttgaacctatccatggttcagctttcgatatcaccggcaaaggtattgctaacccgatagcaaccttctggaccgcggtacagatgttggaacatctgggagaacgtaatgccgcggcgctgattatggaaagtatcgaatatgtctgtgagaaaggcattctgacgccagatgtgggtggaacggcctgtaccgcggacgtgacccgcgctgtagtggaatttatcgaagccagagctcatatcgccgagaccgtataa

SEQ ID NO: 444625 - DNA, 1260 bp, Serratia marcescens
atgaaaaatgaacaagctgcagagatccttctggatatttttcagcatgctgtcgacagctcccgggccgggcctgcgatcctggctaacctgccggaaaaaccgcgtggccgctgtgtggtgattggtgccgggaaagcctcggcggcgatggcagcggctgtggatgcagcctggccggatgtggatgtttctggcgtagtggcgacgcgttatgattacgctgtgcctgctggccgcatccggattatcgaggctgctcatccagtatctgattcgatgagcgaagttgccgccatgctgatagtggaaacgctgcgcggattgacctccgacgacctggtgctggcgctaatatcaggtggcgggtcagcgctgatggcgctgccagcaccaggattaacattgaaagataagcaggccattacccgcgcactactgcacagcggtgccaacatcaaagaaatgaatctggttcgtcgtcatctctccgcggtgaaaggtggcaagctggccagaatggcgcaaccggctcgtatggtgtctcttattatcagcgatgtgccgggggataacccggcagatgtggcatcaggccctactgtcaacgatgacagcacgccgcttgatgcgcttcgggtactccagcgttacggtattcagactccggaacctgttcataaactgctaagccagccggcaggcccgattgaaagcacagcaaacagtgaagccaaactcattgccacaccgcagatggctttgcaggctgccgcactggctgtgcgcagacacggactgaccccgcttattttgggcgatgcgatagaaggcgaaagtcgtgaagtggcgattgttatggccgggattgctaaatccgtgaagcagtatggtcatccggtttccggtccggctgtgctgctgtctggtggtgaaaccactgtgacggtacacaatgaccagcacggaaagggggggcgtaatactgaattctcgctcagtctggcctgtgcattgcagggggaaagcggcatatgggcaatcgccggcgacagtgatggtatcgacggaacggaagatgcagcaggagcattggtatttccggacacgttaacacgcggcaatatgggcggcctgaatgcggctaattatcttgatgtacacgacagttatagctattttcacgcgctcaatgacctggtaataaccggcccaacgctaacaaacgtaaacgatattcgggcaatactgattatctga

SEQ ID NO: 444626 - DNA, 348 bp, Serratia marcescens
atggaccccaccgccggcattagcgacaagaatatcaatgtggccgaattccgttttaacctgttcataaagcgcatcaatactaaccttgctgctgacgtcagccacaataccttttacatttttccccagcgcctttaccgcctcctgaagggtttgtgcattccggccagtgataatgacatctgcgccttcgtcgctcagatctttcgctatagccagaccaataccgcttccgccaccagtgataacggcgaactttcccttaaatgtctgattcataattgcaccccgtggcttgttgtagtggtcactatattcaaccttgaacaggctgtcactaactga

SEQ ID NO: 444627 - DNA, 600 bp, Serratia marcescens
atgagcgataccgaaaaaacaataaaagcacccaggcggatatttgacagagagtctggcgtgcagacggctaaagcgctgtttcatcagcatggttatgatgctgtaggtatcacggaactgacaaagacgctgaacataaatcctcccagcctttacgccgcttacggtagtaaagcagggctgtttgaacgctgcctggatctctatgttgcagaaggaaacctgccggctgacaaaattctgactccgggcaggccgctggatgaggcggttgcagatctttttatgactgctgcacgtttatacgcccgatccccggtccagcgaggctgtcttgtggctgaaggtatgcgtgccgacgatccgcaggcccgggagctggcaagtcgctatggtgaggcaggaattcagtttatcagaaattatatccggcagtatgaacctgcacgggcccgcgagctttctgattatgtcgtgacaacgctgcggggcttttctgcagccgcagtaacgggactgtcaaaagccaggttaactgccgtggctcagctggccggtcaggcattcagcgctctcctggagccaaaaaatgtttaa

SEQ ID NO: 444628 - DNA, 393 bp, Serratia marcescens; identical to SEQ ID NO: 189505

SEQ ID NO: 444629 - DNA, 915 bp, Serratia marcescens
ttgatactggaacccctgcttgacgagctgcgtcttctggccgctcatgcccgaaactggcgaaccgaaaccggtatcccccgtgtggccatggtgcagggtaacgttcccgcacatgcactggctgcggtctatgagccgatggttaatctcatattgcgaggcagtaaatccatgacggtgggagaccgggtattcaactacaatcctgcttcttactttgttatgtcagtagatttgccagccgtaggcgaagtccatcccgaggcaaccggtgagccgtatctcgcggtcagcctgaccctgacgccggaacggattgcgacactgctggctgatttacctcccgtgaaggctgattcacagtcgggtgctttttccgttgctgccgtcacgcccgaactgctggatgcctgggtaagaatgcttcgcctgatgaaaagtcctgaagatatccctgctctcgcaccggtgtatgaacgtgaaatcctttatcatgttctgaaaggcccacatggctggatgctgagggatattgcttcaccgggaaccatgctggcgcggataggtaatgcgattcgctggataagacataattttgctgatgaatttgtggttgaatcactggccgggcaggaggccatgagcgtatcggcctttcatcgtcattttaagtctgtgacaaacatgagtccggtccagtatcagaagcgcgtccgtcttcttcatgccagaaccaaattactggcgcgtcagcagagcgtcacgtctgttgccatggaggtgggttatcgcagcgtgccccagtttaatcgtgagtacgcccgtttctttggccgctctcctttaaaagacgctgcaagtctccggaacgacgctgatgatgcagaaagctctctgaatcaccacgtttaa

SEQ ID NO: 444630 - DNA, 744 bp, Serratia marcescens; identical to SEQ ID NO: 189503

SEQ ID NO: 444631 - DNA, 405 bp, Serratia marcescens; identical to SEQ ID NO: 189502

SEQ ID NO: 444632 - DNA, 984 bp, Serratia marcescens
atgaaaacattactgatttatggcgccaccggttacacgggacgcatgaccgccgcgcaggctaaaagtgccggcctgaatattattattgccggcagaaacaggcagcgactggccgcacttgccggtgaacttgacgtcagtatgcgggtattcggcctggaggacgctgctgaaaccgcgctgcagctggcaggcgtcgacattgtgctgaactgcgccgggccgtttactgctacggcagaaccgctgatgaaagcctgtatagaccagagtattcattaccttgatatcacagcggaaattaacatttacaggctggctgagtcactgggagaaagagcggcgcgggccgggagtatgctactgccgggcgtgggctgggacgtggtacctaccgactgcctggccgttcgccttgcacgacatgtaccggaaccacgacggttgcgtatagcattacaggtggccggaacgatgtcccgggggtctgccgtcagcgcaggcgaaataatcgcagccggcctgctggaacgtgttaacggtattctgatgacgaaagaggatgcgcagcccggctggtttgattttggtgaaggccctgtggcctgtgcgccgctttcctttggcgatctggtgacggcatggcattcaaccggtattccgaatattgagatgtttgtgcatgtaacaggggatgcctttccgcagggtgatttgtccctgcttcctgaaggacccgggcaggatgaacgcgatgcaaatcgcgcacgcgctgttgctgaggtcaccggggctgacgggagggtccaccgggctgtgatcgggacggttaacggatattcctatacgccgcttgcggccacagaggctgcgaggcgtgtcctgaacggtgacagttttcccggttttcagacaccggcgatcgttttcggtagtgagtttgcgctgagtattccgggtacgtggctccaactgtcctga

SEQ ID NO: 444633 - DNA, 492 bp, Serratia marcescens
atgattaattccgttcgtgcagaaaatgaacagcattatttcgatgagttagaaattcagcggttactcgctacctatgcccacaacctggatgacgggaaatttgctgagaatgccgaattgtttaaacatgctgaatttattgttcttagtgatatggctcatggtagtgaagaggttgagcagtttcttaaccgtggcgttcagcgtcataaggacggaactccccggacgtggcataacgtttctaatgtgctgatagatgtttcaccttccggtaattcagctacctgcgtcagctatttcaccgtgcatcaggaactggaggggtttcctttgcagcccgtatgcacaggacggtattacgacagttttgaaaaacacgacggccagtggcggtttacatcgcgcaacgtggttccccgtttgatgggtgcacttcagtttcatgtgggcacgcctatcgacagttcgcagactgagagagcgtag

SEQ ID NO: 444634 - DNA, 747 bp, Serratia marcescens; identical to SEQ ID NO: 189499

SEQ ID NO: 444635 - DNA, 249 bp, Serratia marcescens
atgtaccagcgtgacctgcggagccggattcgcaagctgggtgaaatccgttgcggttggtgggtgttccgtgatggtgacttcctcgggcagaacttggccggtgtggctgttgttatcccactgcatgaacccgattccttcaccgttagaaatctacgtaaacaagaccccgcctttaatgccatctgggagcacgtgcacgatgcgttgcgtctcgacccgaagactatctatgaacctgagtaa

SEQ ID NO: 444636 - DNA, 489 bp, Serratia marcescens
atgttctataaagaaatccctgatattccgcgcctagaggagcagtttgtactggccgatgattccccatccggtctacggcacaggctcccggggacggtgggtggagccggtggccctatcgccgggacaccttgcacggtgtactggccgggggatgagcgcgaacagcatagaaagcaacaccttgcgccgatgaattacgaggtgcatgtgcagaccggctggaaaaacatcatgttcgtggggcatgggtacgatattgacaacgaatgtcagtacgtgcccgcagaggtggtacgcgagcatttacagcttgcccgggaaatccaactgctgaccgctattgtggacaaggatcgcccagagcaaaggcaggagcagccccggcaccgtggtaagacggtttacctatcaccccagaaactagccgccttggacagaatgagttccagcgaacaaagcctcacgctgctacgtgaaatctaa

SEQ ID NO: 444637 - DNA, 495 bp, Serratia marcescens
atggctttcccgaaagaaattgagctggcgcttcagtatgcgattgcacctgatgccggttccggcagtgggcttgtatggaaacagcctttagctaatcgggtcaaggctggcagtgtcgccggtactctcggcaaggatggctattggtcggttcaagtcaagggcaagaagctggcagcgcatcgcgtgctgtggtggctagtgaatggagaaatcccaccggggttatgcatcgaccatatcgacggcaaccgaggaaataacaggctggataacctgcggctttgtactcgcgctgagaacaactggaacacacgtaaaagggctggcagtctgccgaaaggtattaccgctaccggtaaatcgtaccaagcgcaggtgcagagcaacggcacccgctggcggatacgctccagaaatctggccatgctgacaggagctgtgcaggcgatgcggatggagctgcatggtgacttcgcctgtcatgggtag

SEQ ID NO: 444638 - DNA, 174 bp, Serratia marcescens
atgggcgacgacttctcttttatcgataaaacagcgccaacagcggaagagctggcgtttcaatgcctagcgctggcgcacgctgcattgagtacgaacgagccagccgtcagggaagcgctgctgtttattgtatccgaaaaggcggagcagctttattcggcgctctcctga

SEQ ID NO: 444639 - DNA, 1239 bp, Serratia marcescens
atggcaagcaataaaaatcagtacctgacgttggataaacacggctgctggatgttccagatattcgtgccgctgtacatgcgccatgtctgcggcggtaagaggctgctgcggcgctctaccggaactcgtgatttagaccaagcgcggaattatcgcgaccatatgctgattgagtggggcaagttgaaggcgcggttcaaaccagaaacccaccacaaccgcatccagaaggggattatcgccctttatcaagaattcaatgcaccgcccccggcaatgtgtgagccagcaccagagcatgatcaggtggcttcttgtcagcaggttcagcaggtaatgctgcaagctgttactttcgaatatctagcggagtacgataaaacccgcagccccagcaccctcagcaagcacgcgctggcggttcgacttctgctcggccatttagccgtcgtcgatacagagataaccgccatcacccgtacatcggtgacgcagttcatccgggcgctaaaaccgaagaaatccgtccagacaattcagaattacctgtccggcctgaactcggtgtatgagtacgcccggcgctgctatgacggcatccccgccgcgtcaccattcacagggcatcggcttgaggcgaagcggacagttagcagttaccagccgttcacgcagacagagattacaacccttctaagtaaggccgaggaagaacttcacgacgtgatttttattggcctgtactcagggatgcgtctgaatgaaattgcctctctaggtgttggtgacgtgccggaaatcgacggtgtgcgctgctttcgagttcaggcagccaagacaaaagcaggcgttcggctggtgccggtgcatcccgctttgataggcatcatcgaaaagtacaaacggcagaacacgaacggccagcacgggcggtacctgctacctaaagcaaacgccatcaaaagggctgacgctaagcgtgggccgtggttcagtcagcaattcacccgcctacggaataaggcgctgccgaatgctacagaccgccagtgcttccacagcctgcgaggaatgttcatcactgcgcttgatcgggctggagttccagaggacaggatagcgttgattgtcggccacgaaagaggcaagacggagtctttcaggacatacagcggcggggctgagttagctgaattaagcaagatcgtccaactagtcaattacaaggggcggtga

SEQ ID NO: 444640 - DNA, 420 bp, Serratia marcescens
gtggcccagtggcgatgtgatgtccgcatctcctggcgtactcagcttatctcgttgttggcgcatggcgcgctgatattgctgatcctgatttcgccgtggccggagagttacgatccggtctggctgttgctgctgacgctggtggtttttgaatgtattcgcagtcagacgcgtatcgcatcgcgccagggggagctgcgtctgctctctgcgccgcagcgggtaatctggcaaggcaaggagtggcggctggtccggcgcccatggatgctgcgctatggcatgctgctgacgctgcaggcgagcggaaagcgtaaacgtcggcggctgtggctggcgtcggactgcatcagcagcgcggagtggcggcagttgtgccagcggatgcggctggtcaaggatgaatctgaaggctga

SEQ ID NO: 444641 - DNA, 993 bp, Serratia marcescens
atgacgttcacaactccttttccacctcgtcagccttccgcctcttcccatctgccattgacgctgatttctctggaagactgggcgctggtgacgatgaatggccccgacacggtgaaatatctccaggggcaggttaccgccgacgttgaggcgctggcggacgatcggcacgttctctgcgcgcactgcgacgccaagggcaaaatgtggagcaacctgcgcctgttccggcgtggtgaaggcttcgcctatctggaacgccgcagcctgctggacagccagttggcagagatcaaaaaatacgcggtgttctcaaaagtgaccatcgccgccgacaacgatgcagtgctgctcggcgtggccggcttccaggcgcgcgccgccctggcggacgtcttcagccagttacccgatgcacagaatccggtggcgcaggacggcgacaccacgctgctgcacttcagccagccggcagaacgcttcctgctggtgaccagcgcggcggtcgccgaacagctggtcagccgtctgcagcagcaggccgaacaaaacgacagccgccaatggctgacgctggatattgaagccggctatccgatcatcgacgcggccaccagcgcgcagctgatcccgcaggccaccaacctgcaggcgctggacggcatcagcttcagcaaagggtgttataccggccaggaaatggtggcgcgcgccaaattccgcggcgccaacaaacgcgcgctgtactggctggccgggaaaggcagccgggtgccggccgctgcggacgatttggaactgcagctgggggaaaactggcgccgtaccggcaccgtgctggccgccagccagttggccgacggtacgctgtgggtgcaggcggtgctgaataacgatttggcggcggacagcaagctgcggctgcgcgaggacgccggcggcgaactcagcattatgccgctgccttactcgctggcagaagagaagtaa

SEQ ID NO: 444642 - DNA, 681 bp, Serratia marcescens
atggataaaacggacgtggcgaaagccgggacgcaggcggacaagacggcgaaatcggcctatccgtgggcggaagagatcgccaacagcgtcagtcacggtattggtctggtttttggcattgtcggcctggtgctgctgctggggcaggctatcgacaccggcgccggggcgacggcgatcaccagttatagcctgtacggcggtagcatgatcctgctgtacctggcctcaacgctgtaccacgccattcctcatcagaaggccaaacactggctgaaaaaatttgaccactgcgccatttacctgctgattgccggcacctatacgcctttcctgctggtggggctggggtcgccgctggcgcgcgggctgatggcggtcatctggggcatggcgctgctcggcgtgctgttcaaactggcgtttgcccatcgctttgaagcgttgtcgctggtgacctatctgactatgggctggctgtcgctgatcgtcatctatcaattggcgacgcggttggatatcggcggcgtgacgctgttggcggtcggtggggtggtgtacagcctgggagtgattttttacgcctccaagcgctggcgcttcgggcacgccatctggcacgcttttgtgctgggcggcagcgtatgccactttatggcgatttatctctacgtctga

SEQ ID NO: 444643 - DNA, 1320 bp, Serratia marcescens
atgagcacctcaaccaccgatacgccgctcgatagcgcagcagcgcgcagcgaggctgcgccgaacaccggcaaactggcggcggccagctccatcggcaccgcgctggaatggtacgacttcaccgtttacaacattatggcggcgctgatttttaatcacgttttcttcccttccttcgacccgctggtcggcaccatactggcgttttccacctatgcggtcggctatgtgtcgcggccgatcggcggtatggtattcggccatctgggcgacgtgctcggccgacgctttgtgctggtcaccacgctgctgatcatgggcgccaccaccgcgctgatgggcatgctgcctggttacgccagctggggcatctggagcccgctgttgctggtgacgctgcgctttattcagggtattgcgctgggcggcgagtgggccggggcggtgctgctggcgatggagcacggcaaaccgcaacagcgcgggcgcaacgcgtcgtttgcccaggttggcccctcctgcgggacgctggtgggcaccgggtttatcaccgtggtgacgctggcgatgtcggcggaggacttccagcagtggggctggcgcataccttttctgttgagcctggcgctggtggcgttcggcctgtggctgcggcgcggcgtgggcgagacgccggcgtttctgcaactggcggcgaaccgcgatgtgacgcacgcgccgctgcgtgaagtcttcagccactataaacgcccgctgctgatcgccggcggctcgcgtatcggttccgacgtgctgtacgcgctggtggtggtgtttacactgacctatgtcactacggtgctgaacctgccgcggccgctggcgctggccgccaccatgctgggggcggtgggcaatgccattacggtgccgctgttcggtgcgctgtccgatcgtctgggacggcgcccggtgtatatcggcggcgcgctggcggcaatcgtctgggcctttgtgttctttgtgctgctggacagcacgcagccggtgctgatttgtctggcggtggtggtgggactgctgattcatgcggcgatgtacggcccgcaggcggcgtttgtcaccgaacagtttccgacgcgggtgcgctatgccggctcgtcgctggcctatacgctggcggggattgtcggcggcggctttgcgccgctgattatcacatcgctgtttaaatcgtatgacagcacgctggcgatctcggcctatgtgaccctgacgctgctgatcaccctgtgggcggtgttggcggccaaggagaccgcccataagccgttgtaa

SEQ ID NO: 444644 - DNA, 654 bp, Serratia marcescens
atgaccggaaccccgaacggaatgctgtttgttgcaaccgatgtcgccgcgcaggatgaggcggatttcaatcgctggtatgaccgtgaacacgtggaagagcgggtgcgcatcgacggttttttaagcggcgcgcgctatcaggcgctgcagggcggacgcaaatacctgggcctgtataaaaccgtctcgctcgacagctttacctctgcggcctatcacgcggcgtttacccggcaaacgccgtggtcggtagccagcctggataaaatggtggacccgatgcggcgggtatgcgccgtggcggcggtaaccggctttggctgcggcagccacctcggcgtgataacgcttccggcggaagacgccgccgtgctaacgccgcgcgtttcccaactgggggaaatgctgtccgccgaggccgggtttgtctgcagcagcctgctgctgccggacgcggcgctcagcacgccgctgccgaaagaagcgccggataaccgcacgctgtcaccgatgctgctgattgaaagtagtagtgccgaagctggcgagcgtcttaacgcgctggcctgtcagcagttgaatatcgccgcagatgccgtgctgcgttacgcccttggctggcaacttaccgcacaggagctgaaatcatga

SEQ ID NO: 444645 - DNA, 1350 bp, Serratia marcescens
atggaaaactggacattacgacaggccgccgccgcgctcgccaacggcgatatcacctctgaacggctgaccgccgctgcgctggcgcgaattgacgatccgcagggggaaggggcgcgagcgtttgtccgcgtgtatcacgactgggcgcggcgacaggcgcaggacgccgaccgccggcgtgcggccgggcagcctctctctgcgctggacggcgtgccggtgtcggttaaagacctgtttgacgtggcgggcgaggccactaccggcggctcacggacgctgatgcaggcgccggcggcgcagcgtcatgcggcggtggtggcgcggctgctgcagggcggcgcggtggtgatcggcaaaaccaatatgactgaattcgcctactccggcctgggcattaacccgcattacggcacgccggccaatccgtggcggcgggaggagcggcgaattcccggcggttcctcgtccggcgccgcggtggcggtcagcgacggcatgggctttggcgcgattggcagcgataccggcggctcggtgcgcattccggcggcgttctgcggcctgaccggctataagcccagcgccagccgcatcgacatgacgggcgtgcagccgctgtcgccgtcgctggactccgtcggcgtgattgcccacggtctggcggactgcatcgcgctggatgggctgattgcgcggcagccgttgctgccgaccgcccagccgttggcgcaggcgcgctttgcgctgccgcagacgctggcgctggatgaactggacgagacggtgtccgcggcgtttcagcgtgcgctgcggcggctggcgcaggcgggcgcgcggattgacgccctgctttgcgatgagtttgccgaactggcggcgatcaacgcggccggcggctttaccgcgctggagtcctggcagtggcaccagacgctgattgccgagcaggcggcggcttacgacccgcgggtgctgtcgcgcatccgacgtggtgcggcgctgggcgagcaggacggccgccggctgcgggagcagcggctcgactggcagcggcgggtggccggttcgctgcagggctaccacgcgttgctgatgcccagcgtgccgtttgtcgcgccgaccatcgccgagctggaggccgatgaggcgcactacttccggatcaacggcgccgcgctgcgtaacccttcaatcattaatttcctggacggctgcgcggtgtcgttgccgattcaagcgccgggcgaagcgccggtagggctgatggtcgccggtctggcgcagcaggatgaggcgctattgggctgggcgctgtccgttgagcgctgtctggccggcgcgtaa

SEQ ID NO: 444646 - DNA, 711 bp, Serratia marcescens
atgcaactaaccttcactttacctgattcggcgggggctgaggcgctgaatgtggcgatcgatcatctggtgatcgccggctggaccgggcgcgaccatgaggccattttgcaccatatcagggaactggcggagctgggcgtgccccagccgagtgcaattccgctgttttatcgcgtggcggccaatcagcttagccagtgcgacagcgttgaggtggtcggcggcgccagctccggcgaagccgaaccgctgatcttcacccaccgcggcgagctgtatgtgtcgctggcttccgatcacaccgaccgtcagctggaggcgcacagcgtcgcgctgtcgaagcagctgtgcgtcaagccggttgcctctgcggcctggccgctgcatgaggtggcgccgcactgggacagcctgattctgcgttcctggatccgcgaggagggggagtttcgtctttaccagcaaggcacgttggccggcctgcgcacgccgggggacttgctcgaacgttatctgggcggtgtgcagacgccggagtgtctgacaatgccgcaaccgccggaagggctggcgatgacctgcggcaccctggcggcgatcggcggcatccgtccggcggcggagtttcgtatggagctggtggacgaagtgctgggtcgcaccatcagtcacgcttatcgcagcgttgaattaccggtggtggcgtga

SEQ ID NO: 444647 - DNA, 681 bp, Serratia marcescens
gtgaagaccgttgacgcagagcgccgggaactcccgacggtagaggaagccggcctgtcgcagaacgaactggcctaccgacgctttaaacaggcgctggtgacgctgagctataagcccggcgagtacctgaatacggcgcaggtgatggacgatctggcgatggggcgcacgccgatcaatcaggcgatccaccggctggcgaatgaagggttgctgcaggtgatcccgcgtaaaggcgtgatggtggcaccgctgtcgatcgacgatgcgctggagctgattgacgtgcggctggccaatgaactgctgtgtatgcggctggccagcaagcgcgccagcgcaccgcagatcgccagcctggaggccatcaaccagcagattgaagccgcctgccaggcgcgcgatcgggtgcgcatgatgacgctggatcatgagttccatcaggcgctggcgcagatcgccggcaacgccatgctggcggacattctcagcgtgctgcacgcacgcgcccagcgcttctgggcgacctcgctgtcccggcagggccatatgcaggaagtgatcgacgaacaccgggcgattatcgccgcgctggcgcagcaggatgcggacgcggcggaaagcgcggcgcaggcgcatatcctctccttccgtagcgcgctgttgcacgatgcataa

SEQ ID NO: 444648 - DNA, 387 bp, Serratia marcescens
atgagcaatgtaccaactgaactgaaatacgccacctctcacgagtgggtgcgtagcgaaggcaatggcgaatatgtggtgggtatcaccgaacacgcgcaggaactgctgggcgatatggtatttgtcgatctgccggaagtcggcgccaccgttgccgccggcgacgactgcgcggtggcggagtcggtgaaagccgcgtccgacatctatgcgccaatcagcggtgaaatcatcgcggtgaatgaagagctggacggctcgccggagctggtcaacagcgatccttacgctgacggctggctgttccgcatcaaggcctctgacgaagcggagctcggcaagctgctcgatgccgccggttatcaggcgtctatcgaagagtaa

SEQ ID NO: 444649 - DNA, 1200 bp, Serratia marcescens
atgcaatcattcgatgtggttatcgccggcggcggtatggtgggactggcgctggcctgcggcctgcagggcagcggcctgcgcgtggcggtgctggagcaccggcagccggagcagggcgttccggagcagctggcgctgcgcgtttccgccattaatgcggccagcgagcgcctgctgcaacagattggcgtctgggacgatattctgcagctgcgcgccagcgcctacaatgcgatggaagtgtgggaccgcgacagcttcggtaaaatcgccttccgcggcgatgagtgcggcttcagccatctgggccacattgttgaaaacaacgtgatccagcaggcgctgtggcgcaaggcgcagacgctgtcggacgtcacgctgctgacgccggcggcgttaaaacaggtcgcctggggtgagaacgacgcctttatcacgctggaggacggccgcatgctcagcgcacgtctggtggtgggcgcggacggcgccaactcctggctgcgtcagcacgccgatattccgttgaccttctgggattaccgccacagcgcgttggtcgccacgattcgtaccgaagagccgcatcaggctacggcgcgtcaggtgtttcacggcgacggcattctggccttcctgccgtttggcgacccacacctgtgctcgatcgtctggtcggtggcgccggaggaggccgaacggctcagccagctgtcgccggaggcgtttaaccgcgaactgagcatgaccttcgatatgcgtctggggcgctgtacgctggaaagcgaacggctgaccttcccgctgaccggacgctacgcccgcagctttgccggccatcgtctggcgctggtaggggatgcggcgcataccgtacacccgctggccgggcagggcgtcaacctgggctttatggacgccgcggagctgatcgctgaactgaagcgcctgcagcggcagggcaaggatatcgggcagcacctgtatctgcggcgctatgagcgccgccgcaagcacggtgcggcggtgatgctggccagcatgcagggtttccgcgaactgtttgacggcaacaatccggccaagaagctgctgcgcgatgtcggcctgcggctggccgacagcctgccgggcgtcaagccgaagctggtgcgtcaggcgatggggctgaatgacctgccggagtggctgacgtaa

SEQ ID NO: 444650 - DNA, 1179 bp, Serratia marcescens
atgagcgtaattatcgttggcggcgggatggccggagcgacgctggcgttagcgctgtcgtcgctgacgcagggccgggtgcgcattgacgtggttgaggccacgcggccgggcgaccggatgcatccggggtttgacgcgcgcgccattgcgctggcgcagggcacctgtcagcagctcagccgcatcggcgtctggcctgcgctgcgcgactgcgcgacgccgatctcgcaggtgcacgtcagcgatcgcggccacgccggcttcgtcaatctgtcggcgcaggactatcaggtcgaggcgttggggcaggtgatcgaactgtacgacgccggccagcggctgtttgccctgctggaaaacgcgccgggcgtgacgctgcactgtccggccaaagtgatcgatgtgacgcgcagccgcgagcaggccgaggtgctgttggataacgggcagcgcctgagcggccagttgatggttgcggcggacggttcgcgttccgcgctggcgcgcgcctgcaacgtgcagtggcggcagcaggactacccgcagttcgccactatcgctaatgtgaccagcgagcaggacccgcagggccgcgcttttgagcgctttacccgccacgggccgctggcgttgctgccgatgtcgcaggggcgcagctctctggtctggtgtcatgaccgcgacgatcgtgaacgggtggacggctgggacgacgcgcgttttctgcaggaactgcagcaggcgttcggctggcgtctggggcggatgctgcaggtcggcaagcgccacagctacccgctgagtctgttgaccgcgcagcagcacgtttcccaccgtctggcgctggtgggcaatgcggcgcagacgctgcacccgatcgccggacaaggcttcaacctggggctgcgcgacgtgatgtcgctggcggaaaccgtggcggaagcgtcgcaggccggcgaggatctcggcacctacgcggtgcttggccgctatcagcagcggcggcagcaggaccagcaggcaaccatcggcgtgaccgacggcctgatcaaattattcgccaaccgctatgcgccgctggtggttgggcgtaatctgggcctgatggcgatggaacatttgcccgtggtgcgcgatgcctttgccaaacgcaccctgggctgggtcgagcgctag

SEQ ID NO: 444651 - DNA, 579 bp, Serratia marcescens
atgtctatacagaatacatacccaaattacttcaccttgtccgccgccctgaaccagcagtcggtggcgctcaccgccgctgaaatgcacggtttaatcagcggcttgctgtgcggcggcaacaatgacgccagctggcgcacgctggtgcacgacctgaccaatgaaggcgtggcgttccctcaggcgctgagccagccgctgcagcaggtgtatgatctgattcatgagacgctgagcgatgatgaatttatgttccagctgatgctgcccgaaggcgaggcggtcacggtgttcgaacgcgctgacgctctgtccggctgggtcaatcacttcctgctgggcctcggcatgatgcagccgaagctggcgcaggtgaaagacgaggttggcgaagccattgacgatctgcgcagcatcgcgcagctgggctacgacgaagacgaagaccaggaagagctggagcagtcgctggaagaagtagcggaatacgtccgtatggcggcaatcctctgctataacgaattcaaccgccgtaaaccgaccgcggtggaaaacgtcaaacctacattgcactaa

SEQ ID NO: 444652 - DNA, 618 bp, Serratia marcescens
atgcccatgatgcatttccaacctcagttcgccaaacagcggcaagacatccgtcagcaaatccgtcagcgacgccgtgcgctttccgcgcagcaacagcatactttcgcccggcaaaccgccgaacgcatcgcttctcatccgcgtattattgcggccgacagcgtggcggcgtttctttcctttgacggtgaactggatacccgcccgttaatcgagcgtctgtggcatatgggcaaacaggtttatctgccggtgctgcacccgttcagcgcgggcaacctgctgtttttacactaccaccccgacagcgtgctgcgccccaaccgttttaacatcctcgaacccgaactggacgtgcgcaacgtgttgccgacctcacagctggcggtcattctggcgccgctggtcgcgttcgacagccaggggcagcgtctgggcatgggcggtggtttctatgaccgcacgctgcaacagtggcagcacggcggcccttatccgatagggctggcgcacgactgccagcaggtggacggcatcccgaccgaacactgggatatcccgctgccggaaatcgtcaccccttccaaagtctgggcctggcaaatcgcccaatag

SEQ ID NO: 444653 - DNA, 615 bp, Serratia marcescens
atgcttgccgtttttctacagggttttgcgcttagcgccgcgatgattttgccgctggggccgcaaaatgtgtttgtgatgaatcaggggatccgccggcagtatcatctgctggtggcatcgctgtgcgcgctcagcgatattgccctgatctgcgccggcattttcggcggcagcgcgctgctgcatcgctcgtcgctgctgctgatgctggtgacctggggcggcgtcgcctttttgctatggtacggctggggagcatttcgcaccgcctttagccgccatatcgctctggccagcgtggccgaactggcgcagagccgctggcgtattgtggtgagcatgctggcggtcacctggctgaatccgcacgtctatctggatacctttgtggtgctgggcagtctgggcagccagttcgcgccggaggtgcgctcctggttcgctttcggtgcggtcagcgcctctgccgcctggtttttcgcgctggcgctgctggccgcctggctgtcgccgtatctgaagacgccgctggcgcagagaatcatcaatattctggtggggctggtgatgtgggccatcgccgcgcagctggcctggcacggcatgcaataa

SEQ ID NO: 444654 - DNA, 333 bp, Serratia marcescens
atgagtgaagttaagattgtcgccaccctgaccccgcggccggaattcgttgacgccgtcagaaccgcagccagaaagatggtgccgcagacccacaacgaggccggctgcctgcagtatgacctgcatgaaacacgcgaaattcccgatgtgcgcgatctgcagaaccaggggaaagtttccttcgtgtttattgaacgctggacgtcagaacagacgctgaaagaacacgtggcgatgagctatcacgacgatttcctggaagcgctggatgggaaattggaaagcctgaacgtgcaaaaactgacccaactggaaccgtccaaggcgtaa

SEQ ID NO: 444655 - DNA, 513 bp, Serratia marcescens
atgactaagttcaccacgccgctgctggcgattgccgcttatagtggcaccggcaagaccacgctactcaagcagctaatcccgctgctgcgagaaaaacgcatcagggtcgggctgataaagcatacccatcatgatatggatatcgatacgccaggaaaggacagttatgaactccgtaaggcgggggccgatcaaaccctggttgccagcgatcgccgctgggcgctgatgacggaaacgccggaacagcaaccactcgaccttcactatttggcaagccgcttcgatcacaataatgtcgatctcattttggttgaaggctttaaacatgagccaataagtaaaatcatcctctaccgcgccgaaataggccgaccgctcgaagatatgctggataactatgtgattgcagtggccggcgatcgtacgttggattttgccggcgcccaacttgatatcaacgatccggcgagaattgccgattttattgttagctggctgaataaataa

SEQ ID NO: 444656 - DNA, 594 bp, Serratia marcescens
atgcacacagatataaccggagtaatcctggcaggcggcagagccacacgtatgggaggggaagataagggattaatctcgcttggcggactcccgctttatcgctatgcgctcgcgcgtctgacgccacaggttggcgccgttatcatcagcgctaaccgtaatcaggcagtttaccaacagagcggtttaccggtggttggcgatctgacgacagatttcgccgggccgctggctggcatgctggccggcttacggtcggcaaaaaccgactgggtggcctttgtcccctgcgacgtgcccgatttaccgctcacgctggttgagacgttatggcaaggcaagcaacaggcattagcggcctatgccagcgacggtgagcgcgcacacccaacgctggcgttgctgcatgcaagcctggcgccgcatttggccgagtatttagcgcggggagaacgtaagctgatgctgttcctcaaagaggttgccgccaagcaggtggtattcaacgatcgatctcatgcctttcagaacctgaatactcccgatgactgccggcgctggcagcaggagaaggggctcagcaatgactaa

SEQ ID NO: 444657 - DNA, 999 bp, Serratia marcescens
atgaatgttgttatgaacgattctgcgtttaattttgataccctttctcccgatctgattatggccgcattagaaggggttggtctgcgcgttgattccgggctgacggcgctcaacagttatgaaaaccgcgtttatcagtttaccgatgaagaacgtcgtcgctatgtggtgaagttttatcgtcccgagcgctggaacgccgcgcagatagaggaagagcatcagttctcgctcgacctggccaatgccgaagtgcctgcggttgcaccgttacggctgcaggggaaaacgttacagagcttcggtggcttctattttaccgttttccccagcgtcggcggacggcagtatgagatagataatctcgatcagctggaatgggtaggccgctttttggggcgcatccaccaaaccggtcgagaaaagctgtttgccgagcgtccgactatcggtattgaggagtacctcaccgcccccagagagattctggcgagctgtgatttggtgccggcggcacagcgagaggccttccttggcgcgacggatacgttgattcaggctattaagcagagttggcacctggactggcaaccgctgcgtttgcacggtgattgccatccgggcaatatcctgtggcgcgatggcccgctgttcgtcgatcttgacgatgcgcgcaatggtcctgcggtgcaggatctttggatgctgctgcacggtgagcgtagcgagcagctgttgcagttggatatattgttagaagcctatggcgagtttgccgagttcgatcgacgtgaactggcgctgattgagccgctacgtgcgatgcgcatggtgtattacctggcatgggtggcgcgtcgctggcaggatcctgcattcccaagaagttttccgtggatggcggagtctgatttctggttgtctcagaccgcgacatttactgaacaggctaagctgctacaggaacctcctctgcagttgatgccgatgtattga

SEQ ID NO: 444658 - DNA, 2799 bp, Serratia marcescens
atggcccagattgctgaaaaccctttgatcctggtagatggttcctcttacctctatcgtgcctatcatgccttcccgccgctgactaactctgccggtgaaccgaccggcgccatgtacggcgtgctgaatatgttgcgtagcctgctgcagcagtacgcgccaacccatgtggcggtagtgttcgatgccaaaggcaaaactttccgcgatgaattgttcgcggagtacaagtcccaccgtccgccaatgcctgacgatctgcgtgcgcagatcgaacctttacaccgcatggtcaaggcgatggggctgccgctgctggtgacgccgggcgttgaggctgatgatgtcataggcacgctggcgctgcaggcggaaaaagccggccatgccgttttgatcagcaccggcgataaagatatggcgcagctggtgacgccaaacgttacgctgatcaacaccatgaacaacaccattctggggccgcaggaagtgtgtgataaatacggcattccgccggaattgatcattgatttcctggcactgatgggcgattcctccgataacatccccggcgtaccgggcgtgggtgagaaaacagcacaggcgctgctgcaagggctgggcgggctggatacgctgtatgccaatctggacagcattgcgaccctgagtttccgcggcgccaaaaccatggccgccaagctggaacagaacaaagaggtggcctacctctcctatcagctggcgaccatcaaaaccgatgttgagctggaggtgggctgcagcgaactgaacgtcttgccgccggatgtcgatcagctgcatcagctgttcaaacagtatgagtttaagcgttggctggcggacgttgagtccggcacctggctgcagggtaaaaaaggcggcgccaaggcagccagcgcggcaaaatcatccggcgcagcggcggagacgccaaaagccgcggtggaagccaaactgtcacaggatggctatgtcaccatcctggatgaaaaaacgtttgccgaatggctggaacggctgaaaaaagccgagctgttcgccttcgataccgaaaccgatggcctggatacgcagagtgcgaacctgattggcctgtcgttcgcgattgagcccggcattgccgcttatctgccggtggcacatgactatctggatgcgccggagcagctggatcgcgcttatgtgctggaaacgctaaagacgctgctggaagatgagaaagcgctgaaagtcggtcagaacctgaagttcgacaagagcctgctggcgcggtatgacatcaatctgcgcggtatcgcttatgacaccatgctggaatcctacgtactggacagcgtcggcggccgtcatgatatggacagcctggccgatcgctatctcggccataaaaccgtcacctttgaagagattgccggcaaaggcaagaatcagctgacattcaatcagattgcattggagcaggcggcaccgtacgcggcagaagatgcggatgtcaccctgcagctgcatttggccatgtggccgaagctgaaagagagtgacggccagcgcaaagtgttcagcgagattgagatgccgctactgccggtgctttcccgtatcgagcgtaccggcgtgctgatcgatcagcatattctggcgacccattcacaggaactgaccaagcggctggccgagctggaaacgcaggcgcacgagctggcggaagagccgtttaacctggcatcgaccaagcagctgcaggcgattttgtatgagaagcaaaagctgccggtgttgaaaaagacgccgggaggcgcgccgtcgaccaatgaggaagtgctggccgagctggcgctggactacccgctgccaaaagtgattctggaatatcgcggactggcgaagctgaagtccacctataccgacaagctgccgcagatgatcaatccggtcagcggccgggtgcatacgtcatatcatcaggcggtgaccgctaccggccggctgtcatcaagcgatccgaacctgcagaacatcccggtgcgtaatgaggaagggcggcgtattcgccaggcgtttatcgcgccgaagggataccgcattctggctgccgactactcacagattgagctgcgcattatggcgcatctgtcgcaggatgaggggctgctgaaagcctttgccgccggtgaggacattcaccgggctacggctgccgaagtctttggcgtgccgttggataaggtcaccggtgaacagcgccgcagcgccaaggcgatcaacttcggcctgatctacggcatgagcgcctttggtctggcgcgccaactggggattccgcgtaatgaagcgcagcgctatatggatctctattttgagcgctatcctggcgtgctggattatatggagcgtacgcgtcagcaggcttccgagcaggggttcgtcagcacgctggatggccgccggctctatctgccggatgtgcgttccagcaacggtatgcgccgtaaggcagcggagcgtgcggcgatcaatgcgccgatgcagggcactgcggccgatatcatcaaacgcgcgatgattgccgtggatagctggctgctggaacagaaggaaccgctggtgcgcatgattatgcaggtgcacgatgaactggtgtttgaagtacacgagtcggtgctggaagaagccagccagcgcattcgcgacctgatggaaagtagcatgacgctggcggtgccgctaaaagtggacgtaggcaccgggaataactgggaagaagcgcattaa

SEQ ID NO: 444659 - DNA, 546 bp, Serratia marcescens
atgaaccagtcatcaaaagcgccccgcggcaaagcggcgacgtcaaaagcgaaaaagaaaagtcgtgttgagcttgatatggaagctcgcgagcgtaagcgcctgaaaaagcgccgtggccatgcttccggttcacgcacccaggttgaaaatgccaagcaaaagaaatcaggagccggggatgtgaaagatccgcgcatcggcagcaaaacgccggtgccgttgctggtggaagcgcaagccaacgtcaaaccgcagactaagcccaaggccgaagtgaagccgcgtctgtcgccggaagaagagctggcgaagctggaaaatgatgagcgtctggatgcgctgttggatcgcatcgacgatggcgacaagctgaccggcgaagagcaggcttatgtcgatcaaacgctggaccgcatcgatgcgctgatggcgcagctgggcatcgagctgggcgacgatgacgatgacatcgatgaagaagaggaaaagcaggaagatatcctgaaactgctgaaaagcggcggtccgaaaaacgcgcgctaa

SEQ ID NO: 444660 - DNA, 1374 bp, Serratia marcescens
atgtcagaacaggctatcgtctgggatttggccctgatccaaaaatataactattcaggcccgcgttatacctcatacccaaccgctttggagttcaaccaaagctacgatgaggcagcattccaacgtgccgccgggcgctatcccgagcggccgctgtcgttatatgtccacatcccgttttgccacaagctgtgctacttctgcggctgcaacaagcaggtgacgcgtcagacgcataaggcggatgactatctggcggtgttggcgcaggaaatcgccgcccgggcgccgctgtttgccgggcgtcaggtcagccagatgcattggggcggcggtacgccgacctacctgagtaaaacgcagattagtcggctggtggctatgctgcgccagcattttgatttcctgccgcaggctgaaatgtcgatcgaagtcgatccgcgtgaaatcgagctggacgtgctcgatcacctgcgcgctgaaggttttaaccgcctgagcatgggggtgcaggacttcaacaaagaagtgcagcggctggtcaaccgtgaacaggatgaggcgttcatttttgcgttgattgagcgcgccaaagcgttgggctttcactccaccaatatcgacctgatttacggcctgccgaagcagacgccggagagctttgccttcacccttgagcgggttgccgaactgaacccggaccggctcagcgtgtttaactacgcccatttgccgagcctgtttgccgcccagcgcaagatcaaagaggccgatctgcccagcgcgcagcaaaagctggatatcctgcagcagaccatcgcctcgctgaccgacggcggctatcagtttatcggcatggatcatttcgcccgtccggacgatgagctggcggtggcgcagcgcgaagggaagctgcaccgtaattttcagggctacaccacccagggcgacagcgacctgctggggctgggcgtgtcggccatcagcatgcttggggacagctacgcgcagaaccagaaggcgctgaaagcgtactatcacagcgtcgaacagcagggaaatgcgctgtggcgcgggctgacgatgagcgaagacgactgcctgcgtcgcgaggtgatcaaaacgctgatctgcaacttccagctgaactaccggccggttgagcagcagtacggtattaacttcgttgattattttgctgaggatctgcagctgctggcgccattcgaacacgacgggctggtggagcgggatgagcagggtatacgcgtgacgccgcaggggcgcttgctgatacgcaatatctgcatgtgttttgatatctatttgcgcaaacaggcgcgcgcgcagcagttctcccgggtgatctga

SEQ ID NO: 444661 - DNA, 123 bp, Serratia marcescens
atgctggattctcttatcgcttttatttcacaaggtgcggacgtcagcgccgctgcgggccatacgccgcaggccgccgttgccgccgtgctgtgcgccgccctgattaacttcttcagttaa

SEQ ID NO: 444662 - DNA, 591 bp, Serratia marcescens
atgctgtatatctttgatttaggtaacgtgatcgtcgatatcgatttcaaacgtgtgctgggcgtatggagcaatctgagcggcacgcctctggcggcgctggcggaacgttttagcatgggcgaggtgtttcagcgccacgagcggggggaagtgaccgatgaagagtttgccgcccgcctgtgcgacgaaatgggcatcgcgctgagctttgagcagttcgccgccggctggcaggcggtatttgtcgcgctgcgcccggaggtgatcgccatcatgcagcgcctgcgcaatgagggccaccgggtggtggtgctgtcgaacaccaaccgcctgcactgtaattactggccgcagcattacccggaagtggcggcggcggcggaccatctctacctgtcgcaggatctcggcctgcgtaaaccggagccggccatttatcagcgggtgctggatgaggaaaacacgccggcggaacaggcggtattctttgacgatcatcccgacaacatagcggctgcgcgggccatgggcattacggcggtatgggtgaccgatcgcgatacggtgccggcctattttgccggttaa

SEQ ID NO: 444663 - DNA, 1662 bp, Serratia marcescens
atgaaatttatcgggaaactgttgctatggctgctggtggcggcggcaatcgtcatcgtattactgtatctggtcgggcagacccgctgggccgccggtcagatcggcaactgggtgagtgggcacagcgactaccgcctctctctcggtaaaatcagccactcctgggatgaaccggcgcagatcggcctggaagacgtcgcgctgacgcgcaccaaccagccgcgggcgttaacggccaagcgcgtcgttctgggcctcagcctgcgtcagctcaccaacccgcgttacttccacagcgtgacgctgcacgacggtacgctcaatgtacaacctggcgcagcggcgttaccgatccaggccgacgtgctgcagctgagcaacatggcattgcacgccggcgacgccgactggcagcttaatgcgcagcgggttaacgccgggattacgccatggcggcctcagtccgggcacctgctgggcgacaacaaccgcttccaattcagcgccggctcgctgaccctgaacggcatccccgcctctcaggcgctggtgcaagggcaaatcaaagatcatcagctgctgctggaggatttcggcgccgatctggcccagggcgacctgaccggtaaagcgacacgtgccgccgacggcagctggctggtagaccgtctgcgcctgaacaaggtacggctgcaaacgccgctgtcgctggaacaattctggcagcgctttaccaccctgcctccgatcacactgcaacgctttgacctgatcgacgcacggctggagggcaaggggtgggcgtttaacgatcttgacctgtccctgcaagacgtcactcttcagcagggagactggcgcagcgagaacggcgcattgcatgccaacgccagcgatattatcaatggccgcttccatctggtggatccgattatcagtacgcggctgtcgccggccggtatcgccattgagcaattcacctcgcgctgggaaggcggtttgctgcgcgccaacggcagttggctgcgcgccaccaaacgtttgcagctggacgacgtcaccgtcgcggcgttggagtatacgctgccgcaaaactggcgtgagctgtggctcaaaccgctgccggcatggctgtcgcaggtatacgtcaataagctgaccaccaaccgtaacctgattatcgatatcaatccggcgttcccgttccagctgacatcgctgaacggttacggcagcaatctgctgctggcgcacgatggtcagtggggaatctggtccggttcgctaaacctgagcgccagcgaagcaacgttcaataaaatcgacgtccgccggccttcgctggcgctgacggcggaccagcggcaaatcgccgttaccgagctgagcgcctttatgcctaatggcctgctggatgccaaggcaaccgtcacgcaactgccgggcaagccgttttcgctgtctttatccggtcgttcggtgccgctcaataccctgcagcaatggggctggcagccggtgccgctggagggcgacggcaacctgcagctgcaggttcaggggctgttaaacagcgacgggccgttccgggattccgtacggggtaatctgcaggccacggcgaaggatgggcaaacggtcaatcagcaacggccgtaa

SEQ ID NO: 444664 - DNA, 1725 bp, Serratia marcescens
atgaaaggacaccttttttacggcgccgtgttttttattctcgcgatggtcatctccgtcggggtacaggcagaaacctgcccgcactggccggcggagcgcctgcgcaatgaactgaatgctttggaagagcagctggcgcgctgggacacggcctattatcaacgcgggaaaagtttgattagcgacgaactttacgacagcctgcggcaaaaacagcgcttttggcgagtttgcgccggccggacgggggaaattcctctgcctcagttaccggcgggaaaggtgcctcatccggtcgcccataccgggctgcgtaagctggccgatcgccgggcggttgcccaatggctggcggagcgccgcgacgtgtggctgcagcccaaggttgacggcgtcgccgtgacgctggtgtaccggcacggtaaactggcgcaggcgatcagccgtggcaacggcaggctgggcgaagactggctggaaaaggtcagggcaatccccggcgtgccgttaacgttggcgaacgcgccggaccttctggtgctgcagggagagctgtttttgctgatgaccggtcatcgtcagcagctgcatggcggcgtcaacgcacgcgccagcgttgccggtacattgatgcgtaatcagccctctgagcggcttacgcagctgggcattttcatctgggcctggcccgacggcccgcccgcgatgtcgcagcggctggcgcagctggcggcgtgggggtttacgctggcgcgcgactatacgcagccggtgaactcggttgaagacgttatccgttggcgtgacgcctggtttgccagccccttgccctttgtgaccgatggcgtggtgctgcatcaggcaagttcgccgtccggtcgctactggcgtaataagccggcgttgtgggcggtagcgtggaaatatccgccggcagagcaggtgacgcgcgtggagcaggtgatgttccgcatcgggcgtaccggtaaaattacggtggtgctggcgctggaccctctgcggctggatgacaagtggatacggcgcgtcaatatcggttcgcttgcccgctggcggtattgggacatcgtgcctggcgatcaggttgccgtcagcctgaaggggcaaggaattcctctggttacccgagtggcatggcgcagcgtggaacggccggtgctgacggcgccggatgccgcgcgctaccacgcgttcagttgctttaccctgcaggaaggctgtcggcaacagtttatcgcgcggctggtgtggctgagcggcccgcaggggctgatgatgaacggcgtcagtgaggccagttggcggatgttggtcgaccatgggcaggtaaaagagctggcggactggctgatgctgacgccggagagtttgcggacgctgccggggatgggggataagcaggcacggcgtctctatcagcaatttatgctggcgcggcggcagcctttcagccgctggctgctggcgctgggggcgccgctgtcgtccgatcaacttgccgatgtgacggggtggcaacaggccaaaaggctgccgccgcacatatggcagcggcaggccggcatcggggacaaacgggcggcgcagctggttgaattcttccgacagccggcgctactgcgcgtgacaaatatcctgcggcagcagtatatcgccgggtttgccggcgatgcggttagtgatccgggtgctgataattga

SEQ ID NO: 444665 - DNA, 2400 bp, Serratia marcescens
atgttagatcgtattaccgtccagctacccgttcccgggctgcttttctggaaactctccgggcgcgaggcgttatcggagccgttcgaactgaacgtaacgctgctgggcacggatgcgcgcatcgatcgcagcagcctgctggggcagccgattacggtggccataccgacgcgctccctgatgggcaaacgctacctgaacggcaaagtaacccgagtggcggtaagtgcggtggagctgtccggtacccgctacgcggagtatcgcctgaccatggaaccggatctgtggccgatgaagcgtgaccgtaacctgcgtatcttccagggtcagacggtgccgcagatagtgaagagcctgctgggcgaaagccaagtgaatgttgaagatcggctgacgggcagctatcgcccctgggaatactgcgtgcagtaccaggagagcagcctggcgtttatcagccgtttgatggagctggagggcattacctatcacttcagccatgaggcggacaaacacactctggtgctgacggatgcgccgcagcagcaacagccgttcagcggttacgagagcattccctaccatgtcacgccttccggcggcagtaccgacgaagaaggcatcagtcagtgggcgctggaagacagcgtcacaccgggcatctacagcctggacgactacgacttccgcaagcccaacgcctggctgttccaggcgcgccagaatccggcctcgccatcaccgggcagcatcgacgtttacgactggccggggcgctacgtggaacacggccacggcgagttttatgcccgcatccgtcaggagcgctggcaggtggatcaccagcagatacagggaacaggcaccgccgtcgggctggcgccgggatacacttttgcactgctgaacgcgccgttcttcagcgataacggtgagtatctgaccacggcggtacactaccagtttgaagagaaccgctacgccagcggcagcgacgggggaagcgtccaccggttggactttacggtgatcccgtcttccgtagtattccgcccggagcaggcgacgccttggccgcgcacctacggcccgcagaccgcgaaggtggtagggccgcagggcgaatccatctggaccgataaatacggccgggtgaaggtgaagttccactgggaccgtctggcgaatggcgatgacaccagttcgggctgggtgcgtgtttccagcgcctgggctggtcaggggtttggcggcgtgcagatcccgcgcgttggcgacgaagtggtgatcgactttatcaacggcgatccggaccgcccgatcgtgacgggcagggtatataacgaagccagcatgccgccgtgggaattgccgggtggttcgacacgtatgggatttatgacccgtagtaagggcgggcatatggataatgccagttacctgttctttgaagataaattgggtaatgaatcggttgatttgcactcagagcggaatatgaatgtttctgtcgaaggggaacatgttgagacagtgcataaagcgaccagttatactcataaagatgtcaggaatgttactgtagataagcatgatactcagacttataacagtgggcagaccgtgtctgtaactgccggtgggcgtaaagagagtattacggataacgaatccaaagatgttactggctattcagacaataaatatagcaataatttggtcgtaagttctggtgcgacagtaagtaccaaagctaccagtgatattatgtttgatgcgggtagcaagattgtttatggccaaacaatatcggcggatggttcagaatcagcactaccttctgtcccttttgatattaatgccaaaggtactgtgatggctccggaaggggcttttgttccacctacatctatactagcggctgcatcatctggtgcaatcggtgctgcaacgcaggtggtttataagaaaggtgttgtcacagaaattaatggcgtagataaactaacggttgatcagaaccagatcgtggatgtaaaggggaatgtagcgcgggatattaaagggaaatgggaagaaagtgttgcaggagaagtatctataaaatccccaagtaaaatcacaataaaaagtgacgtcaatgtcgaaataaatgcaccattttttgctagtaatgtaaagggctatcaggtgtctataacaggtgcatctggtagtttcacaggagtttctggtggtttgactggtgtatctatttctcataatgtagtagaccactcaagtaaaaatatagatttagctgatgcagatactagggttcggcttaggaataaaattgaagtcacaaaatcaaatttgagaactttttttaataaccttttcattgtaggatga

SEQ ID NO: 444666 - DNA, 150 bp, Serratia marcescens
atggtcaccgccaactttggcattactgtagataagatatttatcataactaattgtccacatttagccttaaccaagtcgccgacgctggttatttccatatcacggctgttggtgattgccatccccaccgtctttaaaggtatttaa

SEQ ID NO: 444667 - DNA, 192 bp, Serratia marcescens
atggataatcaattaatacgctccgatgcggatttatcgtcagaaacgccggatgacctgcaggcgctgcgtcacgctttctccttacccccattacgttatatcgatattttgcagcaggaacgtttaatgcaaatgatgacgcgttggccgctgctggatgaattgtccaaagaatcagggagtcactaa

SEQ ID NO: 444668 - DNA, 246 bp, Serratia marcescens
atgccggtaattgcgctgcaggggatgcggggcggaataggaacgacgtcggtcacggcggcgttggcctgggcatttcagcaactgggtgaatcggtgctggcgatcgactgttcggcggataatttactgcgcctgcatttcaacacgccgttcgcgctggcgcgcggctggacgacggcgactggcgacaaggggcgatgcgctatagtgaaaacctcgactttctgccgtttggccggctga

SEQ ID NO: 444669 - DNA, 510 bp, Serratia marcescens
atgcgctatagtgaaaacctcgactttctgccgtttggccggctgagcgatgcggaacgccgcaatctgcagcaaagcccgacgccgtggcgggaaaagatccgtcagctgcaggacgccgggcgctattgctggatcctgctggacgtcccggcgggcgacgatgcgccggcacggcaggcgctcgacgccgccgaccgggcgtttgtgctgctgacgccggacgccaactgccatgcgcgcctgcatcagcagccgttgccggagcacggccattttctgattaaccattacaatccgcacagccagctgcagcaggatctgcaccagctgtggctgcaaagtctgcataatctgctgccggtgatggtgcatcgcgatgaggcgctggcggaggcgccggcgatgaaacagccgctgggggaataccgcccggagagcctggcggcggatgaaattctgacgctggccaactggtgcctgctgcatctgcaggacagcgctgcatga

SEQ ID NO: 444670 - DNA, 2604 bp, Serratia marcescens
atgagccgggtgatgcatctgctgctgatgccgccggtctatcaggcggtgcagacgcgctatcgcggctaccggcgcaacggttcgtcagcgctgaccgccctgctgaccacgctgctggtcgcctgcggctgggcgctgctgcgctttgaatcaccgtcctggcagcgcattcgcgccggccggacttactggttcccgcatctttcctctacccggccgcgtccggccgacgcgctgcgctatctgctgcaggcgctgtggctgctgctgtttcgcagcgggcgcgggtcgcgcacacgttttaccttcagcggctggcgcacgctgcgcctgcgctacctcaactggatgcagcgtttgccgcaccggctggcggacgccggcgtcgagcagcagaccacggcgcgcctggggcggatgaaccgccatctgcgccgtatcctgtttatctttgccggcgtgctggcggcgatcctggcgctgctgtgcatctcccagccgttcgatctgtccgcgcagtttgtgtttgtgctgctgctgtggggtattgcgctggtggtgcggcgggtgccggggcgtctgccggcgctgatgctgatcgtgctgtcgctgaccgtctcctgccgctatctgtggtggcgctataccgccacgctgaactgggatgacccgctcagcctgatctgcggcctgttgctgctggtggcggaaacctacgcctgggtggtgctggtgctgggctatttccagaccgtgtggccgctgaaccgtcagccggttgagatgccgccggacagccgccagtggccgacggtcgatctgatggtgccgacctataacgaagatctcagcgtggtgaaaccgactatctatgccgcgctgggcatcgactggccgcgcgacaagctgaatatctttattctggacgacggcaaccgcccggagttccgcgctttcgccgaagaggtgggggtgaagtatattgcgcgcgccacgcacgagcacgccaaggccggtaatatcaaccacgcgctgcagcacgccagcggcgaattcgtggcgatcttcgactgtgaccacgtgccgacgcgctctttcctgcagctgaccatgggctggttctttaaagaccgcaagctggcgatgctgcagacgccgcaccacttcttctcaccggatccgtttgagcgcaacctgggccgcttccgccagacgccgaacgaaggcacgttgttctacgggctggtgcaggacggcaacgatatgtgggacgccaccttcttctgcggttcctgcgctattttacggcgttcggcgctggatgaaattggcggtatcgcggtggaaaccgtcacggaagacgcgcatacctcgctgcgcctgcaccgtctgggctacacctcggcctatatccgcattccgcaggcggccgggctggcgaccgagagcctgtcggcgcatatcggtcagcgcatccgctgggcgcgcggcatggtgcaaatcttccggctggacaacccgctgttcggcaaggggctgaagctggcgcagcgactgtgctacgccaacgccatgctgcacttcttgtcgggcatcccgcggctgatcttcctgaccgcgccgctggcatttctgctgctgcacgcctatatcatcttcgccccggcgctggccatcgcgctgtacgtgctgccgcatatgatccactccagcctgaccaactcgcgcattcagggcaaataccgccactcgttctggagcgaaatctacgaaacggtgctggcgtggtatatcgcccggccgaccaccgtggcgctgctcaacccgcacaagggtaagtttaacgtcaccgccaagggcggcctggtggaagaggaacacgtcgactgggtgattacccggccatatatggtgctggtgctgctgaatctggccggcctgtgcttcggcgtctggcgcatgatgtacggcccggcggatgaaatcatgacggtgatcgtcagcctggtgtgggtgctgtacaacatgaccattctcggcggggcggtagcggtggcggtggaagccaaacaggtgcgtcagtcgcaccgggtggagatcgccatgccggccgcgctgtcgtgcgaagacggccacctgtatccctgcacgctgcgcgattactccgacggcggcgtcggggtggaaatgcgcctgccggatcggctgcaagagggcgacaaggtcgggctgctgctcaaacgcggccggcaggaatacagcttcccctgcgtggtgacgcgcgccttcggcgccaagatcgggctgcgcatggtggcgctgaccacccgccagcacattgattttattcagtgcacgtttgcccgcgccgatacctgggcgctgtggcaggacggcttccctgaagacaagccgattgacagcctgcgggacgtgctggcgctgggcttccgcggctatctgcggatggcggactatgcgccgccgctggtgcgcggcgtgctggtcggcgcgatgtcgctgctgagctggctgctgtcgtttatcccgcacggcgtcgggcgcagcgcgacgttcagccagaaagaaaccgtggtgtag

SEQ ID NO: 444671 - DNA, 2298 bp, Serratia marcescens
atgacgagaaaaattacctggttaaccgcgctggccttaggcatcagtacgttgtcgcaggccgcacccgccaccgcgccggaggtgacgccgccggcgaacgccgatgcgccgcttgtcgcgccgctcaacccggctgcgccgcaggatccgaacgcgccggtgcgcgacgtacagctgccgtttgcgcagattgcgccgccgccgggcacttttaccctgcgcggcacccatcctgacgggcagattgagttcggcgtgcgcagcgacgaggtggtgtcgcaggcgatgctggacctggagtttaccccgtcgccggcgctgatcccggtagaatcgcacgtcaaagtgtaccttaacgacgaactgatgggcgtcaccaccctgaccaaagagcagttgggtaagcccaatcgtgtccagatggcgatcgatccgcgctatatcaccgattttaaccgcgtgaagctggtgtttgtcggccactatcagaacatctgtgaaaacccggccagcagcgcgctgtggctcgacgtcggcaagggcagttctctgaagctgcgttaccagacgctgccgctgaaaaatgagctgtcgcacttcccggagccgttcttcgatagccgcgacaaccgtccgctgacgctgccgatggtgtttgccggccagccggatatcacccagcagcgcgccgccggtattctggcttcctggttcggcagcaaggcgcagtggcgcgggcagtccttcccgacgctgtttaatcagctgcctgaacgccacgcggtggtgttcgccaccaacgatcggcggccggatttcctgcgcgattacccggcggtgaaaggcccgacggtggagatgatcagccatccggataatccttacgtcaagctgctgctgattcagggccgcgatgacaacgatctggtaacggcggtgaagggtatcgcccagggcaatattctgttccgcggccagaacgtgttggtggacaaggtggaacagttgcagccgcggcagccgtacgacgcgccgaactgggtgcgcaccgaccggccgatgaccttcaccgaactgcagcagtatgccgagcagctgcaaaccagcggcattcagcccggcccgatttcgttgaccatgaacctgccgccggatctgtatctgatccgcagcaccggcatcgatatgcgcctgaaatatcgctacaccccgccgcgtattcaggacggttcgcggctgaacgtcagcctgaataaccagtttatgcaggcgtattcactgctgccggagcatgaacaaggttcgcagttgctgcgtctgccgttgacgcaggggctgatcgactcggataagaacgtcaatatcccggcgctgcggctgggggcgatcaaccagctgcgcttcgattttgattacaccacgctgctggccagcggtgcggaaggacgctgtgagacttactcctttacgcaaaaccacgcggtcattgacggcaattcgaccatcgacttctccggctaccgccactttatggcgatgccggatctgcgcgccttcgccaacgcttcgttcccgttcagccgcctggcggatctgtcgcagacgctggtgctggtgaataaacagcagcagccggcgcaggtcagcgccatgctgaacgcgctgggtaatatcggcgcgcaaaccggctacccggcgctggcggtcaaactgagcgacgactggggacaggccaaacaggcggacagcgatctgctgctgatcggcgctatcccgccggagttgcgtgacgataaaaaagtcagcctgctggtggatgcaacgcagagctgggtgaaacagccgcgtcgccagccgacgctgccgatggcggacgtgcaggcggaagatgcgcaggccgacagtaaaaccagcgtacgttcggaaggggcgatgtcggcgattatcggcgtgcagtcgccgtttgataagcagcgcagtatggtggcgctgctggccgacagcccgcgcggctatgaactgctgaacaacgcgctgctggacagcggcaagcgcgccgcgatgttcggttcggtggcggtgatccgtgagtccggcgtcaacagcctgcgcgtgggcgatatttattacgtcggccacctgccgtggtgggagcgcatctggcatgcgctgtcgacccatccggtgctgctggcggtgctggcggtgattgtggtggtgatcctggcgctgatgctgtggcgcgctctgaaagcctacagccgtcgtcgtctggcgccggaagatcgggattaa

SEQ ID NO: 444672 - DNA, 1110 bp, Serratia marcescens
atgggcgtgctgttgaaatattccctgagcctgctgctgctgtgcgcgttcggcgcggcagccggctgcgactggccggcctggcagcgctataagcaggactacatcagcgaaggtggccgggtgatcgatccgagttcgcccaaccgcatcaccacctcggaagggcagagctacggcctgttctttgcgctggtggccggcgaccgccctgcctttgaccgcctgctgggctggaccgaagacaatctggcgcagggcgatctcagcgcccgcctgccggcctggctgtggggcgaaaatgagcagaaaacgtggacggtgctggatgacaactcggcatccgattccgatctgtggattgcctacagtctgctggaggccggccgcctgtgggacagccgccgctatcagacgctgggcactctgttgctgcaacgcatcgcgcgcgaagaggtggcggatattcccgggctggggccgatgctgctgcccggtaaagtcggctttgtgaaagatgacggctggcggctcaacccgagctacctgccgccgcagctgctggcgcgttttgccgcgctgcgcggaccgtggcaggcgatgcgcgagtccaatcagcgcctgtggctggagactgcgccgcacggcttctcgccggactgggtggtatggcgcaaagcgcaggactggcggcccgatgaggccaagccgaacgtcggcagttatgatgccatccgcgtttacctgtgggcgggcatgctggcgaacgacgatccgctcaaggccgcgctggtgcggcgctttcagccgatggcgcagctgaccgcacagcagggcgtgccgccggaaaaaaccgataccgccagcggaaaaacccacggcagcggcccggtgggcttttccgccgccctgctgccgctgctggcagagcagcctgaggcgctggcggcgcagcggcagaaagtcatcgaccacccgccgggcaacgacgcctacttcagcgcgtcgctgacgctgtttggccagggttgggatgaacaacgttaccgttttaaccgtcagggtgaactgcaacctgcctgggatcgtcaatgcgcaacttcagaataa

SEQ ID NO: 444673 - DNA, 2010 bp, Serratia marcescens
ttgcgcgtcaggcgttcattaacgattaagcagatggcgacggtgtccggcgtggcgctggtgacgatctgtatttttatcgtgattcagttgttccattttgtgcagcagcgcagggatgactacgcccaacagctggagaatatcgcccattctgtgcgtcagccgctggcggacgcggtgctgcgcatggatatgcgggaaagcaaacgggtgctgaactcgctgctgccggtcggtattctgacgcaggcagatattgtcttgccgaatgaactgcaggcgctgcacgccaacttcccgccggaacgcccggtgccggcggcgatcgcgcggctgttcgacctgccggtgcgcatctcggtgccgctctattcgctggagcgggtgccggccaatccgcagccgctggcctatctggtgctgcaggccgactcctaccgcatgtacaaatttatcctcagcgcgctgtcgaccatgctgtcgacctatctgctgctggcgctgattctgtcgatcgccatcacctggtgcatgaaccggctgatggtctatccgctgcgcgcgatggcgaaagagctggaaaatatctccgaagaggatgcgccgtatcatcagctgatgctgccgacgctgcatcaggatgacgaactgggcctgctggtgcgcaattacaaccgcaatcagcagcggctggcgcgggcatatgcggatatgagccgcctcagtacgcgcaactcggtcaccgggctgccgaatcaggtactgctgaccgccctgctggagcagcatatcgcgtcgaccctgcgtccccagcggtttaacctgctggtgatcggcattgaaacgctgcatgaggccaccggcgtattgtcgcagcagcagcgggaaaagctgctgctggcgctgacagaaaaattacgccagtgcctggataaggattcgctgctggcgcagctgagcaatgccgagttcgccattctggcaaagggcgttgaacggccgtttcacgccatgcagctggcgcagcgcatcatgcggcagcttaatgcgccgctgagcattgagccgttgtcgctgcggccgagcgccagcatcggcatcgcccattacctccagccgggggaaaacgccgaacagctgttgcgcagcgccatgtcggcgatgatgtcggcccaccgcgacggcaagaaccgcatcctgttctttgagccgcggctgacggaacgcacgcaaaagcgcctgacgcaggaaagcgaaattctgcacggtatcgaacataaccagtttgccctgttcctgcagccgcagatggcgatgcgcagcaacacgccggtcggcgcggaagccctgctgcgctggcagcagtatgacggcagcttcagcctgccggcggatgtcatcccgctggcggaagagctgggggtgatggtgccgctgggcaactgggtgctggaagaggcctgccgcatgctggcagactggcgggcgcggggtatcggcctgccgctggcggtaaatatttcaccgctgcagatgcgcgacgccgggtttatcccccacctgaaacagctgctggcgcagcaccagatcgacccgcgtcagctgcagctggaaatcaccgaaacggtgcgtatcgacgactttgaccacctgctggcgaagctgcgcgagctgcatgagctgggcttgtctatctcactggacgatttcggcatggggtattccaacctgcattacctcaaccgcctcaagagcctgccggtcgatcagatcaagatcgacaaaagcttcatctgcagcctgccggcggatgatgccatggcgcgtattatcggccagatttcgcaggtgctgcagttgccggtgctggcggaaggggtggaaacggcggcgcagcgcgactggctgctgcaaaacggtatcgaacacggccagggcttcctgttctcggccccgctgccgcgcgacgagtttgaacggcggtttatcgccggcggcgataaatag

SEQ ID NO: 444674 - DNA, 1380 bp, Serratia marcescens
atggctgatactcctctgacaccctctacttcttcgccggcgacgcggcgcgggctgctgattctggcggccgactgcgtgctatttgcggttttgctctacacgctgcctttttccccgcaggaaaataccggtctggcgctgctggcgtttatcggtattctctggctgaccgaggcgatccacgtcaccgtgacggcgctgctggtgccggtgatggcggtggcgctcggcatgatgaatgtcgataaggcgctggcgtcgttcgccaacccgaccatcttcctgttcttcggcggctttgcgctggcgacggcgctgcatatccaaaagctggaccggctgatcgccaaccggctgctgttgctggcgggcggtaaaatgctgctggcggcgctgatgctgtttggcgcgacggcggtgttgtcgatgtggatcagcaataccgcgacggcggcgatgatgctgccgctggcgatggggatcctgagcaaccttgaccgcgaacgggatcacaatacttacgtcttcctgctgctgggcatcgcctacagcgccagtatcggcggcctgggcaccatggtcggcagtccgccgaacgccattgccgcagcgcagctggggttggatttcgtcggctggatgaagttcggcgtgccggtgatgatcgtgctgctgccgctgatggtcggcacgctgtacctgatgatgcggccgaatctgaagcaccgctttgacatcacgctggaaaacttcccgtggacgcgaccacgctggattacgctgggtattttcctgctgacggtcttttgctggatcctcagcagccagatcagcgcgctgctcggcggcgtgaagcagttcgacaccctggtggcggtaggtgcggcggtgctgatcggcatcagcggcgtggccagctgggcgcagattcagcagaacaccgagtggggcgtgctgatgctgttcggcggcggcctgacgctgagcgtgatcctcaaagactccggcgccagtgcggtgatggctgaagggatggcgtcgctgtttggcgccagccactggtttgtgattattctggcggtggcggcatttattattttcctgaccgaattcaccagcaacaccgccagtgccgcgctgctggtgccggtgttcgctacggtggcggaagcgctgggcatgccgccggcgctgctgaccatcgtgatcggcattggcgcgtcctgtgcctttatgctgccggtggcgacgccgccgaacgccattgtttacggcaccggcgagatccgccagagcgagatggtgaaagtcggcttttggctgaatatcctctgcgtgttggtggtgtcgctgttcgcctggtttatctggcgctga

SEQ ID NO: 444675 - DNA, 1488 bp, Serratia marcescens
atgcagggcaccagaattcatcttcttgtgggtgggctgttgttggcggccgccagcggcggcgtgcaggctgaagcgctacaacccgatcctgcctggcagcagggaaaattggataacgggttttcctggcaggtgctggatacgccgcagcggccaagcgaccgcattgaactgcggctgctggtgaataccggatcgctggtcgaatcttcccagcagatcggtttcgcccacctgctgccgcgcctggcgatggcgcgcaacgaaagttcgccgcagctgcgttcgctgtggcagcagggcgtggatgacgaacagccgctgccgccggctattagctcgtatgatttcaccctctataacctgagtttgccgaataaccgcccggatctgctgaaagaggcgctgagctggctggcggaaaccagcggcaagctgccgatcgacgagcagacggtgcataaggtggtgaattccggtgccgatccgatcggcctgttccctgccaatacccaggatgcctggtggcgctatcggctgaaaggctctacgctgctggcgcacgacccgggccaggcggtgaagcggccggtcaatcttgaacagctgaaagatttttaccagcagtggtacaccccggacatgatgaccttgtatgtggtcggtcgggtggacagccgcagcctgagcgagcagatcaacaaggccttttcgccgctgagcggcaaacgggaaacgcctgccaccatgccgaccctggcgccgctgccgccgcagccggtcagcctgatgaatgagtctatccagcaggatatgctgtccattatgtgggatacgccgtggcagccgattcgcgactcccagcaactgagccgctactggcgcagcgatctggcgcgcgaggcgctgttctggcacctgcagcgcgcgctggaaaagagcccgcagaaggatgcgcagctgggcttcgactgccgggtgcagtatcagcgttcacagtgcgctattcatctcaacaccagcaacgccaacctgaagtccgcgctggagtttgtggcgacggaaatggcggcggtgcgtgataacgggctcagccagcaggaatttgatgatttgctggcgcagaagaacgatcagctgagcaagctgttcgccacctatgcccgtaccgataccgatgtgctgatgagccagcgtctgcgttcgcagcagagcggcgtggtggacatttccccggagatgtatcagaagctgcgtcaggcgtttctggcgtcgctgacgccggaatcattgcatcaggcgttgaaactgcagctgtcgcaggacgctacgctggtgctgcagcagccgaaaggcgaagcggaaaccaatatgaagcagctgcaggatgtttacaacggcattatggcgccgccaccggcggtggtgagcgaagagccgaagcctgaaggcgaagcggcgacgccggagaacggcgcgcaataa

SEQ ID NO: 444676 - DNA, 1056 bp, Serratia marcescens
gtgatgattccagatacaacgtcagacaagaaccgcccggcggtagataacgaactcgatattcgtggcctgtgccgcactttgtggcgcggcaaggtctggattattggtcttgccgttttgtttgcagcggtcgcgctggcggtctcttacctggtcaagcaggagtggagcgcaacggcgatcaccgatcggccgaccgtgaatgcgttgggcggatactactcccagcagcagttcctgaggaatctggatgtgcgcaccatgccggccgtggcgaccgaccagccgagcattgccgatgaagcctacaaagagttcatcatgcagctggcggcctacgatacccggcgcgatttctggctgcagagcgattactacaagcagcggcaggaaggggatgagcgcgcggatgccgcgttacttgatgaattgatcgccaatattcagtttacgccgcgtgatgataacaaagtgccgaacgacggggttaaactgacggctgaaacggcgtcggatgccaaccgtttactgcgcgaatatgtgctgtttgccagccatcgcgcggcgctgcatctgaacgaagagattcagggcgcctgggcggcgcgcaccacctcgatgaaagcgcaggttaagcgccaggaagcggtggcggacgcgatttataagcgtcagctgagctcggtgcagcaggcgctgaaaatcgccgagcagcagggcatcgcccgtgcgcagaccgatacgccggccgaacagctgccggactccgacctgttcctgctgggcaaaccgatgctgcaggcgcgtctggaaggtttacaagcctccggtccaagctatgatttggattacgatcaaaaccgcgccatgctggcgacgctgaacgtcggcccgacgctggataaacagtttcagacttaccgctatttgcgcacgccggaagagccggtaaaacgtgatagtccaagaagagtattttggctgatcctgtggggcgctatcggtgcgatggccggcgccggggtggctttggttcgtcgttcacgcaattga

SEQ ID NO: 444677 - DNA, 723 bp, Serratia marcescens
atgattctccgcgctaccgtcgacccgttaacctgggaaagcgactatttccgcattaacagcgccaggttgaatattgccgcatcggcgccgccgctgaccgccgccgcgctggatcgctttacgctggttcaggctaaaatcccgtctcaccgcctcgatctcgctgatgccctgactacgtttggttttcagctggcggagggggaagtcgatctggttatgcagattggcacggaaactgcttctaaaacggcttccgacgtgcgatcggcggcggccgacgatattcccgttttacaggccgccgccgcgcaggcgttcgccgccagccgtttccgcgccccttggtatcagccggcggacagcgggcgattttacgccacctggattgagaaagcggtgcttggcacgtttgaccacctttgcctgctggcgctggatcgtcaggggcagccggaaggatttgtcagcctgcgggatattggtgacggtgaggcgcgtatcggcctgctggccgcgttccccggcgccggtggcaaaggtattggttcgcggctgatgaccgccgccgccgcctggtgtcagcaacaacaattacagcgcctgcgggtagcgacacaaatcagtaatattgccgcgctacggctttataaacggcacggtgccgttatcgacagcaccgcgtattggttatacagaggttcacatgattccatttaa

SEQ ID NO: 444678 - DNA, 1131 bp, Serratia marcescens
atgattccatttaacgcaccaccggttgttggcacggaaatcgactatatgcaggctgccatgggcagcgggaagctgtgcggcgacggcggctttacccgccgctgccagcagtggatggagcagcatttcggcgcgcgcaaagtgctgttgacgccgtcctgcaccgcgtcgctggagatggcggcgattttgctgaacatccagccgggcgacgaagtgatcatgccaagctttacctttgtctccaccgccaacgcctttgtgctgcgcggcgccaccatcgtatttgtcgacgtgcgtccggatacgatgaatattgatgaaagcaaaatcgaagcggccatcaccgataaaacccgcgcgatcgtgccggtgcactacgccggcgttgcctgtgaaatggacgccattatggcgctggcgaaaaagtacaacctgttcgtggtggaagacgccgcgcagggcgtaatgtcgacctacaagggcaaggcgttgggcaccatcggccatatcggcgcgttcagcttccatgaaaccaaaaactataccgcgggcggcgaaggcggcgcgacgctgatcaacgatccggcgctgattgaccgggctgaaatcattcgcgagaaaggcaccaaccgcagccagttcttccgcggtcaggtggataaatatacctggcgcgatatcggttccagctacctgatggccgacctgcaggcggcctacctgtgggcgcagctggaggcggccgagcgtatcaaccagcgccggctgaagctgtggcaaaactattatgatgcgctgaagccgcaggctgacgccgggcgcatcgagctgccggtggtgccgaaggactgccgccataacgcccatatgttctacatcaagctgaaagacgtgcaggatcgtacggcgtttatcaactacctgaaagaggcggaaatcatggcggtgttccactatattccgctgcatgaatgtccggcgggcgagaagttcggccactttgccggcgaagaccgctttaccagcaacgagagcgcgcgtctggtgcgtctgccgctgtattacaacatgtccgatgttaaccaacgtacggtgattcataccattttgagcttcctcgcctga

SEQ ID NO: 444679 - DNA, 1086 bp, Serratia marcescens
atgaccacactgattcacgtattgggatctgatatcccgcaccataatcagacggtgctgcgcttcttcaacgacgtgctggccaaccaactgccgtcgcagcaggtgagccggtttatggtcgccgccaaagacgtggccgcgctgggggagtacccggcgttgacgattgacagctatccggataagaagagcctggcggaggcggtgatcgcctgcgccaaagccgaccgcagccgccgttttttctggcacgggcagtttaacccgacgctgtggctggcgttgctgagcggtaaaatcaagccgcagcaggtcagctggcatatctggggggccgatttgtatgaaaacgccaccgactggaaattccgcctgttctatctgctgcgtcgggtggcgcaggggcgggttgggcatgtgttcgccacgcgcggcgatctgattcactatcagcagcgccatgcgcgggtgccggcatcgctgctttacttcccgacgcgtatggatccggcgctgaccggcgttgaggtcgagaaaaacgtcgccgggccgatgaccattctggtgggcaactccggcgaccgcaccaaccgccacatcgaagcgctgactgctatccatcagcagttcggcgacaatgtgcgggtgattgtgccgatgggctatccggccaataacgacgactatatcgagcaggtgcgcagcgccggcctgcggctgttcagcgaaagaaatctgcagctgctcacccagcaggtggcgtttgacgattacctgaatattttgcgcgagtgcgacctcggctactttatcttcgatcgccagcagggcatcggcacgctctgcctgctgattcagttcggcgtgccgtttgtgctcagccggcagaacccgttctggcaggatctggccgagcagcacctgccggtgctgttttacggcgatacgctggatgaggcggtggtgcgtgaagcgcagcgtcagctggcgtcggtggacaagcaggatattgccttctttaacccgaactatgttgacggctggcggcaggcattggcgctggcggcgggagaaacggcatga

SEQ ID NO: 444680 - DNA, 1383 bp, Serratia marcescens
atgacgctggcccaatttggcggtttgctggtggtttacctgattagcgtcacctttattctgacggtgacctatcaggagttccggcgcattcgttttaactttaacgtattcttttcgctgctgttcctgctgacgttttacttcggttttccgctcagttgtctgttggtgttccgctttgacgtggctatcgtgccggtcgagtttctgctgtacgccatgctttccgccacctgtttctatgctatctattacgtcagctataagacccggctgcgcaagcgcagcaccgagccgcgtcagccgctgttcaacatgaaccgggtggaaaccaatctgacctggggattgctggcgctggtggcgatcggcacggtgggcctgttctttatgcagaacggtttcctgctgtttaaactgaactcctacagccagatcttttccagcgacgtttccggcgtggcgcttaaacgcttcttctacttctttatcccggcgatgctggtggtgttcttcctcagacagagtctgcgcgcctggttcttcttcctggtggcgacggtgtcgttcggcctgctgacctatgtgatcgtcggcggcacgcgcgccaatatcattatcgcgtttgccctgttcctgtttatcggcatcgtgcgtggctggatcacgctgtggatgctggcggcggcgggcgtgatgggcattgtcggcatgttctggctggcgctgaaacgctatggtttggacgtcagcggcgatgaagcgttttacaccttcctgtatttaacgcgcgacaccttctccccctgggagaacctggcgctgctgctgcagaactacgacaaaatcgacttccaggggctggcgccgatcgttcgcgacttctacgtcttcatcccttcctggctgtggccggggcggccggacgtggtgctgaataccgccaactactttacctgggaagtactggagaataactccggcctggcgatttcaccgacgttgatcggatcgctggtggtgatgggcggcgcgctgtttattccgcttggcgcggtggtggtcgggcttatcatcaaatggttcgactggctgtacgagctgggacgccatgagccaaaccgctataaggcggccattttgcagggcttctgctttggcgcggtgttcaacatcattgtattggcgcgcgaagggctggattcgttcgtttcgcgcgtggtgtttttctgtttgattttcggcgcctgtctggtgctggcgaagttgctgtactggctgcttgatacggcaggtctgatcaagacgcgtatgggcccccgcccgcccgcggcgcaagcgaccgccgcatcggggtccgacagcctactgcaaaggtaa

SEQ ID NO: 444681 - DNA, 675 bp, Serratia marcescens
atggcgcactgcctggacttcctgtttgacggcggccggatgaagcaggggacgctggtggcgatgaacgccgagaaaatgctggcggcggagcaggacgctactctgcgggcgctgctggacggctgcgaatttaaatatgccgacggcatcagcatggtgcgtgcgatgcgacgtaaatatccgggggccgatgtttcgcgcgtggcgggcgccgacctgtgggaggcgctgatgcagcgtgccgggcaggagggtacgccggtatttttggtcggcggtaaaccggcggtactggcggaaaccgaagagaaactgcgtcgccaatggaacgtcaacattgtcggcagccaggacggttacttcacggcgcagcagcgtgaagcgctgtttgaacggattcatgccagcggtgcggcgatcgtaaccgtagcgatggggtcacctaagcaggaaatcctgatgcgcgactgccgcaaggtgcatccgcaggcgctgtatatgggcgtaggcggcacctatgacgtatttaccggccatgtgaagcgggcgccaagggtgtggcagaacctcgggctggagtggctgtatcgcctgctgtcgcagccaagccgcatccgccggcagatcaaactgctgcgctttgtcggctactattacggcggcaaactgtaa

SEQ ID NO: 444682 - DNA, 3366 bp, Serratia marcescens
gtgcgcctgattatcaccacgttattgctcggttgtttactggctcagccggcgctggcggcggcgctgcctagcgagtcacagctcaaacaggagctgaaacaggcagaaagcaacaagaacgcacccaatcaggcggaaacggttgaggcgctgcaaagcgccctcaaccggctggccgaacgcacagaatccctgacgcgtacggaacagtatcagaaagtgatcgacgactttcccaagatggcgcagcagctgcgccgtcagttaacggtcgaaagcgccaaaatcctgccgaacggcgacaatctgcctaccagcgagctggaacagcaaattctgcagaccagtagccagctgttggaacaggcgcgcctgatgcagcaggagcaggaccgttcgcgcgagatcagcgattcactcggccagttgccacagcaacagaccgaggcccggcgcgcactgacggaaacccagcgccgcctgcaggcgctgccgccaaacccgaccaaaccgcaggcactggcgcagctgtatctgctgcagaccgaatccgccgcgcgcaaggccaaggtcaatgaactggatcttgcacagctgtcggccaacaaccggcaggagctggcgcgcatgcgtgccgaagtatttaaaaagcgccatgaaaagctggatattcagctgcaggcgctgcgcaataacctgaataaccagcgtcagcgcgaagccgaactggcgctgaaaaaaactgaacagctggccgaacagagcggcgagctgccgaaaagcatcagcgaacagctgcaaatcaaccgtgaattgtccaccgcgctgaacaaccaggcgcagcgcatggatctgatctcttcgcagcagcgccaggccgcctcgcaaaccctgcaggtgcgtcaggcaatgagcaccatcatcgagcaggcgcaatggctgggttcgtcgccggtgctgggcgaaacgctgcgcgcgcaggtgtcgacgctgccggaaatgcccaaaccgcagcagctggacagcgatatggcgcagctgcgcgtgcagcgcctgcagtttgaaaaccagctggaaaaactgccgcagcgcgcgcaaagccttaaacaggacgacggctccgacctgacgccggggcagcagcagattatcgacgcgcagctgcgcacccagcgcgagctacttaattccctgctgtccggctgcgatacgcaaattcttgagctgaccaagctgaaggtggccaacacgcagctggtcgacgcgctcaatgagatcaaagacgccacccaccgttatctgttctgggtgccggacgtcagcccgctgacgctctcctacccaataaacgtggcgcacgatctgacccgcctgctgtcgttggataccctggctcagctgagcagcgcctttgtgatgatggtgaccagccgtagcacgctggtgcccattttcggcgccctgctgctggtgatattcagcatcagcacccgcaagcactatcacgcatttctggaacgttcgagcagtaaggtcggcaaggtcactcaggatcagttctatctgaccctgcgcaacgtcttctggtctattctggtggcgctgccgctgccggtgctgtgggcagcgctgggcttcggcctgcaaaatgcctggccttatccggtcgccgtggcgatcggcgacggcgtgaccgccaccctgccaatcctgtgggtctgtatgatcagcgccaccttcgcccacccgcgcgggctgtttattgtgcacttcggctggccggcgcagcaggtttcccgcgccatgcgctattacaaaatgtcgatctggctgattgtgccgctgattatggcgctgattaccttcgataacctcaacgaccgcgaattctccaacacgctgggacgcctgtgcttcatcctgctgtgcgtcgccctgctgctggtgaccagcagcctgaagcgcgccggtatcccgctctatctggataagaaaggctccggcgaaaatatggtgaacaccgcgctgtggggcgtactgatgtctgcgccgctgctggcagcgctggcggccgccatcggctacctcgccaccgcccaggccctgctggcgcgtctggaaacctcggtcgccatctggttcttcctgttggtggtctaccacatcatccgccgttggatgctgattcagcgccgacgcatcgcctttgaccgcgccaaacagcggcgcgccgagattctcgcccagcgtgcgcgcggggaagacgaagccggcaatacgcacgttaccggcagtaatgaaggcaccgtcgatgtcgatgagacagaaatcgatctggatgcgatcagcgcccagtcgctgcggctggtgcgttcgatcctgacgatgatcgcgctggtgtcggtgatcttcctgtggtcggagatccattccgcctttgctttcctggaaaacatctccctgtggaacgtgacctccaccagcaacggcattgacagcgttcagtcgatcacccttggcgcagtgctgatcgcggtgctggtgatcatggtcactacccaactggtgcgcaatctgcccgcgctgctggaactggcggtgctgcagcatctggatctgtctcccggcaccggttacgccattaccaccatcaccaaatatctgctgttgctgttcggcgctatcctcagtttctcctggatcggcatcgaatggtcgaaactgcagtgggtggtcaccgcgctgaccttcggcctcggcttcggcatgcaggagatcttctccaacttcatctccggcctgatcattctgtttgaaaaaccgatccgcatcggcgataccgtcacgatccgcaacctgaccggcagcgtcaccaagatcaatacccgcgccaccacgatttccgactgggaccgcaaagagatcatcgtgccgaacaaggcgtttatcaccgaacagttcgtcaactggtcgctgtccgacgccatcacccgcgtggtgctgaccgtaccggcgccggcggaagccaacagcgaggaggtgaccaaaatcctcaccgacgcctcccatcgctgctcgctggtgctggataacccgccgccggaggtctatctggtcgatctgcagcagggtatccagatctttgaactgcgtatctacgccgccgagatgggtcaccgtatgccgctgcgccacgagatgcaccagttgatcctggccggctaccgcgaacatggcattaccctgccgtacccgccgttccaagtgcgcaccgacaccctgtcgcgcatcaccaaccacgacggccgcgcagtgtcctctacgccgacgccaagcaccaagcgcagctccggcagcctgtaa

SEQ ID NO: 444683 - DNA, 393 bp, Serratia marcescens
atgacaacacaacgtaagccttatgtgcgcgccatggcgcccaactggtggcaaaaactggggttctaccgtttctatatgctgcgtgaaggcacctccgtgccggcggtgtggttcagcatcctgatgatttacggcgtctttgccctgaagggcggcgcggagagctgggccggattcgtcggtttcctgcaaaatccgctggtgctgctgattaatatcatcgccctgctggcggcgctgctgcacaccaaaacctggttcgatctggcgcctaaagcggccaatatcgtggtcaacaacgagaaaatgggccccggcccgatcgtcaaagccctatgggcggtgaccattctggtcacgctggtcgttctcgccgtcgcgctactgtaa

SEQ ID NO: 444684 - DNA, 132 bp, Serratia marcescens
atgctgaagaaaagtatccttgctatgtgctccgtgctgttcctgttttcgctgaccgcgtgcaataccaccgaaggcatcggtaaggatgtacaggccggcggcgaagcgattcaacgcagcgcgcaatag

SEQ ID NO: 444685 - DNA, 1041 bp, Serratia marcescens
atggcacatattgtaacccaaaacatcgcagatagagaagattggttgcatcaactcgccgatgttattaccgaccccgatgaattgctgcggcttctgtcactgaacacgcatccgcaattgcctcagggacgcgatgcgcgccgcctgttcccgctgcgcgtgccgcgcgcgtttgtcgcccgcatgcgcgctggcgacgccggcgacccgctgttacgtcaggtgctgaccgccagtgaggagtttgtgaccgccgccggctttaccaccgatccgttggatgaacagcgcagcgtggtgcccggcctattacacaagtatcgtaaccgcgccctgctgctggtaaagggcggctgcgccgtcaattgccgctactgcttccgtcgtcactttccttatcaggataaccagggcaataaggccaactggcgccaggcgctggactatatccgccaacaccctgaactggacgagatcatcttctccggcggcgacccgctgatggcgaaagatcatgaactcgactggctgatcggcgagctggaaaccattccgcatgtaaagcgcctgcgtatccacacccgtttaccggtggtgatcccggcgcgcatcacccatgaactctgccagcggttgtcccaatcacgcctgcaggtgctgatggtgacccatattaaccatgccaatgaaattgatgcggcgctgacggccagcatggcgcaactgcgccgttccggcgtcaccctgctcaatcagagcgtactgctgcgcggcgtcaacgaccatgccgatacgctggcggcgctgagcaacgccctgtttgatgccggtattctaccctattatattcacgtgctggataaggtgcagggcgcagcccactttatggtcagcgacgatgacgcgcgccatatcatgcagcagttgctgagcaaggtgtccggctatctggtgccgcgcctgacgcgggaaatcggcggtgaagccagcaaaacgccgctggatctgcggctggcgcaggacgggccccagccataa

SEQ ID NO: 444686 - DNA, 345 bp, Serratia marcescens
atgcggactaaagccttactgggactttcggcggcgttgctgctggcaggatgcagcaccactcatcaactgaccagcgcaggtcagcaggttaaatttaccgataccaaaccggcggcggaatgtcagctggtgggggaagtcaccggcactcagagcaactggctgtccggcagtaatgcagaaagcggcggcctgcgcggcgcggccaatgatctgcgtaacaaggcggctgaaatgggcggcaacgtgatttacggtgcgaccagcccaagccagaatctgctctccagctttgcgcctctggacagcaaaatgatgggtcaggtttataaatgcccataa

SEQ ID NO: 444687 - DNA, 1302 bp, Serratia marcescens
atgttagcggtggaattgatcatcgttctgctggccatttttctcggggccagactgggcggtatcggcattggctttgcagggggccttggggttttagttctggcgatgatcggcgtaaagccgggcaatatcccctttgacgtaatctccatcattatggcggtgatcgccgccatctccgcgatgcaggtcgcgggcggtatggactacctggtccagcaaaccgagaagttactgcgtaaaaatccaaaacacatcaccatcctggcgccggtggtcacctacttcctgaccatctttgccggcaccggcaatatttccctctccgcgctgccggtaattgccgaagtggcgaaagagcaaggcattaaaccctgccgaccgctctctaccgccgtcgtctccgcccagatcgccattaccgcatcgccgatttccgccgccgtggtttatatgtcctcggtgatggaaggccacggcgtcagctatctgcatctgctgatggtggtcattccgtcgaccttcctggcggtgctgctgatgtcgctgctggtcacctggctgttcgactccaaactgtctaacgacccggtctacctgaaacgactggaagaaggcctgattaccctgcgcggcaacaaggtgatggagattaaaccgcgcgccaagtcatcagtgttgctgttcctgctgggcgtgctgtgcgtggtggcctacgccatcatcaacagcccggggctggggctggtcgccaagccgctgatgaacaccaccaacgctattctgatcatcatgctgagtgtcgccaccctgaccacgttgctgtgccgcgtcgataccgacgccgtgctgaactccagtaccttcaaggccggcatgagcgcctgtatctgtatcctgggcgtggcctggctgggcgacaccttcgtacaggccaacctggactggatcaaagagaccgccggcagtgtgattcaggcgcacccatggctgctggcggtgatcttcttcttctgctcggcgctgctctactcccaggccgccaccgccaaggcgctgatgccgatggcattggccctgaacgtcagcccgctgacggccgtcgcctctttcgcggcggtatccggcctgtttattctgccgacctatccgacgctggtcgccgcagtgcagatggacgataccggcaccacccgtatcggccgtttcgtgtttaaccacccgttctttattcccggcaccatcggcgtcatcctctccgtagtgctcggcttcctgctgggcggcatcatgctgtaa

SEQ ID NO: 444688 - DNA, 1713 bp, Serratia marcescens
atggatcaacgcatcattaaactgattttcctgctgtgcagcctgttcttcctgccgcagacggtgcaggcctcgctgttcagcaacggcggcggcagccagtttgtgccggtcgatcgggcatttgccttcgacttccagcaaaagggccagcaactgacgctgaactggcagatccgccccggctattatctgtatcgccagcaaataaaactggtgccgcagcaggcgcagctggccgacttcagcctgccgaaagggataagccataaagacgaattcttcggcgagaccgagatttatcaacagcagttgcagctgccgctgacgctgcggcaggcctcggcgaacgccagcctgagcgtcacctatcagggctgcgccgccgccggtttctgctacccgccggaaacccgtgtgattccgctggacgccgtggcggcgtcatccccgccaacgccagccagcgcgacgccggcaacgcccgctcccaccagcctgccgttttcaccgctgtgggcgctgctgatcggtatcggcatcgcatttaccccctgcgtcctgccgatgtacccgctgatttccggcattatcctcggccgggagcgaccgcacagcagcgggcgcatcctgctgctggcggtggtgtatgtgcagggtatggcgctgacctacacgctgctgggcctggtggtggccgccgctggcctgcagttccaggcggcgctgcagcatccgtacgtgctgattggcctctccgcgctgtttatcgccctcgcgctgtcgatgtttggctgctattcgctgcagctgccttcctcactgcagacgcggctggccaactggagcaacactcagcgcggcggctcgctgttcggcgtctttgtgatgggcgcgctggccgggctgatctgttcgccttgcaccaccgcaccgctcagcgccatcctgctgtatatcgcgcaaagcggcaatatgtgggccggcggcggcacgctgtacctgtacgcgctgggaatgggcattccgctgattatcgtcacgctgttcggcaaccgactgctgccgcgcagcgggccgtggatgcagtacgtgaaagaggccttcggctttgtcatcctggccctgccggtgttcctgttggaacgggtggtcggcgatttgtgggggttgcgcctgtggagcctgctcggcctggcattcttcggctgggccttcgcgctaagcctgaagagctcacgcggctggacccgcgcgctgcagctactgttgctggccgcagcggtgatcgccgcccgcccgctgcaggactgggcgtttggccccggcgccacgcagcaggccgtccagccgcacctggcgttcacccgcatcagcaacgtagaacagttgaatcaggcgctgcggcaggcgcagggtaagccggtgatgctggatctgtacgccgactggtgcgtcgcctgcaaagagtttgagaagtacaccttcagcgactccggcgtgcaggccagcctggccgacacggtgctgctgcaggctgacgtcaccgccaacagcgccgaacaggcggcgctgctgaaacatctacaggtcttgggattgcccaccattttgttctttgaccgtaacggccatgagcaaacggccaatcgcgttaccggttttatgaatgcccagacgtttaacgcacatttgcagaaaactgtgcagtaa

SEQ ID NO: 444689 - DNA, 576 bp, Serratia marcescens
gtgcaacgcgaacatgttcttgataccgcgctggggttgctggaacagcaaggtctggcgaacaccacgctggaaatgctggcagagaagctcgacgtacaacctgctgatttcaagccctactggccggatgcggaagccttgttgtatgactgcctgcgccatcacgggcagcagatcgacgcctggcgccggcaattgctgctggatgagacgctgacgccgcagcaaaaactgctggcgcgctatgacgtgctggcggaatacgtacagaacggtcgctatcccggctgcctgtttattgccgcctgcagcttcttcccggaggatgaccatccgatccaccagctcgcagagcagcagaagatgagctcgctggcgctgacccgcgacctgctgcgggaaatggacgccgacgacgccgatatggtggcccagcagatggagctgattcaggaaggctgcctgagcaaattgctgatcaaacgacagcttcaggatgtttccgtcgccaaacgcctggcggaagacattctgcaggtggcccagtgccgcaaacacggtgccttgggctag

SEQ ID NO: 444690 - DNA, 1140 bp, Serratia marcescens
atgaaaaaaccaatgattaacttttcgctcacgcgctggctgggggtggtgatcaaggagatccatgaactgcgccgggatcgggtgagtttcagcatggtgttcctgacgccgctgttccaactgatcattctgggctatgcagtgaatatggatccgcgccatgtgccggcggcgttgttgaactatgactcggggcatctgagccaggtgtttatcagtgcagcacagaatactcaatatttctccctgcagccggcagcctcggagcaggaggcggaaaaggcttttgtgcggggtgatgtgatctttatcgtgaccatcccggcggacttcagccagaagattttgcgtggtgaaaagccgcagttgctgatccaaagcgatgctattgatccgatcgccggcggcaacgcgctgagtgccatcgcgcaggcgtcaaaaaatatgtttcagtacgatctgccggagtcactgcggggcagggaagggacggagaacttcgagctggtggtgcaccggatgttcaacccggaagggatcacacagtacaataccattcccgggattatcggctcgatcctgagtaccaccatgatcctgatgaccgcgctggcgatcacccgtgagcgtgagagcggtgcgatcgaaaacctgctggtatcgccggtgaccgggctggaggtgatcgtcggtaagatcacgccttatgtgctgatcggcatgttccagtcggtaatgatcctgctgtgcgcggtatatctgtttaatattccgctgctggggaacgtgtttttactcctgacggtgctgacggtctatatttttctgtgcctgtcggtaggcatcaccatttccagcattgcgcaaagccagctgcaggcgttgcagatgtcgtcgttctactttattccctcggtgctgctgtccggctttatcagcccgtttatcagcatgccggcctgggcgcaggcgatcggttcatgcctgccgctgacctactttattcgcttaatcaaaggggtgatgctgaagggctacacgctggcggagctgctgccggattttctgccgctgctggggctggcggcggcggtgatttttatcggcctgcgtacctaccgcaaaacgctggactga

SEQ ID NO: 444691 - DNA, 924 bp, Serratia marcescens
atgaatgactggtgcattgatgttcacaagttgaataaacactttggcgccaatcatgcggtgagggatttttctttacgcattggcaaaggcgagatttacggctttctggggccgaacggcagcggtaaaaccacctcgatacgcatgatgtgcggtttgatcacgccggattccggcagtggctcttgcctggggatggacatatttacccagcgtgaagcgattaagcggcgcattggctatatgacccagcatttttcaatgtggggtaatttgaccattcgggaaaatttattatttattgcacgcctgcacaatcttgaccggcgtaagcagcgtattgagcgcgtactggaggagatggggctggcgtcccgccagcatcagctggcgaaggtgctgtccggcggctggaagcaaaggatggcgctggccgcctgtatgctgcacgaacctgagctgctgtttctggatgaaccgacggctggggttgatcccaaggcgcggcgcgagttctggcaaacgctgcatcacctctctgacgccggcatctccattctggtcagcacgcactatatggatgaagcggagcgctgccataaagtggcgtacctttcctacggcaccctgctggccagcggcgccatcgcagatattatccaggcgcaaaatctcaccacgatccaggtgcgcggcaagagattgacggagttagaaaaccggctgcaagccctgccagagatcgagcagacggtcatcttcggcaatgcgctgtatgttaccgcctgcaacggcgaacggctgtacggtttactgacggcacggttgccggtggggtatgaactgtgccaggtgccgactcagcttgaggatgcgtttacctacctgatgaagagtagcgatgaaaaaaccaatgattaa

SEQ ID NO: 444692 - DNA, 966 bp, Serratia marcescens
atgaaccttactggtaaggctgtgctgattattattttttctttgctgtgctcgggctgtagggatacatcgtccgatgcattttccggctatgccaacggtgaatttatctatctctcttatcacgccagtgaaaagattgagaaggttctggttaataaaggcgcttgggtcgaaaagggacaacccttggctaccatggagtcttttaacgccgataatgcgctgcgtattgcagagaagaattatatggctgaacgcgccctgctgcaggatttgcgttctggcgatcgtgataaggagctggacgtggtgcgtgcacagttaacgcgggcgcgtgccgcagccaaactggcaaaacgtcaactggaaagaaatcagcctctttataccaagcatgttatttccgccacggagtgggaggggatggaagcggattatgcacagaagattgcgcaggttaatgagctgtcgcatcaactgagtgccaaggcgctaccggcgcggcaagagcggattaacaaccagtcggcgcgggtggcatccgccaggctgcagctggacaaagcgcgttgggatttgcagcaaagccagattgtcgcaccggagtcggcattggtttatgacgttatttatcgccccggcgagcgtcccgctgccggtaaacccattatcagtctgctgccgccggaaaatatcaaggtccgtttctttgtaccggaaaaggatctgggagcgctacatgtgggttcacgcatcgatattctttgtgacggctgcgcagagccgatcgcggggacggttcactatctcagtccgcaggcggaatactctccaccggtgatttacagcaccaaacgccgtgaaaaactggtgttcatggctgaggcgcgaccggagcttgtgcaggcgcagcggatgaagattggccagccggtgcaggtgaggctcgttcacgatgaatga

SEQ ID NO: 444693 - DNA, 1692 bp, Serratia marcescens
atggatacaattggcagggttattgaggagtttttcccggggcaggatatgtctcctcgccggcgtaggttaattaaatgggtgttcggcgaagaaaagattgcgccagtattacaaaaagccaaaggaaagcaagggcttgattgggttgattcggtagtcgataccctgcagttgcgctttgaggcacacggtggcgattacgataatatccccagtcaggggccgctgattgtgattgccaatcatcctacggttatcgatgggttggcgttaatgagcacgatttcacgtgtgcgtaaagatgtgaagataattgctaaccatgtattaacctttttgtttccgcaaataaaagatatctcgatcggcatcagaaatatgcacggtaagatgagccataggcaatttaaagagatgagcgaccacctggaaaaagggggcgttctgctgatctgcccggcagggcgattagccggcctgtcgctgggcgggctgcgggagtcgccatggcatccggggttcattcacctggcgcgtcgtacccgggcgacgctgttgcctgtgcatattcgcggcatcaacagcgtttggtattacatggcagcgcttgcctggcgtcccttgtctaatctaatgatttttcgtgaaatagcccgacatcagggcagtacgctacgtatgaggatttgtcagccaatcggcgtttcagccctaaagacggatgaagcgctggagacgttggctgccgattgccgggctcatcttttgagcgtcggtaaggggaaaccgggagtggtgcctacattgccggcgcttgccgctccggaatcgagaagactgctggctaacgcactgagtcggtgtgaagtgttgaaaacgcttggtgatggtaaacggatatacctgtatcgttatcaggacgaggcgtattcgccaattttacaggagctgggccggctgcgtgaagcctcattccgcgccttggcgatgggatccggggaaaagcgcgataatgacgtttacgatccggactattaccatgtgatactctgggatccgcaggcattggaaattgttggcgcctaccgtattgtgccggcaggcgagcagatcgccaggcgtggcgtagaaggtctgtatagctattccctcttccagtatacccgcctcttaacggctgacgtcgccgaaagttttgaagtcgggcgtgggtttattcagcatcaatatcaaaaaaccaatgcgctggatgcattatggaaaggtattttctgtttttctcagcgttatcctgattataaaaatctgttgggggtattaacgattcccaaaaactattctgtttcagcgcagcgattgattattgatttctaccaatgctatttctccgcgccgcatcaggccggcttaatggcgggagaggcgaactggccgaacagcacatccggtacgctgttttccggcgatgactttcgcgccgactggaagcggctgaatacgctactggatgaagccggctatcaactgccatggccatttaagcagatggcgcgctggttttaccttggcggttcaatgctgcttgggtttaaggacgaccagagttttaattctattgccggcttgagtatttgcaaactggcggcgctgaagaaaagttatcaatcccactatattaaaacggcgtaa

SEQ ID NO: 444694 - DNA, 234 bp, Serratia marcescens
atgagagaattaaataaagtcgaattacaggacgtttctggcgcaggtccaattgctgatgcagcaaaagcattgggcaacggcatcggtgcactgatcgaaaactttggcatcaaaggcgctaaagacgcagctgccaacctgggcaacggcatcggtgaagttatcgaagctggtctgtccgtactgggcggcatcttcggcggcatctttggccgtcgtccagccaaataa

SEQ ID NO: 444695 - DNA, 1473 bp, Serratia marcescens
atgagcttaagcactctgcgtaatgatattcccgcagggatcgtcgtgtttttggtggctttaccgctcagtctgggcattgctcaggcgagtggcgtgccgccgtttgtcggactgctgaccggtgtgattggcggtctggtggtcacattacttagcccgtcgcgttatgcggttagcgggccggccgccggattggtaaccatcgtcgtcggggcgatggaaacgctcggatcattttctttgctgctggtcgcgctgattatggctggggtactgcagcttattttcggtttgttgcgtgccggacgctttatttcattggtgcccgggacggttatccagggcatgctggcggcgattggcctgttgctgattatgcaacagataccggtcgcgctgggttatcagggcgaagagggcctgtcagggctgtttagcgccgcaggtcagatgttgtcgccggcttcggtcgtggtcgcgttgggtgcactgtttattctttgggcctggacgacggcgccggtgaagcgcataaaagtgatgacgtatatccccgggccgttggtggcggtactgtggggcggtttggccgtggtattcggcgaacgcctgatgccggagtttatgggcaatatctcacgcattgccttaccccaattcgacagcgttgacgaattgggcgcgcagttcagccggccggactggcagggggcatggagtaaccctgccgtttatgtgatcgcggtgacgttagcgttggtggccagcctggaaaccttgctcagtcaggaagcgttgaaaaagcttaaatcgcagacaccagcgccatcgccggataaagaaatgcgcgcgcagggtgtcggtaacatgctgagcggatttttgggcggtttgcccatcaccgccgttatcgtgcggagttcggtcaacgtaaatgcaggagcacgcagtaaagtttctattttactgcacggggttctgttgctgttgtgcggtgtgttcttcagcgatttgttgaacgtcattccgttagcaagcctggcggcggtactgctgtataccggctataaactggcttctccggcgttgtttgccgtacagtggcgtatgggactggcgcacttcgtaccgtttatcgtcaccgttggcgggattattatcttcggcatgctggcggggatcgcaattggtctgatggcgcaggttctgtgcagcacctacaaaagccatcacaatgcgctgcagctggcgcagtatgacgatcactatgtggtgcgttttcatcagaatctgaccttcctgcataatccgcggctgcagagcgtattggcgcagattcctgataactgcgtggtgattgcggaatgcgacaatgcagaatatatcgatcctgacgtacgtgccatgctggcggacttcggtgcgagtgcggcaacgcgcggcatcacgctgaaccgctggccggtgtag

SEQ ID NO: 444696 - DNA, 648 bp, Serratia marcescens
gtgacaatactcaaacccctaatagccaggaatcgcagctgggcgttgcaacagcgccagcgcaatcctcattatttccgtaagcatatcgccggtcagcagccacatgcgctgtggataggttgttccgatagccgggttccggcggaggtgctgaccggcgcacacccgggtgagctgtttgtacaccgtaatatcgccaatatggttttacaggatgacgatagcctgatgagcgtattgcagtacgcgttggactatctgcatgtctccgcaatcgtgctgtgcggccactatggttgtggcggcgtgcaggccgcagttaatctgcccgatctgccgttgtcgcaggagaacagcgcgttagcaaggcgtctgaaaaatttgcgtcagtcgctggcgagcgaactgccgcagtatcagcagagtgaagaggatgagacgcagcgcttgaatcgcgtgatcgacgcgcacgtggtgacccagtttgctcatcttgtcgactgccagccggtgcaacaggtctggcaacagggccgcactctggatgtattcggctgcgtttacgatttgcatgacgggcatctgaaggagctgattcatcaggacagtgcggaggtgcataatgagcttaagcactctgcgtaa

SEQ ID NO: 444697 - DNA, 1317 bp, Serratia marcescens
atgagaagtgtgaaaattagccttgcttggcaaatcttgattgcgttggtgctagggattgttgttggagcgatcctgcacaatcagacggactctcgcgaatggcttgttaataatattcttagccccgccgggaatatttttatcagcctgattaaaatgattgtcgtgccaatcgttatttctaccttagtcgtcggtattgccggcgtcggcgatgcgaagaaattgggccgcattggtttgaaaaccattctctattttgaggtgataaccaccatcgcgattgtggtggggttgaccttggcgaatgttttccaacccggccacggcatcgatatgtcaacgctgactaccgtggatatctcccagtatgagaaaaccaccgaacaggtacagagcggctctcacagcctggtaagcactattttatcgctgatcccgtccaacgtattcgcatcgatggcaaaaggcgacatgctgccgattatcttcttctcggtactgtttggcttagggctctcttccctgcccaaggaaacgaaagagccgctactgaacgtctttaaagcggtttctgaaaccatgttcaaagtaacgcatatgattatgcgttatgcgccggtcggggtctttggcctgattgcggtaaccgtcgcaaactttggttttgcctcgttattgccgctcgccaagctggtgctgttggtgtatgtggccatcgccttcttcgccctggtggtgctcggaacggtggcgcgaatgtgcaaactgcgcatctggacgctgatccgaatcctgaaagacgagcttattctggcctattccactgccagttcggaaacggtgctgccgcgcattattgaaaaaatggaagcctacggtgcgccgaaatcgatcaccagctttgtggtgccgaccgggtactcgtttaacctggatggttccacgttgtaccagagcattgccgccatctttattgcccagctctacggtattgaactgtcaatcggtcaggaaatcgtgttggtgttgacgctgatggtgacgtcaaaaggtattgccggcgtaccgggcgtttccttcgttgtgctgctggcaacgctgggtagcgtggggattccgctggaagggctggcctttatcgctggcgtcgaccgcatcctggatatggcgcgtacggcgttgaacgttgtcggcaacgcgttggctgtgctggtcgtctccaagtgggagcgccagttcgacagcagtaaagcgctggcctatgagaaggaattccttgcgggcaaagtaaaaacagcaagacaatcttaa

SEQ ID NO: 444698 - DNA, 1959 bp, Serratia marcescens
atgagccaactgcacaaacatgcgattcctgccgcaattgcggaacatgccctgattagcccggcacaataccagcaatactatctgcaatcggtgcaagacccggcggccttctggggagaacacggcaagattgttgactggatcaagccttatactcaggtaaaaaacacctctttcgcgccggggaatatcagcatccgctggtttgaagacggcactctcaacctggcagccaactgcctggatcgccatctggccacccgcggcgaccaaaccgccattatctgggaaggtgacgacccgaaccaatccaagcatgtgacctataagcaactgcatcacgatgtctgccaatttgccaacgtgctcaaaagtctgggggtgaagaaaggcgacgtcgtggcgatttatatgcctatggtgccagaggcggcggtagcgatgctggcctgcgctcgtatcggggcggtgcactccgtgatctttggcggcttctcaccggaagcggtggccggacgcattatcgactccaacgcccgcctggtgatcaccgccgatgaaggcctgcgcgccggccgttccgttcccttgaaaaagaatgtggatgacgcactgaaaaatccaggggtgaccagcgtcgacaatgtggtggttttccaacgtaccggtaaacccggctactggcaggaaggccgcgacctctggtggcacgagctgaccgtcggggtctctgcagagtgtccgccggaagagatgaatgccgaagatccgctgtttatcctctatacctccggttcgaccggtaaaccgaagggcgtactgcatactaccggcggctatctggtctatgcggcgatgaccttcaaatacgtcttcgactaccatgatggcgacatttactggtgcaccgccgacgtcggttgggttaccggccacagctatttactgtatggcccgctggcctgcggcgccattaccctgatgtttgaaggcgtgccgaattatcccggagttaatcgtctgtcgcaggtcatcgacaaacatcaggttaatattctgtataccgcaccaacggcgatccgtgcgctgatggcggagggcgacaaagcgattgaaggtaccaaacgcgactcgctgcgcattatgggctcggtgggcgaaccgattaacccggaagcctgggagtggtactacgaaaaaattggcaacggccagtgtccgatcatggacacctggtggcagaccgaaaccggcggttttatgatcaccccgctgcccggcgctaccgagctgaaagccggttccgccacgaagccgttcttcggcgtacagccggcgctggtcgataatgccggtacgccgcaggaaggcgcctgcgagggcaatctggtgatggtcgactcctggcctggccaggcgcggacgctgtttggcgatcacgagcgctttgaacagacctatttctcgacctttaaagggatgtacttcagcggcgatggcgcacgacgcgacgaagacggctattactggattaccggccgcgtcgatgatgtgctgaacgtttccggccaccgtctgggaacggcagaaatcgagtcggcgctggttgcccacccgaaaatcgctgaagccgcagtggtcggtattccacataatattaaaggccaggcgatttacgcttatatcacactgaatcacggtgaagaaccgacgccggagctctataccgaggtacgcaactgggtgcgtaaagagatagggccaatcgccacaccggatatcctgcactggaccgactctctgccgaaaacccgctccggcaaaatcatgcggcgtattctgcgcaaaatagccgccggcgataccagcaatctgggtgatacctcgacgctggcagatccggcggttgtcgacaagctgttggaagaaaaacaatcaatgaaagtaccgtcgtaa

SEQ ID NO: 444699 - DNA, 570 bp, Serratia marcescens
atgaaaaacgaaaatatacatgttcgcttagctcaagctaccgatatcccacaggtcaaaaaattgcttgagcgctatcatgctaaaaaccttgaaggtgagcagcgtgctaatggatttgtgactactgatatgacagagcagcaactcattgaattatgtaattcagaaaacggcgtaataattgctgttgataaatctgacgacaagattatagggttactgttaggtgcttcatggaaattcctcaagccttggccaatgtttgattatatggctgatatattgaaggactatgcttaccaaggccagcaattaagtgccgagacgtcataccagtacggccctatctgtgttgcggaagaataccgcagtaacggtgtgggagaattgcttcttgagtatcagcgcaaggtgttttcaacacgttatccggtgatcgtgacattcgtaaatgtcctaaatccgcgctcttatgcattccatacacgtaatgaatttgaagatgtagggaaatttaaatttaatggtaacaattatcatatgatggctctacctacttctgtataa

SEQ ID NO: 444700 - DNA, 813 bp, Serratia marcescens
atgtttgatttgttaaataactcaatgttcgttgagggaagtgtcatagaaaaataccttcttcttggggtgtttttattggtcgcagcttcatttgtggccggctacatcgatgccatcgccggtggtgcgggattgatccttatacctgcctttattttgacaggcttacctccccagctggctttggggcaggaaaagctggtcagtaccattggcacagttgccgccataaagaattttatgaaaaacaaatcggtaatatggtcagttgtgccagctggacttatatcagccctggctggcgcttatgtgggggcgaaagttattcttcttttacccgctgaaacgctatctattatcattgttggcttacttcctattggcttgattgcagcagtggtaaaagggaagataaaagaagctatcgatggggaagttaagaccaacttcatggcaatcttcatcgtttgttttatagtcggtttttatgatggtttctttggtcctggcaccggtagtctttttatcattgcattgaccgtgataaatagatttggactgttgcaggcatctgcgactagtaaaatattcaacttctcttcgaatattggtgcgtttgtggcttttgctattgctggtaaaatggcctacttaattggtatcccgatgattattgctagtctattgggtaaccatattggttccatgcacgcaatcaatacgaatggtgaaataatccgaaaagcactgtttgttacagtcggggcaatgatggttacactttcagtaaaatattttgtaggagtataa

SEQ ID NO: 444701 - DNA, 921 bp, Serratia marcescens
atgtttatgaagaatggagttatactatcaaaagctgataaaatcagagagtcgcttcctatatctcctgatgagtttagaacaaagctggatagtgagtgctatgtaatttggaaattgaaagtatttaacgaaagtgaattaacagaaacaccgaccaaatcgtctcatgctgattatgtagagtcaaaaaattcagacttacacggagcctatcttgctgcgcattttgaagcgggattatggcctgtggtatatcagggggaaaatgatggccacttaatccgtcatgtttgccccatgataaaagctgaaggcataattagttcgcaaggggcaaagtttgatttctatccacatgtggataacccagaccttcgcataactggtgagagggagtcaaaatcattaggttcttgcccagatacattaacgttattgtgtttgaggaaagaggaaggtgtgaatacgagtcttctaaaacttgatgaaatactctctcatctaacacctgatgttattgataccctttcaaaacctatattcaaaataaatagacctgcgagcttcgctgaggcgtcatcagttgaagaagtccctgtcattgttaagaatgatgggaaatggtattcacgctttgattggcacaatactaatggtatgacgctaaaagctgaagccgctttagaaaaaatgcgctttgtcactcttgaacatgatctttggtttgatgttcctcttgagcctggtgatgctgttacttttctaaatcagaggactatgcatacacgtaatgcttttgagccgcgatttgatggaactgaccgatggctgttacgtgtttttggaatgaagaaaaggccaatagaatcacagttggtttccccttctagttgtcttcatcatttacgtactatataa

SEQ ID NO: 444702 - DNA, 156 bp, Serratia marcescens
atgccggtttacggcctggctgagaaattcgacctcgaacgtatcgatgtcagtgattatcagcagctgtcgccggcgattcgcctggccctgagttacgggttttacgcgaactgtccgaccactgacggcggttgtacatcagtgcagtactaa

SEQ ID NO: 444703 - DNA, 516 bp, Serratia marcescens
gtgattgtcggcgacactatctctccgtggctgggcgatgcgctggcctttgtgaaagcgctgggggcggccttttccgccatggtgggccaggcggctgcgggacggctgctgttcagtatggggcgtagcggcgcgctgccgggttccctcagccaggtcggcaaacgcagcgggctgccggtgaccgcgctgctggccgccgccgcggtcaacaccgtgctggcggtagtcgccgccagcgtcgacaacgggctgtcgcagctggtctcgtttgtggatgtgggggcgatctgcggctttattctgctgcactgttcggtaatcggcctgtttctggtgaagcgccgcctgcgcagcctgcgcgcgctgctggcctgcgggctggtgccgttgctggggatcgcggtgctgacgccggtgctgttccatattcacaccccggcgctggcggccggggcgctgtggttgctggtagggctggtggtgctgtggcgccgtcgggcggcattttaa

SEQ ID NO: 444704 - DNA, 1581 bp, Serratia marcescens
atgaagattaccggatacaactttatcggcagcgaacgcagcgcccagggagataccgtactggaaagcctggacgcggtcagcggcgaagcgctgccgtggcgtttttatcaggccaccgaacaggaggctgccgccgcctgcgaggcggcccgtcgcgcctttagcgtttatagccgcctggcgccggaacatcgggcctggtttctggaagccattgccgatgagctggatacgctggacgacgagtttctggcccttgccagccgggagacggcgttgcccgtggcccggttgcgcggtgaacgcgggcgcaccagcggccagatgcggctgtttgccagcgtactgcggcgcggcgactgtctgggagcccgtatcgatacggcgttgccggatcggcagccgttgccgcgccccgatctgcgccaggcgcggcttggcgtggggccggtggccgtgtttggcgccagcaacttcccgctggcgttctctaccgccggcggcgataccgcggccgcgctggcggcgggctgcccggtggtgtttaaggcccacaccggccatatggcaacggcggaatgcgttgccgacgccatcctccgcgccgcgcgccagaccggcatgcccgcaggcgtgttcagcatgatttacggcaccaccatcggtgaagtgttggtcagacacccggcgattcaggcggtggggtttaccggctcactgcgcggcggacgggccattttcgatatggcggccagccgtccgcagccgattccggtatttgccgaaatgagcagcatcaaccccatcattctgctgccggaagccctgcgccgccgtgggccgcagatcgcccgcgagctggcggattccgtggtgctgggctgcggccagttctgcacgaatccggggctgattatcggcgcggcaggggcggaatatagcgagtttctgctggcgctgcgtgatgaaatggccagccgcccggcgcaggtgatgttgaatgccgggatcctgcagcactatcgtcaggggcttacccggctgagccggcatccgcaggttgaaacgctgaccggcgaagcgcgtgacgataatcaggctgctccctggctgtttaaggccgatgccgccttgctggccagcggtgatgagctgttgcaggaagaggtgttcggcccggcgaccgtggcggtggaggccggcagcgcacgggagttactgcaggcgctacagggaatgcacggccagctcaccgcgacgctcatcgccgagccggacgatctgcgcgactgccgcgagctggtgaatctgctggaagagaaggcggggcgtctgctgctgaacggttatcccaccggcgtggaggtgtgcgacgccatggtgcacggcggcccctggcctgccacgtcggacgcccgcggcacctcggtgggcaccctggctatcgatcgcttcctgcgcccggtctgttatcaggattatccccaggcgctgctgccggatgccctgaaggatgaaaacccgctggggattaaccgactggtgaatggcgtaaccacccgcgaaccgctgcgttaa

SEQ ID NO: 444705 - DNA, 1785 bp, Serratia marcescens
atgaaggataaaccggtacccaaactgcgcagccagcgctggttcgacgatcctgaacacgccgatatgacggcgctgtacgtcgaacgatatatgaactacggactgacccgcgaggagctgcaatccgggcgtccgattatcggcatcgctcagaccggcagcgatctgaccccctgcaaccgccaccaccaggcgctggcggaacgggtgaaggccggcattcgcgatgccggcggcattccgatggaatttccggttcaccccatcgccgagcagagccgccgtcccaccgcggcgctggatcgtaacctggcctatctggggctggtggagatcctgcacggctatcctttggatggcgtggtgctgaccaccggctgcgataaaaccacgccagcctgcctgatggcggccgccaccaccgatctgcctgccatcgtactgtccggcgggccgatgcttgacggccactataaaggggagctgattggttccggcacggtgatttggcatgcacgcaacctgctggccaccggcgaaatcgactacgaaggcttcatggagctgactaccgcttcttcgccgtccatcggccactgcaacacgatggggaccgcgctatcgatgaacgcgctggccgaagcgctcggcatgtcgctgccgggctgcgccagcattccggctccttatcgcgagcgcgggcagatggcctatcgcaccggcaaacacatctgccaaatggtgtgggacgatctgcgtccgtcgaagattctgaccaaagcggcgtttgaaaacgccattaccgttgcctcggcgctgggggcatccagcaactgtccgccgcacctgatcgccatcgcccgccatgctggtgttgcgctgactctggatgactggcagcgggtgggcgaagcggtgccgctgctggtggactgcatgcctgccggacgctatctgggggagggcttccaccgcgccggcggggttccggcggtgctgcatgaattgcagaaagccggtcgcctcaacgaatcctgcctgacggtcagcggcaaagccattggcgacatcgcccgcgagtccggcaaccacaatgcggatgtgattcacgactgggaaaatccgcttaaacaccgggcgggcttcattgtgctgagcggcaacttcttcgacagcgcgattatgaagatgtcggtggtgggtgacgaattccgtaaaacgtggctcagcgaacccggtgcggaaaactgcttcgaggcgcgggccatcgtgttcgatggcccggaggattaccacgcgcggattaacgatcccgaactggcgattgacgcccgctcgattctggtgatccgcggtgctggtaccgtcggctatcccggcagcgctgaagtggtcaatatggcgccgccgacggcgctgctgaaacaaggggtaacctcgctgccctgtctgggggacggacgccagagcggcacctccgccagcccgtcgatcctcaatatgtcgccggaagccgccgtcggtggcgggctggcgctgctgcaaaccaacgatcgtctgcgggtggatcttaaccagcgccgggtcgatctgctgattgacgatagcgaaatggaacgccgtcgggcggcctttacgcccacgcatccgccttctcagacgccatggcaggaaatttaccgcagcatggtcggccagctttccaccggcggctgcctggagccggcgaccctctatttgcgggtggttaatgacgacaacttaccccgacattcacactaa

SEQ ID NO: 444706 - DNA, 1395 bp, Serratia marcescens
atgcgtgtacagaatcactcttctacgcccgatccgcgccagctgcggcgggcaatcttcaccggcgccgttggtagcgcgctggagtattacgattttgccatttacgggctggcgtcggcgctggtcttcggccatattttcttcccctcgctgggggttaccggtgcgctgttggcaagcttcgccacctatggcgccgggttcctggcccggcctttcggcggcctgtttttcggttcgctgggcgatcgcaaaggccgcaaactggtcttgctgatcaccatcgggctgatgggggtcgccaccacgctgatcggcctgctgcccgccgggccgctgggcgccgtgctgctggttgccctgcggctgcttcagggcttcggcgccggcgctgaacagtccggcgccgccaccctgatggcggagctggcgcctccgaaacgccgcggctggtatgcggcactgccctttatcggcgttttttccgggctggcgctggcgaccatcacctttcgggttatgcagttgttgctgagcgaacagcagatcctgagctggggctggcgcattcctttcctgctgagcgtggtgttgatcgccgtcgctatctgggtgcgcttaaggctgaaagaaagcccggtgtttaagaccctggaaacccagcagcaggtgattaagacgccgatgcgggcggtcatgcgcgacgcgcgacgtccgctggccgccaccattctgatgcgcatggcggaaaccggcagctccaccctgtacgccacggtgtccatcgcctttctgaccggctacgccgccacccaagcccagcagagcgccgccttcgcgcagatcggcaccaatgccgtactgctggccagcgtggcgagcgtcatcaccacgccgctgttcggcgccctgtcggaccgcgtggggcggttgcgggtttaccgcgtcggggcgctgttctgcatgatctgggccttcccggcctggatgatgatcgccagcggcaatccctggcttatcactctggcgatcgtcggcggttttgccatcggcgccaacagcatgctcggggctcagtgcgcccacttcaccgagctattcggcaaccgctaccgttattccggcgtggcgctttcccgcgaggtcggcgcgctgctttccggcggactggcgccgctactcgggatctggctcacaggactggccgacggcgccccctgggtgctggccgcatacactattgttctggggggcattacgctcgccggtagctggctttccgtggaaacccgcggccgcgatctgacactgattcaggatgccgtcggccggtcaccccatcatcgcgccccgggcgccatactaataagagagaaaaatcatgaaggataa

SEQ ID NO: 444707 - DNA, 1176 bp, Serratia marcescens
atgaccatcgctctgaatcctgcaaacaccctgcccgaagacggaacccgcggctgcctgatcggccgcgcctgggttcccggcccctgtcccggtccttcgccggtagttattcgcggcgacgacgtcttcgatatttcgcaacaggctgccaccgtcgccggacttctggaactggaaaaccccggggatgtgatacgccagacaaagggacgccatatcggctcactttgtgagctgctggccaacggcggcgatgcgccggaccctgcacgcccgtacctgctatcccccatcgacctgcaggtgattaaggccgccggggtcaccttcgtcgacagcatgctggagcgggtgatcgaggagcaggccgccggcgacggtgaactggccagcggcctgcgggcccgtatctacgatctcaccggcccggatctgcgggcggtcaaacccggctccgaacgggccgccgccctgaagcagttgctgattgaacgcggcctgtggtcccagtatctggaagtcggcattggccccgacgccgagatctttaccaaggcgccggtgctggccagtgtcggcagcggcgccgccatcggcattcatccccattccagctggaataacccggagccggaagtggtgctgctggttaacagtcgcggccggattcagggggcgacgctgggcaacgacgtcaacctgcgtgacttcgaagggcgcagcgcgctgctgctcagcaaagccaaggacaataatgcctcctgcgccatcggcccctttattcgcctgttcgatgacagctttaccttggatcacgtacgcaactgcgaggtggaactgacggttcagggcgaagagggtttccagcttcacggactgagcgccatgagcgccattagccgcgatcctgaagagctggtcaggcagaccctgaacgccagccaccagtatcccgacggctttgcgctgttcctgggcacgctgttcgctcccacccaggaccgggatcgccccggcgccggttttacccaccggcccggcgatatcatcactatcggcacgccgatgctgggcgctttgcgcaatcgggtcaccaccagcgaccaggcaccgccctggaccttcggtctgcgcgcgctgttcgacaatctgagccggcgccgcctgctgtaa

SEQ ID NO: 444708 - DNA, 945 bp, Serratia marcescens
atgtctgatatgtcgtttaccagcttctgtcactggctaaagttccgccatctgttgttgatagatactcttggtcgtaccgggaatatgcatctggcggccgaacagatgagcctgagccagcccgcgctcagtaaaatgctcagggagatcgagaaccagttcggtttcccgctgtttgagcgcctgccgcgcagtatgccgcccacggcgctgggcggcgaggtggtgcgctacgcgcagattgcgctcaacgatgcacggggatttgtggcgcgcatcgacagtctgcgggccggtggccacggacacctgcgggtgggagggatcttcgccgccacggcggtggcgctgccccaggccatcatcagtatcaaaaagcgctggccgctgctggcgattgaagtggtggaacagaccagcgatcatctgatggaaatgctaaaggcacgcaccctggacctggctattggtcgttttaccgagcctcaacagcaacagctgttcgacttccgcccgatggggccggaaccgttctgcctggtggtgaatcgccgccatccgctggccgggcaggatcggcgctacagcctgggagaactcctggcatggccgtggatcctctaccctcaggggacgccgattcgtcgccagatggaggaggccttcgcggcggccggcgttgccacgccgcacaataccgttgaaaccatctcgatgcagaccttccttcaggtactacagggcggcccgatgatcggcatgctgccggaagccatggccgccgctcatctgcacgggggactgctgagcgtgctgaacaccgatctacggctggcaccgcaggaatatggcgtactgacccggcgcagtgaaccgcttaccgagatcgcccgggagtttatggcgctgttgctggagccggaaacgttggccgaaacgtaa

SEQ ID NO: 444709 - DNA, 1296 bp, Serratia marcescens
atgcactcatcgacctcacccatgacagcccggggacgcgccggcgcgatactgcgcgtaacctcaggcaactttcttgagcagtttgatttcttcctgttcgggttttatgccacctatatcgcccatacctttttcccggccagcagtgaatttgcttcgctgatgatgaccttcgccgtcttcggcgccggctttctgatgcgccccatcggcgcggtggtgctgggcgcctacatcgataaagtcggccgccgtaaggggctgatcgtcacgctgtcgatcatggccgccggcaccttcctgattgtgctgatcccgtcttatcagagcatcgggctgtgggcgccgctgctggtgctattcgggcgtctgctgcagggcttctccgccggcgcagagctgggcggcgtttcggtgtatctggcggaaatcgccacgccgggccgcaaggggttttacaccagttggcagtccggcagccaacaggtcgccatcatggtggcggcggcgatcggctttgccctgaatgcggcgctggaagagagcgcgatccgtgaatggggctggcgcataccgttcctgctaggctgcgccatcgtgccctttatctttgttttacgccgcaaactggaagaaaccgaggaattcagcgcccgccgcaaccacctggcgatgcggcaggttttccgcacgctgctcgccaactggcaggtggttatcgccggtatgctgatggtggcaatgaccaccaccgccttttacctgattaccgtctatgcgccgaccttcggcaaaaaagtgctgatgctgagcgcctccgacagcctgctggtgacgctgctggtcgccatttcaaacttcatctggctgccggtgggcggcgccctgtcggaccgcttcggccgtaagccggttctggtggcaatgacgctgctggcgctggctaccgcctatccggcgctggcgctgttggccgccacccccaccttctcgatgatgctgagcgtactgctgtggctgtcctttatttacggcctgtacaacggcgccatgatcccggcgctgacggaaattatgccgacggaagtgcgtgttgccggtttctcactggcttacagcctggcgacggcggtattcggcggctttacgccggtgatatccaccgcgctgatcgaattcaccggggataaggcctcgccgggctactggatgagctttgccgccgtgtgcgccctgctggcgacgctgtatctgtaccgccgtcgcaccttgaccctgcaaacctcacattaa

SEQ ID NO: 444710 - DNA, 807 bp, Serratia marcescens
atgcataaaatttatccttccctgatcgccgcgctggtgctttcctccgccagcggcggcgcgctggccaaagacgtcaccgtgatgatttcaggcggttttaaggccgcgctggaaaaactggcgccgcagtatgaaacccaaagcggcaaccacattattctggtatccgggccgtcgatgggaaaatccgcccaggcgatccctaaccgcctggcgcgcggtgaaaaaaccgacgtggtgatcatggtgggcgacgcgctgaaaaacctggaaaaagagagccgactgcagccgggttcacgtgtggagctggccgattcaccgattggcgtggtggttaaacagggacagccgaagcccgatatcagcagccgcgacgcgctgcgcgccacgttgttgcaggccggctccgtggcctattccgacagcgccagcggtcgttacgtcagcagccggctgtttaaaacgctggggattgaagtgcagatgaaggataaggcgcataaggtggagcgcgtcccggtggcgggcgaagtggcaggcggtaaatacgcgctcggatttcagcaggtcagcgagctgctgccggttcccggcgtgacctttatcggcgagctgccggacagcgtgcagtacatcacccgctttgccggcgcggtgacggcgcacgcggagcatcgtcaggaagggaaagcgctgctggatttcctctcttcaccaacggcgcagcagaccattgccgcgaccgggcttaaatctgttccggccgtgcagaccgttcagctgcgagatgccgttcagtga

SEQ ID NO: 444711 - DNA, 927 bp, Serratia marcescens
atgcccgtgaatgttgatctgaacggtctgtatgcgtttcgcgcgctggtcgaatacggcagctttcgtagcgccgccgagtctatctgcctgtcccagtcggccctgagccgcagaatagaaaagctggaagcggcattgggcgcccggctgttcgagcgcaccacccgtcgcgtcactctgacgctgtacgggcagacgttttccgagcgttccgaccagctgctggcgaattttgaagaagtgatggctgacgtcagtaaagtcagtcaggagcggacggggctggtgacggtggcgacggtgccctcggcggcgtattactttatgcctgacgtgatccgcctgtttcaggcgcgatacccgcgcgtgcgcgtaaagcttatcgacagcagcgtcggcaacgttatcgaagcggtgatgaacggccaggccgacttcggcatctgtttctccggcaacccgctgccgaatacggagtttttaccgctggtggaagatgcctatgtggccgcctgccggcgcgacagcccgttggccacaagggatagcctcacctggcgcgagttttatcagcaggagtatgtgggattggataaagtttccggcaaccgcaacctgctcgatcaggcgttgggggatatgattcccgcgcgccccagcctgtgcgaaacccggcatgtgaccaccttgctgggaatggttgaggcgggcatcggcattgccgccgtgcccgccatgtcgatgcctccagcagagcactccgtgctgatgcagctgccgctgaccgaaccggcggtaacgcgcacggttgggctgctcaaacgcagcggacgcatacagtcctatgtggctgcggaactggaacaactgatcactgaacggcatctcgcagctgaacggtctgcacggccggaacagatttaa

SEQ ID NO: 444712 - DNA, 1386 bp, Serratia marcescens
atgaatacacaggtgcaaagcggtaagaaagtcgatctggtgatcgtcattgataccagcggttcaatggccgatgaggcaaaggcgctgagcgcggtattggacaaggccgtagaggaagcccgcaaatcttgcccttctgatttacgggtcgaatttttggggattgaaggcacattcaccggtaccaagtttgaaaaaacggtgcataactacctcacgacaaccgccggagcagacggcaatacgttaaaaggacgcaagcggggcagcgtagcgaatgccggcgcgcaggaagatgtggctcgcgcggttgaagatatcagcacccattttgactggcgcgccggtgcagaaaagaacgtgttcgtattaggcgatgagagcctggaaggcggagaaatgattctggatgcagcgcgtatcaaagcctgcaatgatgccatcgctaccgcgcggaacaacggcgccaaagtacatacttacctgggcaccccacacgccaccacgccatatccgacgccggaagatgaagaagccaatatcaaggaatacaaacgcctggcgttgcgcaccggcggtgagcactatatctataccaaaggcatcgccgattttacccaggtgctgaaagataccatctgcgccagtaaaatcccgcagcaagagagcattgaggataaaaaagacgaagccgataagctggaaggcaaggcgccgtcagaaggcgataaaccgacaggcaacggcagcaacctgtgcgagcaactgccggaaattgtaaaagcggtaaatacattggcggacgtgctgaaaggtttggttgaagcctgcggaccgggtaatgcaggcaatgcggagaaatccggatgcaagtgccatgaacacgccgcaccggttgaaacgccgccgtccccgccagccccggagccaacccccgtccccccgccgttctcagaatcaacggacttcacagggaatcagttaaataactggcaatttggccccgcaacgcctgagcatgagttttacaccgaagatggaaaaagcctgatacgtttcccgaccaccaatgtcaaaggcagaacacataacggcgtattgctgtataaaaaatacaccgagctgcagccaggaaagcgctatcgtttcagcattcgggcgcgccgggataacgactataaagtgatcccggaactgtcgctgcgtgttgcaggcagtgacattacgccgttgacaacattaaaaaacaaaggcgagtggttaaccctcacaggggaattcaccgccgcacagggcgaaaatctgctggaaatattcagccataaggcgagcggcgacggcaacgatttcagcatcaccgacattaaggtagaagagatctga

SEQ ID NO: 444713 - DNA, 834 bp, Serratia marcescens
atggggtttgaacccaatactcatatggcaagaatccttatacgctcttcagggaaggtattgaacattcatgctaacgatctggaaagaagtgaaatatcgcaaagcttatctgcgcatgaaatcaaggccttataccgccatatttatatggatgggctagcgcccaaaactgagtatcagttgcaggaccggaacgatcgctcctggagcacctatgccgtttttgtcctggcgctggcgatattttatcagttcagtaatctggcggcgattaagcccgtttatattagctatttcgatattgtggtgacgccgggcacctttatttaccccttcacctttctggtcattgacctactcaatgagttttatggcttccgcctggccaagagggccatactgtactcggtcgcagcaaacgtggttatcacactgttgctatacctatcgacaaaacttccggttatccccggctgggggcttaatgaggcgtataataactttatgatgcaactctatgtcgtactgtttgcctcgaccatggcctttataacctctgagctatctaactcatggatactctgtaaggtgaaggcgatgacgcactcgcgtcacctttatctgcgcatctttttgagtacctttgcggcgtctattatcgacagctttgttttctgcctgctggccttttatggcaagatggagaccagcgttatcgtgaaaatggcgataatacagatgatgatcaagtcggtttacgcggtgttaaacgtattcccggcctattatgcgcgtttcctctacagaaaatatattctccatactgagtga

SEQ ID NO: 444714 - DNA, 606 bp, Serratia marcescens
atgtttggtgcggaaaaaagcagtttattgcgtgcaaatctggagcatttgctccgtagtaaaggcgaaacacaggtttctgtcagtgaaagcaccgggcttaatcgcacaacaatctttaagatattggacggccgcgttgccagcgtgcagaaacagacgctgcgtaaaatatctgattttttcggcgtcaccatgtatgagctgcagcatgtagatattgcgacagcggaaaaaatcgatgccagtatttccgttcatggcaatatgaatgcggcggcgctgcccataattcccctgacatcactgattgagcagataaacgccgggcgttccgtcggggagctgacgctgtcctggccactgacctactactatggccatgggccgaacctgattgccgtggcaatggataaaaacccgccggtgcgctaccggtgcggggatatgcttattattcgcaaaggcatctataaaagcaccaatctaaagctgctgtttaagagtaatgcgggattctttactgatgcactggcctgcgtggacgaggtcgatgcaggggttatcgtattaggagatattcttgaagaacgttatggaaactga

SEQ ID NO: 444715 - DNA, 1068 bp, Serratia marcescens
atgagccgtaaatatctgatctatatgtatctgctgaaggcgcgcacctttattgcgctgctgatcgtcatcggctttttcagcgtgatggtgccgaacttcctgaccccctccaacctgctgatcatgacgcagcacgtggcgatcaccggcctgctggcgatcggcatgacgctggtgattctgaccggcggcattgacctgtccgtcggcgccgtggcgggcatttgcggcatggtggccggcgcgctgctgaccagcggcgtaccgctgtggggcggcaatgttctgtttttaaacgtgccggaggtgattttgacggttgccgtattcggctgcctgcttggcctggtaaacggcacggtcattacccgtctgggcgtcgcgccgtttatctgtacgctgggcatgatgtatgtggcgcgcggtgcggccctgctgtttaacgacggcggtacttacgccaatctggtggggatggcgccgctgggcaataccggttttgccacgctggggtccggcaccttcctgggggtgtatatcccgatctggctgatgctggcctttttgctgtttggcctgtacctgacgcgtaaaactccgctcggccgctatatttatgccgcaggcggcaatgagtccgccgcccggttggcgggggtgccgatcgtgaaggttaaggtgtttgtgtatgccttttccgggctgtgtgcggcgctggtggggttgattatcgcgtcgcaactgcaaaccgcccacccgatgaccggcaatatgtttgaaatggacgccatcggcgccacggtgcttggcggcaccgcgctggcgggagggcgcggtcgcgtatcggggtcgatcatcggcgctttcgtgatcgttttcctggcggatggcatggtgatgatgggggtgagcgatttttggcagatggtgatcaaggggctggtgatcgtcacggcggtggttatcgaccagttccagcagaagctgcaaagcaaagtcgtgatgctgcgccgtcatgaacataaacaggccataccgcaggcggaaggatcgctattgcgctga

SEQ ID NO: 444716 - DNA, 1536 bp, Serratia marcescens
atgagcgagcaattggcgcactccgccgcggcggatgtgattatcgagacccgcgacgtctcccgtttgtaccccggggtaacggcgctcgatcgggttaactaccgggtctaccgcaacagggtcaatgtgttgatcggggaaaacggcgccggtaaatcaaccatgatgaaactgctggcaggcgtggaatcgccctcttccggcgaaattctgctgaacggggaaacggtggccctgtcgtcgacgcatcaggcggagcgacacggcatcagcattattttccaggagctgaatctgtttcccaatatgaatgtgatggacaacatctttatcggcaatgagtttttccagcggggcgtgattaatgagaagtaccagtatgcgctggccaaatcgctgctggagcgccttgagctggacgttgacccttatgcgcctctgggtgagctgggcatcggccatcagcaattagtcgagattgcgcgggcgctgtccaaagatacccaggtgctgctgatggatgagccgaccagcgccctgagccagtcggaagtcaaagtgctgtttaaggtgatcgagcagctcaagcggcgcggcgtcaccataatctatatctctcaccggctggaagagctgatggagattggcgatcacatcaccattttccgcgacgggcgctttatcagcgagcgtgaagtcagcgacgccagcgtgccctggatcattgaacagatggtgggcgataagaaaaaacattttgactactcgcccgcgcctcagcaagaaacggtgctgcaggttgacggtttgaccgcgctgcacccgaacggcggctatcggctgaatgatgtgacgtttgcactgcgcaaaggcgaggtgatcggcatttacggcctgctgggcgccggcagaacggagctgttcaaggggctgatcggcatgctgccctgtcagcagggatgcgtggcgctccacggcgaagatatcagccggcttaacttccaggcgcggttaaagaaggggatcgcgctggtgccggaagaccggcagggggaaggggtggtgcagctgatgtcgatcaaaaccaatatgacgctgtccgatctcagtctgaagggattccggcgcgccctgcggccgctgagcccgtcgcaggagcagcataacgtcgacgatatggtgcggcagctggcgatcaaggtgagcgacagcgagctgccgatcacctcgctcagcggcggcaatcagcaaaaagtggtgctgggaaaagccttgatgaccggccccgaggtggtgctgctggacgagccgacgcgcggtatcgacgtcggggcgaaaaccgatgtgtatcacctgatcggcaaactggcgcacgaagggctggcggtcatgttctcctcgtcggaactggatgaggtgatggccctggctgaccgtatcctggtgatggccgacggacgtattaccgccgatctgccgcgcgccgccgtaacgcgggaaaaattaatcagcgcttcaacgccgcatgactga

SEQ ID NO: 444717 - DNA, 612 bp, Serratia marcescens
atgttcacacgactcgggccggtagtgctgatttttctgctgggcggttgccgtattgtttcgcagcaggaactggcggatttaaaaaatccgcctaacccgaaaatggcgaatattccgcaaacgtggcaacagaagctggtgccgcaaattgttaaggacgccaaagcggataacgccttgcttgccgaactggcggcggcgaaagattttgatgaggcctgccagcgctatggctaccgcagccaggcggagaacccctgcctgttcagcgtcaggctgagcggcaccatcaccgacgttaacagcacgtcgcgcagtggcaaaatgacgctgaaaaccgccgccggcgatgaggtccgggtacagaccgggccgattatccgcggaactgacctgcgtgacgcctataagggcgcaggctatcaggattttaacgatcaggtgctgttcggcgattacggccgggcgatcaaccagcaggcggccgacatgatgcgcgatttcaaaccgcaggtcggggataacgtcgaggtggtcggcgtattcagcagttgggatctgccgggcaagatcgccgaggtgaccccggccgcgattacgcgtcgctaa

SEQ ID NO: 444718 - DNA, 939 bp, Serratia marcescens
atgatgaagaagaaactgttgttattaagcatcgcttccgcctgtgtcttttccggcgccgcgctggccgcagaaaaaggcaccatcatgattctggtcaattcactggataacccgtactacgccgccgaggctaaaggcgccaatgagaaagccaaagcgctgggctacaagacctccgtgctgtcgcacggcgaagacgtcaaaaagcagaatgagctgatcgataccgcgatcggtaaaaaggtgcagggcatcatcctggataacgccgactcgaccgccagcgtggcggcaatcaaaaaagccaaagatgccggcattccggtggtgctgattaaccgggagataccggttgacgatatcgcactggagcagattacccataacaacttccaggccggctccgaagtggccaatgtgtttgtcgaggcgatgggcgaaaagggcaaatatgctgagctgacctgcaacctggcggataacaactgcgtgacccgttccaaatccttccaccaggtgatcgatcagtatccggatatgcagagcgtggcgcgtcaggacgccaaaggcactctgattgacggcaagcgggtgatggacagcattttgcaggcccatcccgacgtgaaaggcgttatctgcggcaacggcccggtggcgctgggcgtcgttgcggcactgcgcgccgccggtcgcgacgacgtggtggtggtcggcatcgacggcagcaatgacgaacgtgacgccatcaaggccggtgcgctgaaggcgacggtgatgctgcaggcgcaggccatcgcggcgcaaggggtcaccgatctcgacaactatatccagcatggcaaaccgccggcgaagcagcgggtgatgttccgcggcattctgattacgccggaaaacgcgcagcaggtgcaggacttcaacttcaaatcttaa

SEQ ID NO: 444719 - DNA, 789 bp, Serratia marcescens
ttgaaaagcaaaagtgaacagctggctgacgttcggctacgcagagagaagatccttgagatggtccgggaggacggaacggtcacggttaaagcgctcactgcggcattcggcctgaccgaagcaaccatccgcaccgacctgcgcaccctgcagcaaagggggctggtccagcgctatcacggcggcgccacgctgctggccggtaaacaaaacaccggggcgatgatgctggaacgccagatccatctagagcaaaaagatgcgatcggccgcctggcggcgcggtatatcgaaaacggcgacaccgtgattttcgattccggcaccaccaccaccgcgatcaccaaatatatggcccatatcaagcggctgtcggtcatcaccacggcggtcaacatcgcgctgacgctgggcggtgagccggagatcaatatcctgctgaccggcggcagctttaagttccccacgctgtcgacctccggcgacaaggcggccggtttcttcgaaaacgtgctggcggaaaaactgtttctcgccaccgcctgcatctcgccgcgctcggggctgagttttcccagtgaaacggatatcaaactgaaactggcgatgattaacgccgccagcgaggtctacgtggtggccgactccagcaagattgataaggtttccatgttcgccttaccctgcgagtggtcgaagatcgattacctgattaccgacagcggcatcacgccgtcgcaggtacaggcgttcgagacgctgggcgtcagggtgctaatcgcctga

SEQ ID NO: 444720 - DNA, 771 bp, Serratia marcescens
atgcatccgcgacagaggaaaattgtgcagatggtgggcgagcatggccgcctcagcgtcggcgcgctggcgcaggccgtcggcgtttctctggtcaccatccgtcatgatttgcaggcgctgcatcagcggggggaactgttccgggtgcatggcggcgccgtggccttgcagagccatgcgctccgggccggattacagcggcgctatgccgccaaacaggggattgccgggtatgccgcctcgctggtgcgcgacggcgatacgctgtatctcgacggttgcagcatcagcctggcgctgatcgacgcgttgcacgccaggcgtggtctcaccatcgtgacgacgcatcccgatattgccgagcggctgaagcagagcgagcatcaggcgatgatcgtgggcggcctgcggcaaacgcgtaatgatgcgaggatcggggcgtttacctgcagttgcctcagccagctgcggtttcagcgcgcctttctgggcatcggcggctggcactggcaaagcggatttaccgagccggacccgcagagctgcgcggtgaaaaacgtcgtcgcggcgcactctgacgaggtcgtgctgctggccgactcgtccagattcggccggacgcatccgcacgcgctggcgcccgccgacgccgccgttacccgggtcattaccgacaccaggctgtcgcccaaatatcggcaatatttcgcccggcgggcgatacgcttgaacgtcattaatgcgccggaggccgtctcaggcgattag

SEQ ID NO: 444721 - DNA, 942 bp, Serratia marcescens
gtgagtaatgcagaacatttggcgaacgtaatggtgacggcgtttatcgatgcggtagataacggcgtcgatctggtgccggtggtggcggactccacctccacggcgaaaatagcgccgtttatgcagcgcttccccgatcgtctggttaacgtcggcattgccgaacagacgctggtgggggccgcggcggggctggcgatggcgggaaaaatcgccgtcacctgtaacgccgcgccgttcctggtcgcccgggcgaatgagcaggtgaaggtcgacgtctgctacaacaataccaacgtgaagctgttcggccttaatgcgggcgccagctatgggccgctggcgagcacccatcatgccatcgacgatatctccgtgatgcgcggctttggcaatatccagattttcgccccttcttcaccgttggaatgccgccagatcattgactatgcgctggaacacgtcgggccggtctatatccggatggacggcaaagccctgccggagctgcatgatgagacctaccgtttccagccgggcgccgtcgacgtgttgcgcaccgggagcgatgtggcgctggtggcgatggggtctgcggtgcatgaggcggtggatgcggcggccaccctggagcagcagggcgtcagcgcgcaggtgatcggcgtaccgtcaatccgtccgctggaccgcgctgccctgagcgccgcgctgggcgcaatccgcacggtgattacggtcgaggaacacaatgtgaacggcggcgtcggcagcattgtggcggaagtgctggcggaatatggtcatggcgcacggctgcaacgtctcggcattgccgatggcgagtacgccatcgccgccgaccgtcaggcaatgcgcgcgcaccatggtctggatgcggccggcattgttcgccaggcgctggcgtcgttgcatcaataa

SEQ ID NO: 444722 - DNA, 846 bp, Serratia marcescens
atgaacccgttctcactgtcagtgccggaactggaaagcaaagcgcgtgcggtacgacgccatatcatcaacctgaacgccaacagccctgccggcggacataccggggccgatctgtcgcaggttgaactgctgaccgcgctgtatttccgcattctgaactgtgcgcctgaccgcctggacgatcgggatcgcgatatctatatccagtcgaagggacatgccgtcggctgctactactgcgtgctggcggaggcgggctacttcccgcagccctggctggcgacctatcagcatgccaactcgcacctgccgggtcatccggtgaaacagaaaacgccgggcattgaactgaacaccggcgcgctggggcacggtttcccggtggcggtggggctggccattgccgccaagcgtgacaacagcaagcgccgcattttcctgatcaccggcgacggcgaactggcggaaggcagcaactgggaggccgcgatggcggcggcgcactacaagctggataacctggtggtgattaacgataaaaacgggctgcagctggccggcgccaccaaagacattatgagcaccgatccgctggatgaaaaatggcgcgctttcgggatggaagtcaccgaatgccggggcaacgatatggcctccgtggtggcagcgctggaaaacctgccgcagaacggcaagccgcacgtgctgattgcgcacaccaccaagggcgccggcgtgtcatttattgccggcaagccggagtggcatcaccgggtgccgaaaggcgatgagattacgcaggccatggccgagctgagcgatcgggcagaagaggaggtataa

SEQ ID NO: 444723 - DNA, 951 bp, Serratia marcescens
atggctaagcaggatgaacaacggctcttggttaagattgccacgctttactacctggagggtcgcaagcagtctgagatcgcacaatcattatccctttcccaatctttcgtttcgcgcgccatcacccgctgccaaaaagaaggactggtcaaaatcagcgttgttcagccctccaatatttttctgaatatcgaaaaaggcatcgaagagcgttacggcattaagcaggccatcgtggtcgacgttgcagaagaggcttccgacgcggtgctgaaacgcgccatcggctcggccgccgcccactatatggaaacccgcctgcggcctaacgatctggtgggcgtctcctcctggagcagcaccatccgcgccatggtggatgaggtgcacacccagaacctgaaggcgaacggcgttatccaactgctgggcggcgtagggcccaacggcaacgtgcaggccaccatcctgacgcagaccctggcgcagcagctcaactgcaaagcctggctgctgccggcgcagagcattgaaggctcgatggatgaaaaagcgcgcctgatggccagcagcgacgtcgccgaagtgatcgcccatttcgatgatgtcgacgtcgccatcgtcggtatcggcattctggaaccgtcccagctgctgaaaacctccggcaactactatcaggaggagatgctggcacggttggccgagcgcggcgccgtcggcgatatctgcctgcactattttgaccggcacggcgccccggtgctgagcgacgatgaagatccggtgatcggcatggcgctcgacaaagtgaaaaaatgcccgaacgtcgtcgcactggccggtggccgcgacaaagtcgccgccatcaagggcgcgctgaacggcggttatatcgatgtgctgatcaccgattaccacacttccagaatgctggtcacggactga

SEQ ID NO: 444724 - DNA, 1506 bp, Serratia marcescens
atgtcggcaacaaagaatgtcatcatcgcgcttgatgaaggcaccaccaatgccaaagccgtcgcgctggacgaatgcggccaggtcatcgccaagttttcacaggcgctgtccattcagacgccgcgtgaaggctgggtggaacagtcgggggaattactggtggacgcctcgctgaacgtgctggcgcaggcggtggcgcacgtcggtgcggagcgtgtctgcgcgctggcgatcagcaatcagcgtgaaaccgccatcggctggtatcgcagtaacggcaaaccgctcggcgcggcgctctcctggcaatgctcgcgcaccgcggatttttgcgacagcctgcggcgcgatcatcaggcgcagccgattaaaacggcaaccggcctgcccattgctccgctgttttccggctctaaaatgcgctggctgctggagtcggtgccaaacggctttgcgctcgccgagcagggcgagatttgcctgggcaccatcgacagctggctgctctggcatctgaccgcgggcgaagccttttactgcgattactccaacgcctcgcgcacgcagctgctgaacctgcacagcggcggctgggatgaacagatgctggccatcttccagatccccgccgccgcgctgccggcggtcaaaccctcaagcggcctgttcggccataccaaaggactggcggacattcccgacggtattccgatcatggcgatgatcggcgattcgcacgccgcattattcggccacgcgctgggacagcccggctgcgtcaaagccacctacggcaccggctcgtccgtcatggcgccggtgacgtccgcccaatgcgacatccagtcgctcgccaccaccctcgcctggcatgacgggcagcggctggtctacgggctggagggcaatattccccacaccggcgacgccgtcgcctggatggccgacagcaccggcttaagtgagttgcccgccgcagagctggcccatgagctgaatacgctgccggcttcggtggattccaccctcggggtgtatttcgttccggcgctcaccggcctgggcgcgccgtggtggaacgagcacgccagaggcgtcatttgcgggctgagccgcggcgttaaacgcgcgcacctgattcgcgcggcgctggaatcggtcgcctaccagattgccgacgtggtcgccgccatgcgccagcataatgacttcacgctgacggcgctcatggtggacggcggccccagcaaaaacgactggctgatgcagtatcaggccgatctgctgggatgcccggttatgcgcagcgatatccccgaactttcggccatcggcgccgccctgctggcgcgcaaggccattacccatatcaccgatgacgaactgaaaagctacctgccggtacacggcgagtttcgtcccaatatggcacgccacggccgcctgcaaaaacgctggcgcgagtggcagagcgcggtagagcgcaccctctacgcatcttga

SEQ ID NO: 444725 - DNA, 798 bp, Serratia marcescens
atgagctattcattcagcaaccagaccgtcgtaatcaccggcgccgcacgcggcattggcgaaggcattgccgagcgctttgccgccgccggcgccaatctggtgatctccgactattcggcagatatcctcgccacggccgagcggttaacgcagcgctatcgcggcaatatcgttcccttggttgccgacgtcaccgacgaacaacaggttgccgcgctctaccagctggcgtttgacaccttcggatcggtggacgtctcaattcagaacgccggcatcattaccatcgaccatttcgattccatgacgcgcaaagaattcgacaacgtgcttaacgtcaacaccaccggcgtatggctgtgctgccgggaagcggccaaatatatggtcaagcagaataaaggctgcctgattaatacctcatccggacagggacgggtcgggtttatttatacgccgcactacgccgccagcaaaatgggggtgattggcattacgcaaagtctggcgctggaactcgccgcccacaatattaccgtcaatgcgttttgtcccggcattatcgaaacggagatgtgggattataacgaccgcgtctggggcgagatcctgagcacgccggagaaaaaatacggcaaaggcgaattaatgcaggagtgggtggaaggcattccgttaaaacgcgcaggcaagcccaaagacgtcgccgggctggtgatgtttctggcctcggaagacgcctcttatatcaccggccagaccatcaatgtcgatggcggcctcatcatgtcataa

SEQ ID NO: 444726 - DNA, 1284 bp, Serratia marcescens
atgacacccgctcactcagagccgcggacgatactcggcctcagaacggatttggtctggggtttaatcggcgtgctgctgtttatcgtcggcgacggcgttgaacaagcctggatctccccctatctgatcgaacgcgggctgagcatgccgcaaagcgccacgctgatcgccatctacggcattgccgtggcgatcggcgcgtggctgtcgggcgtgatggccgaagcgctggggccgcgtaaaaccatgctgatcggcgcgatgttctggctggtcggccaggtgctgttcctgctggtggccctgcctaccatgaacttcgccattatcgtgccgacctactgtatccgcggcctcggctacccgctgttctgctactcattcctggtctgggtgacctaccgcaacccggccaaaaccctggcgaccgccgtcggctggttctatctggcgtttaccggcgggctgtatatcgtcgccaatttctacgcctcgctgatgatcccggtactcggccacgtcggcgtactgtggagcgccattgtctgggcgctggccggtacggcgatcgttctgatgtgcgtaaaaggcacggtgcgggaacgcacgacggtcggtgaacagctggcgatcctgctcagcggcatctcgattatcaaggaaaacccccgcgtcggcgtcggcggcctggtcaggctgatcaacaccacctcccagtttgcgttgccggtctttttcccgatttacctctcgctgcacggttttaccaccgaacagtggttaaaggtctgggcgctgacctttacggtcaacatcgcctttaacctgatctggggcgtggtgggcgaccgcattggctggggccgcaccgtacagatcttcggcggcttcggctgcgcctgcaccatgattttcatggcctatgcgcctatctggttcagcggcaactatatggccatgctgctgatgggctgtctgtacggcgcgctgattgccggcttctgcccgctcaccgcgctggtgccttcgctggagccggaaagaaaaggcgcggcgatgtcggtgctgaacctcggcgccgggttgtccagctttgttggcccgctgctggtggcgctgctgttcaccaccgtcggcgccaaaggggtgctgtttgtcttcgccgggctgtatatcgtcagcattttcctgaccagttttgtcgcccgggatgaaaaggcacgctttgccgttccgaaaaccttatcaacaacgcagtccgcatacagcgccaaacgctag

SEQ ID NO: 444727 - DNA, 786 bp, Serratia marcescens
atggtgaccaaagatttcgctcaacagttattcagcctgcagggacgcaccgcttttgtgaccggcgccggcagcggcatcggccagactatcgcctatggcctggccagcgccggcgctaacgtcgcctgtttcgacctgcgtgaagacggcggcctggcagagaccgtgcggcatattcacgccatcggcggtcacgccgtcgcctttaccggcgacgtacgcgatcccgatgcgctgcgcagcgccatcgccggcgtaaagtcacagtatggccgccttgacgtggcggtgaacgccgccgggatcgccaacgccaacccggcgctggagatggaaaccgagcagtggcagcgggtgatcgatatcaacctgaccggcgtctggcatgcctgcaaagccgaagcggaactgatggccgccggcggcggcggttccatcatcaatatcgcctcgatgtccggcgttatcgtcaaccgcggtctggagcaggcgcactacaactgcgccaaagccggcgttatccacctcagcaaaagcctggccatggagtggacgacgaaaaatatccgcgttaacagcatcagccccggctataccgccacgccgatgaacacccggccggaaatggtgcatcagacgcaggcgtttgaaagccagacgccgatgcagcgtatggcgcgcgtggaagagatggccggcccggccattttcctggccagcgacgccgcctcattctgcaccggtgtcgatctgctggtcgacggcggctttgtctgctggtaa

SEQ ID NO: 444728 - DNA, 549 bp, Serratia marcescens
atgagcaagcaacataaaccgctggtgcctgaacagccgattgtactcggcaaactgggttccagttacggcattcgtggttggctcagagtgttttcatccaccgaaaacgccgaaagcatttttgactatcagccctggtttatccagaaggcgggtcagtggcagcacgttgagcttgagagctggcgtcgtcacaatcaggatctgatcgttaaggtgaaaggcattgacgatcgggatgaggcgaatctgctgaccaattgcgaaattgtcgtggattccaatcagcttccgcagttggaagaggatgattactactggaaagacctgatgggctgccaggtagtcaccgcctccggctacgatctgggcaaagtcatcgatatgatggaaaccggatcaaacgacgtaatggtcgtgcgggcaaacctgaaagatgcattcggtatgaaggaaaggttgattccgttccttcatgggcaggttatcaagaaagtcgatctcgctgccaaggtgatcgaggcagattgggatcctggtttttga

SEQ ID NO: 444729 - DNA, 1539 bp, Serratia marcescens
atgacaaaatataaagcgatagtgaccactgccggtgcggaaaaaattgccgcagcaacggccggcgggacacagttaaagattacacacatggccgtcggcgacggcaatggcacactgcccgaaccaacgccagaacagacacagctgattaacgagcaataccgcgctgcgctaaacgcattggatattgccaatgcgtcacaaaaccatattgtcgctgaactgatcatcccggcaaacgtcggcggtttctggctgcgcgagatggggctgttcgatgagtcgggcgaactgatcgccgtcggcaatatggccgaaagctacaaacccaagctggaagaaggcagcgggcgtacgcaaacgctgcgcatggtcctggttgtcagcagcatcaatgccatccaggttatcgctggtggcgataccgtgctggcaagcagggactttgtcgaaaaagccatattggagcatgaaggctcacgcaatcatcctgacgccaccaccacggtgaaaggcttcgtgatgttgtcaaacgcaaccaacagcccgagcgaaagcaaggcggtaacaccggcagcgctgaaacaggtcagtgatgcaggattaaagaaagcatcaaatctgagcgacctgcaaaacaaagaggcagcccgcagcaatctggctctgggcacggcagcaatgcgtaatgtcggtacggaaaccggacagctaatggctgcagacgaaatagaccggcgctatttgaaaaaatctggcgatacaatggatggatcgctcgagttaaaaagcacgatcgccgcgaattactacgaatcgatgccggatcaataccctgagggcagcggtgcatatgatgggcaactcaattcaaaagcaccgttttatcagccagatttttactggcaaatagctcctggtgggcattacgtaccattggtgaaaggacgcagtacgagaaaaaatagaggttggccgacagcggtcagttacggctatctgataccggagcaagatatgcacgcccatccagtcattcatgcgcaaggtgatagcggtgtgaaatgttcctgggaattcaacacgatatccggaaaaatcaccagcaaggctggtgaattcacaccaattaatgaaacacttaacaccatctatcccattgggattgtcgttctgtttgcgaatacaacgaatccaaacactgctttccctggccaacgctgggaggatttaagcgctaaaggctatgacacgcgtgttctggctttagggtataacccactaacaacagggggaagtaataatgtgaccattagcgctcataacttgccagaccacagccataagggtggaatgaatgcacctggcaagtggtatgacactaccgtaacaggtactgacaatagcgggaattataaattaggtttgacaacaaacacatataccgacggaacgggaaatgaatttgtcagaaatgaaccgctcaacgttagaaacgagtatgtccatatgcgtggctggatgagagttggataa

SEQ ID NO: 444730 - DNA, 567 bp, Serratia marcescens
atgctgccgtttgactccgatttactgccgactccggcaaccaaccggctgctaccggttggttcagcaccgctcgaagtcgccgccgcacaggcctgcgccgaactggaacacatatcggtatcgctgcgcgatttatggaacccggcaacctgcccagccaatttattgccttatttggcctgggccttttccgtcgatcattgggatgaagcatggccggaggagacaaaacgcagcgtcatcgcatcatccttttttgtccaccggcataaaggaacgatcggcgcgatacgccgcgtggttgaaccgctgggttacctgattaacgttgacgaatggtggcacggcggcgatgacccacccggtactttccggctcaatatcggcgtattggaaagtggcatcagcgaagagatgtaccttgagatggaacgcatgatcgccgatgccaaacccgtaagccggcatttgattggcctgacgatttcacaagccgtgacaggatatgcctatacaggcgcggcggctattgacggtgatgtcaccaccgtttaccccggatag

SEQ ID NO: 444731 - DNA, 1152 bp, Serratia marcescens
atgataaccgacacctctctgccaatggggggcaagattgcccctgattttattatcacgctggacgacaaggatattaccgcgtcaatcgcaccccggctgatttcgctgacgttgaaagacgtcagcggctttgccgcagactctctgagcatcactttggacgatagcgacggccagctcatcatgcccagacgcggcgcgctgttaacactttatatcggctggcaaggttcggcgttatttggacatggctcattcgtcattgacaccattacccacaccggcgcaccggaccagctgacaatatcggctaacagcgctgattttaggcgctcacttaaccaattacgcagccagtcttattcagatatcgagctgggagacatcattaaacaaatatcggagcgcaaccaactgcgcgcccctaatgtagatgccgagataagcacaataaccattccgcatatcgatcagagcaatgagtcagacctgcagttcctggtgcggctggcgacgctcaacggcgccaaggtgagtattcgcttccagaaaatttcatttagcaaaccgggagcgggcggcgtcagcaatggtcagccgctgcccgtaagcgttcttacccgcaatgatggcgatcggcataccttcaatattgcggataaaaacgcctataccggcgtcagcgccgtctggctcaacaccgacaatcctgacgaagcgagtaaaaaaattcgtctcgaccgtcaattgcccggagatcaaaaaacagcctctgcatcaccgccggcgacgtcaaacgctcagaaatcgccaaataactacctgcttggtgctgcagacaatgtattcaatatccctaaactatttcgggataaaaatgctgcgatgcgtggcgccgaggccgtattcaaacgaatacagcaaggattggccaagttcaccatcaacctggctatcgggcgtccagatctggtgccagacacgccaatcattgtccgcggcttcaaatcacagattgatagtcagcgatggctcatcaacgcaatcactcacaacctgagcagcagcggctacacctgcaccttggacttacaggtgatgcttgatgacgtcacgtaccacacaacagaaacacgaactcaaatttga

SEQ ID NO: 444732 - DNA, 483 bp, Serratia marcescens
atgatgctaacccttgggatctacgtatttatgctgcgtactctcccctatcaaaccatcaaacgtgacgtcgcctatcagtggccggaaaacaaacgcgtgggccaacgtgcgacctcgcagtttctcggccccgacgtcgaaaccatcaccctggcgggacagttaatgccggaactgacgggaggccgcgtctcgctcgccgctttgcaggcaatggcggatcaggggcgcgcctggccgctgattgaagggagcggaacgatttacggcatgtttgtgattcaacgattaagtcagaccggtacgcagctgttccctgatggccagccaagacaaatcaattttgatatcacgctgaaacgcgtggatgagtctctgcacgccatgtttggcgacctgcgtacgcagatggaaggcgtgttacacaaagccggagcgttgctggataaggcgcagcaggcagcggggattaatccatga

SEQ ID NO: 444733 - DNA, 2043 bp, Serratia marcescens
atgagtaatcaacaggcagtcaacgatagcaccatcaagaccgccaatcgtaatgtgatcctgtcgaccaaacaggtccactatgcgcaacgacagctcgcacagctgaaaaagttggcggcactgaagcgtcagactgacgatattcagcaacagttaaataacaaccgggcggtgcgtacatcgctgcccgccgcgatttcctctatcgaggatattcaaaccgtccaacaattaaacttcgacgacgtgctccaacgggcacaccgtaaactcctcgccttccaaaaggggcagttaagtaaaaagctcgaaaaaaaaggtttcaacaccgcacggctggacgaggcgcagcaacagcaaagccagcatctgaataatgcgcaggcatctctgggcgccaacaaagctgaacaaagccgcctgcgccagcaacatcgtgcgcaaatttttgccaatcacgaccgtcgtcagggccgtattgatgcgctgggcaaatttaccgaacctgccgccgcaatcagcaatcagctgtttgccggcggtaagcagttgttcacgcccggcgcgcaattcgagcagcagctttccgctctgcaggcacggttgggattaaagcaaaacgatcctcacttgctggcactacagcagcaggccagccaacgacaaaacggcgcgaatacgccagccgatatacagcaggcgcaggcggcgctggcaaacagcggttatgacgccgaagccgtgctggccgccacgccggccgcgttgaatttggccagggcgagcggcagcagcattaaagatgcggtaaaagcactcaccggcgtgcaacaggcctttaagctgcccgtcgatcaggccaacaacatcgccgacgtcatggccaaagccagtaacagttatgcacttcccctgacggatctgaacaaacagctgttatcggcggcgcccgacgcgctcagccgagggactggcctggagcaaacggcggcgcagctggctccggccgacaaacagctgggcaacgtcgcgggcgccgctcaggccatcgtgacggtacgtggcgacaacctggacggcgatatccaaaagctgttcgccagctgggaccgcattcgtatcaacctttttgacggacagaacaccgcgctgcgggcactgacgcaaacggcgaccaagtggctggatacgctacagcagtgggttaccaataatccggatctgaccgcaacgctgataaccgttgccggcgccgtatccgtgctgctaggcggcctgggttccatcggcacctttattgttccggccctcggcgccatcaatatgctgatgagcggcgccgcactgctcggcggtattttcaccggtgtcggcagcgccatcgccgccgcattcgccgcgcttggcctcccaattatcgctgtcatcgccgccgtcgtcgcgggcgcggcggtaatttataaatattggcagccgatttctgcatttatcggcggcattatcgacggcgttcttgaggcgctggcgccgtttaaaaccctcttcgagcctatcggtcaggtgttcagcttcgtggttggcaaaattaaggagttccttactccggtaaaaatgacgcaagaaggcttaaacaaaatttcagacgttgcgagatccctgggaaaaaccttggttgaagccttaaccgatccgctatcgctagtgaaaactgccagcgattacgtcgtcgggttgctggagaaagtgggggtaatcaaaaaagaggcaaaacaggaaaacagcctgccgtcgcctgcaacgaccatatcggaacacgataccgtaattaatccgccacgttccccgttgacggcctatcaaccggccctaacgcccggcgccgccgtcacggccaatcatcgaacggtgaccaataacgtgacgatccataccacgccgggcatggaccgcgaggaaatacagaatatctatcatcaactgaatcaacagcagcagcgggaacaggagcgtgtagcgcaatcccaattcgccaatatttaa

SEQ ID NO: 444734 - DNA, 288 bp, Serratia marcescens
atggaaatgatcacctctcaggataccagcgtcgtactcgataccccaatcaaacgcggcgacagcgaaattagcgaagtcatggtcaccaagcccaacgccggcagcctgcgcggcatcggcctggctgcgctggccaatgccgacgtggatgcgctgatcaccattttaccgcgcgtcacctatccgaacctgaccaaagaagagtgcgcccgtctggaactgccggatctgatcgcgctggcaggcatggtgatcggttttttagcgccgaagtcggcggagtaa

SEQ ID NO: 444735 - DNA, 909 bp, Serratia marcescens
atgcctacgattgatttgagcttattgcccgccccgacggtggtggaaccgttaaattacgaaagtttactggccgaacgtaaggccaggctgatcgccctttaccccgaagatcaacgcgacgccattgcccgcaccctggcgctggaatcggaaccgctggtcaaactgctgcaggaaaacgcctaccgcgagatgattttgcgccaacgcgtaaatgaagcggcacaggcggtaatgctcggctacgccaccggcagcgatctggatcagatcggcgccaatttccaggttgaacgcttagtggtgcaaaaacccgataacagcgtcgtgccgccggtgccagcgattatggagtccgacagcgatttccgcgttcgcatccagcaggcatttgaaggattgagcgtggcgggatccagcggatcctatgaatatcacggccgctcggcggacggacgcatcgccgacgtttccgccaccagccccagcccggcaaccgtcgttatcgccgtgttgtcccgtgaaggcgacggtaccgccagcgacgatctgctggccgttgtcgaacgcgcgctgaacgacgaagacgtgcgaccggtcgccgaccgcgtgacggtgcgctccgccgatattgtcagttacgccatcgacgcgacgctatacctgtatcccggcccggaagccgagccgattcgtcaggcggccgaagccaaactcaaaaaatacatcagcgcccagcaccgtctgggacgcgatatccgcctgtcggccatttacgccgccctgcatgccgaaggggtacagcgcgtcgagctggccagcccgaaaaacgacatcgtgctggacaaaactcaggcttcttactgcaacagctacgtactgaaaatcggggggtcggatgaataa

SEQ ID NO: 444736 - DNA, 351 bp, Serratia marcescens
atgaacaacgcaaaatatattggcatgggccgcaactccggccgcgccattaacgatatcgaacatattcgccagtcggtgagcgacattctggtcaccccgataggttcacgcgtgatgcgtcgccagtacggatcgctgctttccgcactgctggatcaaccgcaaaacgatgcgctgcgcctgcaaatcatggccgcctgttacagcgccctgctgcagtgggaaccaaggatccgtctgaccgagatcgcggtcaacaccaccttcgacggaaaaatggtggtcgacctgaccggcagtcgtaccgacaccccggataatttttccctttcagtttcagtgagctaa

SEQ ID NO: 444737 - DNA, 636 bp, Serratia marcescens
atgaacacatataaccctgatattcagcgcctggtgcgcaacctaatccgcattggcaccgtcagcgacatcgatctcgaacgcggacgctgccgcgtgaggaccggcggcaatcataccgactggctgtgttggatgaccagccgtgccggcagcgcccgcagctggtgggcgccgagccttggcgaacaggtgctggtgctgtcgctgggcggcgagttggataccgctttcgtgctgcccggcattttttccaatgccttcccgccgccgtcgcattcggccgaggcgctgcatattacctttgccgacggcgcagtcattgagtacgagccggcgcaaggcgctttgaaagccagcggcatgaaaagcgccacgctggaggcgacggagacggcgacggtcagcgccgccaatatcgtctgccgcgccagcagcaaaatcaccctggatgccccggaagtggagtgcacccagcacctggttaccggttcactcgccgtccgtcagggcggttcaatgaccggtgatgtcacccactccggcggcagcatcacgtctaacggcattgtggtgcatacccacacccacggcggcgtacaaaacggcggaggccaaacggataaacccttatga

SEQ ID NO: 444738 - DNA, 465 bp, Serratia marcescens
atgttaaaacccgaccagctgcgtgacgccttattcaaggcgttaccagacctacaggcccagccggaaaaactgacgatgaaactgacggacggccgcgtcgtcgccacgccaggcccatcgttgtcatttgaataccgctactcgttgaggttaacgctggccgatcgcgcggccgactgcgagctggtgatggtcaccctattggcatggctgcgcagccaccagccggatctgctggctaacgtggaaaaacgcaacggcggttttacttttgccctgcacgacgaagcgcacggccagctcgacattcagttgcagctcaccgaacggatcttggtagaacagcgtgaggagacgttgcatatcacgccgctgccggaaccgccggagccgcaagacgttttgcgttttaccgacgtctacctgcatggggagttgatcagccactggcaacgctcttaa

SEQ ID NO: 444739 - DNA, 414 bp, Serratia marcescens
atgaatcgctggctgctcagccttggcgcgctgctattgaccctgctcgcggcgtcgcagtggcagaaccagcgtctgcaacaaacgctggcgcatcaacagcaacgccttggcgaggcgcaggccacgctaacgacacgcgacgcccagatcaaccaactgaaacaacagcgccaacggcgtgaacgcgctgaactggcgctgcgtcaggcgctgagcagcgcgcaggatttaacgctgcagcgagaaaaacgattacaggagttactcaatgaaaacaagaaactgcgcgactggtatcgcactgggttgcctgatgatgttatccggctgcagcagcgccccgccttcgccaggcccggagattacctacgctggctgtccgaaagtcagcagttgccccattcccggtaa

SEQ ID NO: 444740 - DNA, 513 bp, Serratia marcescens
atgaacccactccttaaacgctgcagcgccgtcgccattttggcgctggccgctactctgccgcagtttggccaactgcatacctccgaacggggactgcgcctgatcgccgacttcgaaggttgccaactgtccccctaccagtgcagcgccaacgtctggaccaacggcatcggccataccgcgggcgtgaaacccaatacggcgatcaccgagcgtcaggcggcagccaacctgctggacgacgtacgcaatgtggaaaaaggcatcgcgcgctgtatgagtgtggatatgccgcagccggtttacgacgcggtcagcgcttttgcctttaacgtcggcgtcggcgccgcctgccgctctacgttggccggtttcattaaacaacgtcgctggcaacaagcctgcgatcaactgccgcgctgggtatacgtcaacggcgtaaagagcaaagggctggagcgtcgtcgtcaggccgaacgtgcgctgtgtttgcagggggtgtcgccatga

SEQ ID NO: 444741 - DNA, 219 bp, Serratia marcescens
atggaaaaatttacctcaacactttcctaccttatcgccgcctgcctggcctggttcggccgtcactcgacggaagacatcgccatgatggtcggcgctgcggtaggcgtaggcacctttgcggtgaactggtactaccgccataagagctaccagttactgaaatcgctcagaaagaaaattctcaaacgggggaaatacgatgaacccactccttaa

SEQ ID NO: 444742 - DNA, 207 bp, Serratia marcescens
atgatgaaaatttatgcacaacaaggcgacaccattgacgcgatgtgctggcgctattacggcagcacagaaaacgtggtggaacaggtttatcgcgccaatcgcgggctggcagcatacggagcgctgctgccgcacggctgcccggtagaaatgcccgaactcaacgccgccgccaggcgggaaacggtgaaactgtgggactaa

SEQ ID NO: 444743 - DNA, 195 bp, Serratia marcescens
gtggaaattacggataaacaacaactaacactgtcacgcatccagttcatcgccgatgtatcacaggcagcccagtgcagtccgtccgaatacctgatcgcactgtcactgatttccgatctggccgctcaggaactccccgagcacgactaccaagccgtctactatccggcagaccagcaacactcccgctag

SEQ ID NO: 444744 - DNA, 636 bp, Serratia marcescens
atggctgaagatactgtgaatgggcgggctgcggcgcatggtaaggcgttgtatgagcgcgtactggcgtccggcggcaagggcgtgctgcgtaggattctggatgcctatggtttcagcttgcagaaggagctgggggatttactgggtatttcatccggcaccatgagcacctgggtgcgccgtaattacttcccgggggatattgtggtgacctgcgcgttggataccggcgtttctctgcagtggttggctaccgggcagggggaaatgcgcgcgtccgatccgctggatatggtaccgccagcacgtgccgtgccgctgtatcgactgattgccggccagctgaaagatggcggtgaatggctggccgatcgaacgttgattccatcaacggccgagcagcccgcatacgtggacggtgggcgtgtagcctggctggtggatttgtcggtaacgaacattgccaacggacgctggttgctcgatatcgacggcaacctggacgtatatgatattgcccgtttgccgggcaatcagctgcaggtcagcggcaacgggacagattttcagtgcagtaccgatgccgtaaaagcgctgggtatggtgtggctgaccttgacgctgcaggcgtaa

SEQ ID NO: 444745 - DNA, 1344 bp, Serratia marcescens
atgataactctggaattcggcatcatcattgcttgtttattggtaggcacgcgctatggcggtatggggctgggattaatcagcggtgtcggtatctttgtgctgtgctttgtctttgggctgcagccgggcaagccgcctattgatgtgatgctgaccattctggcggtaatcggctgtgcctcggtactgcaaaccgccggaggactgaacgtattgatgcaatatgccgaacgtcttctgcgccggcaccctcagcatattacgctactcgcgccgttcaccacctggatgctgacatttctgtgcggtaccggccacgtggtatacaccatgttcccgatcatcggcgatatcgcgctgaaaaaaggcatccgcccggaacgcccgatggccgtggcctcggtcgcctcacaaatggccatcaccgcctcgccggtttccgtcgccgtcgtgtctctggtatcgattatcgccgccgggcacggtatcggccgcgcctactccctggtggaaatcctggcggtttccattccctcgtctttggttggcgtgctgatcgcggcgctctggagcctgcgccgcggcaaagatctggagcaggacgccgattttcaggcgcgtatcagcgatcctgaacagcgcgcctatatttacggcgccggcgaaaccctgctggaccagcgttttgccaaatctgcctatgcatcaaccctgatcttttttgccgcgatcgccgtcgtggtcttgctcggcgccttctctgagctgcgtccggccttcgccgtcaaaggcgtgatgaaaccgctgtcgatgaacctggtgattcaaatgatgatgctgattgccggcgccgtcatgctgatcggctgtaaggtaaagccaggcgatatcgccaacggcgcggtattcaaagcgggtatggtcgccattttctcggtattcggcgtcgcctggatgagcgacaccttcttccaggcgcatatgggagatttaaaactgctgcttgaagacgtggttaaaagccagccctggacttacgccattgtgctgtttctggtgtcgaaattggttaacagccaggccgccgcgctgaccgccgttgcgccaatggcgctgcagctgggcgtcgaaccgaaaatgctgctggcgtttttcccagcggcctatggttacttcgtattgccgacctaccccagcgatctggcctgtatcggcttcgaccgctcagggacgacgcgcatcgggagatttatcatcaaccacagttttatcctgccggggctgattggcgtttcatccgcctgcgtaaccggctacctgctggttacgaccctgctgtaa

SEQ ID NO: 444746 - DNA, 345 bp, Serratia marcescens
atgacaatcaacattaccagcaaacaaatggatatcacccccgcaatccgtagtcatgtcgaagaccgtctcaccaaactggataaatggcaggcccaactgattaacccgcatatcgtgctgtccaaagagccgaaagggtttgtggccgacgccaccatcaccacgccgaatggcccgctggttgccagcgccaaacatgaagacatgtataccgccatcaacgagctgatcgccaagctggaacgccaactgaacaaggtgcagcacaagggtgaagcacgccgcgcctacgccagcgtgaaagatatcgtgccggaagcggcgccggagcaagaatcctaa

SEQ ID NO: 444747 - DNA, 732 bp, Serratia marcescens
atggagacgttgattctgcccgactggccgttgccgcaaggcgttcaggcctgcagcaccacccgccggggcggagtcagcctgccgccttatgattccctgaatctcggcatgcacgtcggcgaccggccgcagtcggtacagcaaaaccgggaatgcctggtgagcgtcgccggcctgccgcagatgccgcactggctggaccaggtgcatggtacgcgggtggtacgccttaacgggcagacgccggacgatctgcaggccgatgcggtgtatacccgtgagccggggcaggtgtgtgcggtgatgacggcggattgtctgccggtgctgttttgctcccgtcgcggcgacgaagtggccgccgcccatgccggctggcgcgggttgtgccatggcgtgctggagcagacgatcgccgagttttatgccgagccgggcgagatcagcgcctggctggggccggcgatcggcccgcggcagtttgaggtcggtgctgaggtgcggacggcgtttatcgctgcggatgcgcttgccgagcgggcctttaccccattcggggagaaatatcttgccgatatttatctgttggcgcgtcagcggctgcaacgcgccggcatcaacgccgtttacggcggtgaccgctgtaccgttagcgaaaagagcgatttcttttcctatcggcgcgatggcataaccggacgtctggcaagtttaatctggctgatataa

SEQ ID NO: 444748 - DNA, 666 bp, Serratia marcescens
atgccgcctgtgagccggcatgatttgtgtgaggtcgatgtgtcgctatccgcttttcccgcaccgcgggatgaacccctaacccatacgcgcgccagaacgcgcaaattgctgcttgccagcgcgatggagctgtacgatgacggcgcgttcccgtcgattaccgaactggcggctcatgcgcaggtatcccgcgctaccgcttatcgctatttcccgacgcaaagcgccctgattaccgccgtggtggctgaaagtctggggccgattttgcagtgggagccaaatgatgacgatgcgctgctgcgcattcagcagttgctggcgtttgcttacccgcaaatggagcagcacgaaggcgcgctgcgtgcggcgttgcaactttccctgcaacagtgggccaatgccacgccgggggagaaattcgtgcgtggtaaccgtaaacgcctgctgaaattggcggtagagccgttgcaggataaattgcctccggaggcgctgcagcgcgtgatccacgctttttcactgatttacggttcagaagtttttctggtattgaaagatatttggggactggagctgagcggtattcaggacgtgactcagtggatggcgaaggcgattattcgtcaggccgaagaagatgtgcgcaacagcaaaaaataa

SEQ ID NO: 444749 - DNA, 1227 bp, Serratia marcescens
atgagaaataccccaacctttgtctatattgctaccacagcagataccaaaggacaagagttggcgtatgtgcgtggtttgattgacagcctcggtttacccaccatcaccgtcgatctttccactcacaacatgcccgcacgctacccggccgacatttcggcggccgacgtagccgcttttcatccggaaggcgcaaccgccgtcttttgtcataatcgtggtcaggcgatcgccgccatggccattgctttcgaacgctttatgctgtcgcgcaacgacgtcgccgctctgttgggcatgggcggctccggtggcacagccatgatcacgccggcaatgcagcagctgcctatcggcctgcccaagctgatggtctccagtatggctgccggggacgtttccggctacgtcggcgccagcgatatcgccatgctgtattccgtgaccgacattgccggcctgaaccgtatttcacgcaaggtgctgggcaacgccgcccaccagatcgccggcgcggtgcgtttccataccgatgaagacgtgctcagcaaacccgccaccggtttgaccatgtttggcgtgacaacgccgtgcatccaggccgtgacccgcgccattgaggcgcaatgggactgcctggtgtttcacgccaccggcagcggtggacaggccatggaaaagctgatcgacagccagctattgaatgcggtgctggatctgaccaccaccgaggtgagcgattatctgttcgacggcgtgctggcctgtaacgaagaccgttttggcgctattgcccgcaccggtattccctgcgtgctgtcctgcggtgccatggatatgattaatttcggccatcccaaaaccattccggcacgctatgccgaccgacatttttataaccacaacacccaggtgacgctgatgcgcaccaccgctgaggaaaatgcccatatcgggcgttggattggcgaaaagctgaacgcctgcccgggggaaatccgttttgtggtaccggaaggcgggctctcgtcgctggatgcgcccggccaacctttttgggatccgctggcgctgcgcgcctttaccgacgcgctggaacaaactctggtgcagaccacgcgacgccggctgattaaaacgccctatcacatcaacgacgcacggtttgccgacatcgtggtggcgcagtttcatgacatcaccacggtgaaaaaaaatcactaa

SEQ ID NO: 444750 - DNA, 486 bp, Serratia marcescens
atgcgtaaactgactgctttatttgttgcctctaccctggcgctgggttctgcttctatggcttttgcggccgataccgccaccaccgcggcagcagatagcgcgccgatgaaaatgatgcaccacaaggggaaaggcggcccgttcgcggggctgaacttgaccgaacagcagcgccagcaaatgcgcgacattatgaaagaagcgcaccagaatcgcggtcatggcatgaaagagcagcgtcaggcgctgcatacgttagtggcttctgacagctttgatgaagccaaagccaaagcgcaaattgacactatcagcaaagcgcagtccgaacgcatgctggcgcgcgccaaggccgaaaataaaatgtataacctgttaacgccagagcagaaaaaacaatacaatgagaattatcagaaacacgaaaagaaaatgatggagcacatgaataaaatgaaagcgcagcacgaggctgccgagtaa

SEQ ID NO: 444751 - DNA, 1008 bp, Serratia marcescens
atgcctacaggatccgagaacactccccaaccgcgccaaacggaagaatcagccaagccgctgatcgacatcaagaccgggaaccacaaaattgacaagggcatctccggcttttcccgtctggttgagcatatcaaggccagaccgggtatcgcccacctgctgcgcgcggccgagcgctttaacgaccggctgggcagccagttcggcgccgccattacctacttctctttcctgtcgctgatccccattctgatggtgtcgttcgccgcggtaggctttgtactggcctctaatcaggacctgctgaccgagcttatcaacaaaattgtcggcagcatcagcgacccaacgctggccaatacgctgaaaaataccgtcaataccgccatccagcagcgcaccaccgtcggcctgaccggtctggcgctggcgctctactccggtatcagctggatgggtaacctgcgcgaagcgattcgcgcccagtcgcgcgacgtctgggagcgtaatccgcaggatcaggaaaaaatctactttaaatacacccgcgactttatctcgctgaccggcctggtggtggcgctgatcgtcactctgtcgctgacctcgatcgccggttcggcgcaggcggccatcgtgcgcgcgctggggctggacggcatcgactggctgcgcccggcgatgacgctgattgcgctgtccatctccatctttgccaactatctgctgttcctgtggattttctggatgctgccgcgccacaaacccaataagaaagcgctgttccgcggcacgctgatggccgccatcggctttgaagtgatcaagttcgtgatgaccatgacgctgccgcaggtggcaaaatctccgtccggcgcggcatttggatcggtgatcggtctgatggccttcttctacttttttgcccgcctgacgctgttttgcgccgcctggatcgccaccgcgcagtataaggacgataaatcaccatcggccaaaccctaa

SEQ ID NO: 444752 - DNA, 1323 bp, Serratia marcescens
atgcaagccaccatcacaacatccgccgacgccaacgacgcgtccgcaccaatcaattcccggggaaaagtgctggtcgcttcgctgatcggcaccgctatcgaattcttcgacttctacatctatgccaccgccgcggtattggtgttcccgcatatcttcttcccgcagggcgacccgaccaccgccaccctgcagtcgctggcgacttttgccgtcgccttcgtcgctcgtccgatcggctctgcactcttcggccactttggcgatcgcgtcggacgtaaggcaacgttggtcgcctcgctgctgaccatgggcatttccaccgtgttgatcgggctgctgccgagctatgaaaccatcggcatcttcgccccgctgctgctggcgctggcgcgttttggccagggtctggggctcggcggcgaatggggcggcgcggcgctgctggcgaccgaaaacgccccgccgcgcaaacgcgcgctgtacggctccttcccgcagctgggcgcgccgatcggctttttcttcgccaacggcaccttcctgctgctctcctggctgttgaccgaccaacagtttatggagtggggctggcgcctgccgtttatcctttctgcggtgctggtgttgatcggcctgtacgtgcgcgtgtccctgcatgaaacgccggtgttcgccaaagcggtgaaggccggcaagcaggtgaagatcccgctcggcaccctgctcagcaaacatctgaaggtcaccattctgggcaccttcattatgctggcgacctatacgctgttctatctgatgaccgtctactccatgacctacggcaccgccgcacagccgctgggcctcggctattcacgggaaagtttcctgtggatgctgatgctggcggtgatcggctttggcgtgatggtgccgctcgccggtctgctggcggacgcctatggccgtcgtaaaaccatggtggtgattacgctgctgatgatcggcttcgccttcctgttcccgaccatgctcggctccggcaaccaggcgctggtgatggctttcctgctgtgtggtctgagcattatggggctgaccttcggcccgatgggcgcgctgctgccggaactgttcccgaccgaagtgcgctataccggcgcttctttctcctacaacgtcgcctcgattcttggcgcgtcggtcgcgccctatatcgccacctggctgaacgccaactatggcctgttctacgtcgggatgtacctagcggcaatggcgacgctgacgctgatcgccctgcttttgatgaaagaaacccgccaccagtcgctgtaa

SEQ ID NO: 444753 - DNA, 765 bp, Serratia marcescens
atgatgacactgcgccgccggctattactgctgttcatcctattggcgctagtcattcttgcgctctatctctggctgaagcccgcgcatcccgacgcactgtggcgcatcgtcagccagcaatgcctgccgaatcagcagcagcacaacaacccggcgccctgcgcgcaggtcgacccgcagcacggcgccgtggtgtttaaagatcgtaatggcccgttgcagtacctgctgatgccgacggcaaaaatcaccggcattgagagcccggagctgctgacaccgacggcgcccaacttctttctgctggcctggcaggcacgccgctttatggcggaaaaatacggtaaacctatcgacgatgcggccatttcgctggccatcaattccgaatatggccgcacgcaaaaccagctgcatatccatatctcctgcctggcgccgacggtgaaaaaacgtctggcgcaggcagaacaaaccttcaccccacgctggcagccgctgcccggcgggttgttgcaacacgactatcgggtacggcgggtgacgccaggcgagctggcacagcagggggcgtttcgcctgctggcgagcggcgtcgccggagccagccaacagatggggcgctacggcctggcgatgaccgccttgccaaacggtgattttctgctgctggccaccgagcgcaatctgctgagcctcaacctggcctcggcggaggagcttcaggaccacgactgtacgctgctgcagccgcgtccctga

SEQ ID NO: 444754 - DNA, 2043 bp, Serratia marcescens
atgagcaaaacgggaaaagtaatcagcgggatcggcggcgttgtgctgctggtgattgtggcgctggtggtctttatcaccaccttcgactggaaccgtcttaagccgacgattaatgacaaagtctctgccgagctgcagcggccctttgccatccgcggcgatcttggcgtggattggcagcgcaaaaaggaagaaggcggctggcgcgcctgggtgccgtggccgtacattcatgcgcaagatattgtactgggcaatccggaaaatattcccggcgatcgtatggtcagcctgcaacgtgtcgaactcagcatcgctcccctggcgttgttacataaagaggtgctgatcccgcgcatctggctgcagcggcccgacgcacggttacagcgtctggccaatggcgagaataactggacattcaaccttgccagcggtgggcaggatgaccagagcgcggcgtcagactggtcggtgaatattcacgatatcgtgttcgatcgcggccagatagcgtttaaggacgctacgctgaaggcggatttccaggcgacgatcgacccgctgggcaagccgctgccatttagccaggtcaccggcaagaaggaggagggccaggtcattacgccggactatgtattcggctggcaggtaaaaggcaaatacaacggcgaaccgctgagcggcagcggtaagatcggcggcatgctgtcgttacagaatgccggcctgccgttcccgctgcaggctgatatacgctccggcgcgacccgcgtggcggtagcgggcaccttgaccgacccgttaaatctcggcgggcttgatctacagctgaagttttccggcgacagtctgggcaatctgtatggcctgaccggcgtgctgttgcccaatacgccgccgtatgccaccgacggacatctgacggcccgtttgcatgaaaagggcggcgcggtttatcgctatcaaaatttcagcggcaagattggcgacagcgatatccacggcgatctgcgctatgtcgccagccggccacggccgagcctgagcggtaatgtgctctctaaacagctgcgcttcgccgatctggcgccgctgatcggcgctgacagcaatgcagccaaggccggccgcggcgagaaaacgcggcagccggcggataaggcgctgccggtcgcaacgtttgccacccaaagctggggcgtgatgaacgccgacgtcaaatttaccgccaaacgtattgagcatggcgatgccttgccgttaagcgatctgtacacccatctgcggctggagaacggcgtgattctgctggacccgctgcgctttggtgtggcgggcggcaacctgaattcaaccgtgcggctggacggcagcaagcagccgatgcgtgggcggatggatatgcacgcccgcaatttccagttgaagaaactgctgccgaatgtggaatcgatgaagcgcagcctgggagaactgaacggcgacgcgaagttaaccggcagcggtaactcggtggcggcgctgttgggcagcagcagcggcgatctgcgtctgttggttaacgacggtatgatcagccgcagcctgatggagattctgggcctcaacgttggtaattatctggtggcgcagatcttcggcgatgacgaagtgggtatcaactgcgcggcggcggacgtcggtatacgtagcggcgtggctgcgccgcggctgtttgtgttcgataccgagaacgccatcatcaatattaccggcaacgccaacttcgccagcgaacggctggatctgtccatcgatccggagagtaagggcatgcgcgtgctgacgctgcgctcgccgctgtatgtgaaaggcacctttaagcatccggacgccggcgtgaaagccgggccgctgattgcgcgcggagcggcggccgtggcgctgggcgtggtggtgacgccggctgccgccctgttggcgctggtgtcgcccagcgacggcgccgatgccaatcagtgcgggcaggtgctcaagcagatgaagaagaaaaagtaa

SEQ ID NO: 444755 - DNA, 933 bp, Serratia marcescens
atgacttgcaaaaatattgccgttatcggcgaatgcatgattgagctgtcgcaaaacggcaccggactcagccgtggttttggcggcgatacgctcaataccgccgtctatatcgcccgtcagacagaacggcaggcgcttaacgtccactatgtcaccgcactcggcaacgacagttttagtcaggaaatgctgcgcgcctggcgacaggaagagatcgacaccacgctggtacagcagctggagaataaactaccggggctgtacgtgatagaaaccgatgaaaccggcgagcgtaccttctactactggcgcaacgacgccgccgcgcgttattggctcgacggcccgcaggccgacgccatttgccgtcggctggcgcagtttgattatctgtacctcagcggcatcagcctggcgatcctctcctctgaggcacgccgcaaactgatggcgctgctgcatcaatgccgcgccaacggcggccaggtcattttcgacaataactaccgcccacggctgtggcaaaacagagaagaggcgcagcaggcctatcgcgagatgctgtcctgcaccgatacggcgttcctgacgctggacgatgaggatgcattatgggggcaaatgccggtggagcaggtggtcaaacgcacccgcgatttcggcgtgcaggagatcgtgatcaaacgcggcgccgaggcctgtctggtctatctgaacgatgaggcgccgctggaggttgcggcggtgaagctggcgcaggagcaggtgattgataccaccgccgccggcgattcattcagcgccggctatctcgccgtacggctgagcggcggtgcgccgcagcaggcggcggaacgcggccacctgaccgccagcacggtgattcaacaccgcggcgcgattattccacgggcggcgatgccggtctga

SEQ ID NO: 444756 - DNA, 726 bp, Serratia marcescens
atgtcaggaatattagccggtgctgccgccgctgaagggaaaataagagacaggctgaaacgtgagctgcgccattttcatggcgtaaaatacgcctacctgcagcttgataagctgcgccccgggcagtggtttctgacctctgactacccggaaccctggctcgatttctaccagaaacatcattacccggcatgcgatcccgtcgtgcaggcgagccggcatcaggtcgcgcccttttcctggcaggaaacctgcgtcaccacgcaaaccccgcattatgagcatattttcagccagtcgcggcgctacgacatcatcagcggctgtacctttgtcctgcacgatcacaccgatcacctcacgctgctgtcgctcagtacgccgacggataaccgtcacggcgtacagcaactgctgcgccatcaccggcagcgtctgcagatgctgctggttgatacccacagcgcagctctcaacgcggcggctgccccgccgccggcgcccgcagtcatgttgtcgccgcgcgagaatgaaatcctatactgggccagcatggggaaaacctatcaggaaattggccagatactgggaattaaaaccggcacggtgaaatttcatgtcggcaatgccgtgagaaagttcggcgtactgaatgccaaacatgcaatacggctggggactgagcggcgcttaattacgccgccgcaaagcgtcagcccataa

SEQ ID NO: 444757 - DNA, 702 bp, Serratia marcescens
atgacgcagtcgtttgccggatttagtcagcagggattggactttctgcagcaggtgcggattgaaaacgacaaggcgtggtttgaggcgcaccgcgcgctgtacgaacaaacgctgttaacgccgttccgccggctggtggagcagctggcgccggcgatgctggcgatcgacccgcagtttgagactcggccggcgatcggcaaaacgctgtcgcgcattcaccgcgatacgcgtttttcccacgataaatcccgttatcgcagccgcatgtggctgaccttcaaacggccgagcaaagactggaaagacgcgccggtatatttctttgagctggggccggacatgctgcgctacgggttgggttactacagcgccaacaagccgacgatggatctgttccgccatacgctgcagcggcagccgcagcagtttctggcggcggctgcctgctgccggccgccgttcgagctggtgggggagagttacaagcgtccgttggtcaaaggccaggcggcggagattgcccactggtatcagcgcaaatccttcgcggtgatggcctcggaccatcaggtggaaaagctgttcagcgccgatttggcgccgatgctgacgcaggcttttcagcagctggagccgctttaccactggctgatgaaagtcgaggcgatgaagcagatcgacccggccgatttataa

SEQ ID NO: 444758 - DNA, 579 bp, Serratia marcescens
atggagcggcagatcgcagcgcgcgatcctgccgtgtttaccggtgttgcccctgaactggaacggcattttctgacgcccggccaacggctttccccgccgggcgctggcaatatcatggggatgatgattggcctgacatgcggcgtagcgggcgtgatgggcatgatggctgatgtagcgtttgccctcacggacgtgtcgccggcggcggcgctgttgggcagcggggccatattggcggtgtggatgacgttaatcctgctgcagctgacgcagggtaaaaacagcggcgtgctattgctgaaatattatctgctgctactgccggttgcgctgctggccgcgttgtttgcctggggaatgggggtatctggtttcttcagcgtggtgttgctattggcgggcaccgcaggcggttttattttcagccatcgaacgatttttatctgtatgtggcttactttcgcagtcggcgccgggtgtttgtcaaacggcgttggcagatggcggagattcgtcgcggcagatagtgcaaacaacaggagaaaccatgacgcagtcgtttgccggatttag

SEQ ID NO: 444759 - DNA, 264 bp, Serratia marcescens
atgatgcagcatcaactctcgatccaggcccgttttcgccctgaaatgttagaacgcgtattgcgtgtcgtgcgtcatcgcggcttccaggtttgtgctatgaatatggcgtcgggcctgaacagcgaccgggtcaatatcgaattgaccgttgccagccagcgttcggtagatttactgtcatcccagttaaataaattgatggatgtctcctgcgtagaaatccagcaacacaacaacacatcacaacaaatacgcgcctaa

SEQ ID NO: 444760 - DNA, 1647 bp, Serratia marcescens
atgaatggtgctcagtgggtggttcaagcgttgcgtgcacagggggttgatactgtattcggctatccgggcggcgcaatcatgccggtgtacgatgcgttgtatgacggcggggtggagcacctgctgtgccgtcatgaacaaggggcggcgatggcggcgatcggctatgcgcgcgccaccggtaaaaccggcgtctgcatcgccacctccggccccggcgccaccaacctgatcaccggcctggcggatgcgttgctggattccgtgcccgtggtggctatcaccgggcaggtcggttctgcgttgatcggtaccgatgcctttcaggagatcgatgttttgggcctgtcgctggcctgcaccaagcacagcttcctggtggaatcgctggatgcgctgccgggcatcatggccgaggcgtttgccatcgccgccagcggccgtcccggcccggtgctgattgatatcccgaaagacatccaactggcgcaggcggatttaccgccgcacctgatgccggtcaacgacgaattcgacctgccgatggatggcatcgaacaggccagcgccctgttggcgcaggcgcaaaagccggtgctgtacgtcggcggcggcgtcggtatggcgcaggcggtgccggcgctgcgcgcatttatcgccgccacccagatgccgacggtcgccaccctgaaagggctgggcgcgccggacgccgcacacccgtattatctcggcatgctgggcatgcacggcaccaaggcggcgaacctggcggtgcaggagtgtgatttgctgattgcggtcggggcacgttttgacgatcgcgtgaccggcaagctgaacgcctttgcgccgcacgccaaagttatccatatggatatcgaccccgttgagctgaacaaactgcgtcaggcgcacgttgcgctgcagggcgatctgaaggcgctgctgccggcgctgcagcaaccgctgacgatcggcgagtggcagcagcgcgtcggcgaactgaaagcgatgcacgcctggcgctacgatcatccgggccagccgatttacgcgccgttattgctgaaacagctgtcggagcgcatgccggccgatgcggtggtgaccaccgatgtcgggcagcaccagatgtggagcgcccagcacatgacattcaaccggccggaaaacttcatcacctccagcgggctgggcaccatgggctttggcgtgcctgccgcggtcggcgcacagatcgcccggccggaagatacggtgatctgcgtgtctggcgacggctctttcatgatgaacgtccaggagctgggcaccattaagcgtaagcaactgccggtgaagatcgttttgctggataaccagcgtctgggcatggtgcgccagtggcagcagctgttttttgacggccgttacagtgagaccaacctgtccgataaccccgacttcctgacgctggccagcgcgttcggtatccccggccagcgcattacccgtaaagaccaggtggcggaggcgctcgacgcgctgttaaacagcgacgggccgtatctgctgcaggtggcgattgatgaactcgaaaacgtctggccgctggtgccgccgggcgccggcaacgaaaccatgttggagaaagtatcatga

SEQ ID NO: 444761 - DNA, 1521 bp, Serratia marcescens
atgtcattggcggttatttttactcgggctacgctgggcgttcaggcaccgtcggtgacggttgaagttcatatcagcaacggattgcccggattaacgttggtcggcctgccggaaaccacggtcaaggaagcaagagatcgggtacgcagcgcgttgctcaacaacggttttacctttcctgcaaaacgcattaccgtcaatctggcgccggcggacttgcccaaggaaggcgggcgctacgatctgccaatcgccctggcgatccttgccgcttcagaacagatcccaaccgatcggttggcaaaacacgaatttctcggcgagttggcgctgtctggcgcactgcgcgccgtcagcggcgccattcctgcggcgattgcagcgcagcaagacggcagagggcttatattgcccgaggaaaacgagggcgaagttagcctgctgccggatgagggaacacgcgttgcggcacacctgctggccgtctgcgcctttctgcagggccaaggcgagctggcgcttgccgagccacctgccgctatgttcaacgcctgccagggcgacctgcaggatattatcggccaggaacaggccaagcgggcgctggagatcgccgccgccggcgggcataacctgctgctgctcggcccgccaggcaccggcaaaaccatgctggcaagccgcctgccggggttattaccgccgttaaccgaccaggaagcgctggagagcgttgcggtggccagtctgcagcatcagtctgccggcaagctgccgtggcgccagcgaccattcagggcaccgcatcacagcgcatccatggctgcgctggtcggcggcggttctctgccgcgcccaggggaaatatccatggcgcacaacggcgtgctgttccttgacgagctgccagagtttgaacggcgcacgctggacgccctgcgcgaacctttggagtcgggagaaattgtcatctcgcgcgccagcgccaaagtctgctttccggcgcggattcagctgatagccgccatgaatcccagcccgacaggccactatcagggcatgcataaccgtaccccgccgcagcagatactgcgctacctggggcgactttccgggccgttcctcgaccggttcgacttatcgatcgaagtccccttactgccacccggcacgctgagtaaacaacaacagataggggaaagcagccagcaggtgcgccagcgggtcatggcagcgcgggagcggcaattacagcgtgccggcaagattaacgccattctcgataagcccgaggtggatcgcgattgctcactgagtgatgcagacgcgcactacctggaaacgacgctgcttaagctggggctatccgtgcgtgcctggcaccgcattctgaaggtcgcacgcacgctggccgatttagcgggagaaaaacatatcgcccgtcaccatctcagcgaagcgttaggctaccggaggatggagcgtctgctgatccagctacatcgcagcctggaataa

SEQ ID NO: 444762 - DNA, 672 bp, Serratia marcescens
ttgaagccccttttgtttgtgcgcagggcgctggcagccattggcattgccagcgtcctgagcgcatgtagttggcatcatactccccccgcctttaccgccagcggctacgtggccgatcagggcgtaatccgcctgtggcgtaaagacgacgaacaacagcgtccggcagtgttggtaaccgtatacagcccctaccgcggcgttggcaccgtgacaacccgctatgactatcaacacggcgcgctgaggcaaatcaagcgtaccgacgccgacggcgaccgcgactctattcaactgcgttttaccgatgacggtacggtcagctttatgcagcgccagctggcgacgcggcgtgaaccgctgtctgcggacgatatcgctcgttatcaatatcaggcgcgccgcgtactggcactaagcgatgcgttgcgggccggcagagtgaccttatatcaggggcgctggcagcaggacggagtgaaaacctgtgccgggcagtggcgtgacccggaactgggcgacagagcgacggcgtggattgagcgccgggcgcaaaacagcgcagggccggtcagcgtggcctggctggaggcgccggaagggcgtcagctgttgctggtggcgaacgaagatttctgtacctgggaaccgcaggaagacgcgctgtaa

SEQ ID NO: 444763 - DNA, 696 bp, Serratia marcescens
atgattgatacccagacgctgcgcgccgagcagttacagcgcgccgcagacgtgattcgccaggaccagttggcggtcgacccgccggcctttatcgccggctgcgacgtggggttcgaacaggaaggcgcagtaacgcgcgccgctatcgcgattctgcgttatccgtcgctggagctggtggaataccagattgcgcgtattgccaccaccatgccgtatattcccggctttctctcgtttcgtgaatacccggcgctgctggcggcctgggaacggctacggcagaagcccgatctgatttttgtcgacggccacggcatttcgcatccgcgtcgcctcggcgtggccagccacttcgggctgttggtcgatgtgccgaccatcggcgtggcgaaaaaacggctgtgcggcaagtttgagcctttgagcgcagaagtcggcgccaaaagcgcgctgatggataagggagaacagctgggctgggtatggcgcagcaaggcgcgctgcaacccgctgtttatcgccaccgggcaccgcgtcagcgccgacggtgcgctggcctgggtgcaacgctgcatggcaggctaccgtttacctgaaccgacgcgctgggcggacgctattgcctcgcgccggccggcctttcagcgctggctggctgcgcatccggaggtgtcgccatgcgtattttag

SEQ ID NO: 444764 - DNA, 795 bp, Serratia marcescens
gtgaagctgaggttgtgcaacaacgatatggaacttgcattaacaggtaacgaaaagggctggtggatcgtcagccatgaaaacaaactttggttaccaaacggtgaattgccgtttggtgctgccgataaatggggcctgcgcggcgaagcggcgcggcaaattggcgagtggcaaggggcgccggtctggctggtgcgccgcgctatggcgcaggagatggggtcggtacggcagctgctggatctcgaccgcgccctgttccagttagccgggcgcggggtgcagctggccgaattttatcgttcccatcaattttgcggctactgtggccataagatgcacctgagccgcagtgagaatgcttgcctgtgcggccactgtcgcgaacgttattatccgcaaatcgccccctgcgtgattgtcgccatccgccgcgatgatgaaatcctgctggcgcagcacgtacgccaccgcggcggcatccatacggtgctggcaggttttgtcgaggtcggggaaacactggagcaggcggtggcccgcgaagtgatggaggaaagcaatattgaaatcaaaaacctgcgctatgtctcctcccagccctggccgttcccgcagtcgctgatgatggcctttatggcggattatcatcgcggcgaactgcgtcacgatcccaaggaactgctgcatgccggctggtatcgctacgatcggctgcccctgctgccgccgccgggcaccgtggcgcggcgtttgattgaggacaccgtggtgctgtgccgggacgcatga

SEQ ID NO: 444765 - DNA, 507 bp, Serratia marcescens
atgctcaaccacttggaaagcctgactcagcgcgttggtggtagtaatgaattagttgatcaatggcttgaggcacgtaagcagttgctggttgcttactgcacgctcgtcggcattaagccgaataaagaaaagcatacgccgcttaatgcaaaagcgctggagaacttttgccacaatctggtggattatctctccgcagggcattttcatatctatgacagagtcatcaagcaggtggaaggcgccggtagtcctaaaatgtctttcgccacccaaatttatcccaagttgtggatcaataccgaacaggtgatggcgttccacgatcgctatgccgacaccgagatcgatcaggatctctgtctggcgttccatcaggcgctgtcggacatcggcgaaacgctggccgcccgcttcgcactggaagatcgcctgattcagctgctcactgaaacctggcagcccggccaacaggaagcggaaaaaggcaacctggtccaatag

SEQ ID NO: 444766 - DNA, 639 bp, Serratia marcescens
atggctgagttatcaagcccgtttcccgccacgccgcaccgcctcgggctgtacccggtggtggacagcgtcatgtggatcgaacgcttgctggacgcaggcgtcaccaccatccagctgcggattaaagaccagccggatgagcaggtcgaagccgacattatcgccgccatcgccctcggcaaacgctacaacgcccgtctgtttatcaatgactactggcggctggcggtcaaacacggcgcctacggcgtccatctggggcaggaggatctggacagcaccgatctggcagccatccatcgcgccgggctgcgtcttggcgtatcaacccatgacgatgccgaactggcgcgcgccaaagcggtgcagccctcgtatattgcgctcggccacatctttcccacccagaccaaggatatgccttccgccccccaggggctggcggagctgaagcgccacgtagcgacgctggcggcgtatcccacggtggcgatcggcggcatcagcctcgatcgcgtcccggcggtattggcctgcggcgtcggcagcgtggcggtggtgagtgccatcacccaggcgccggactggcgggccgctacggcggaactgctgcgcctgattgaaggcaaggagtaa

SEQ ID NO: 444767 - DNA, 762 bp, Serratia marcescens
atgctcagcgatcacgaattcttacgttacagccggcagctgttgctggaagacatcggccccgacgggcaggaaaaactcaaaggcgccagcgtgctgatcgtcggcctgggcgggttgggatcgccggcggcgctgtatctggccgccgccggcgtcggaacgctgctgctggcggacgatgaccagctgcatctcaccaatctgcagcggcagatcctctaccgcagcgccgacgtgccgcacgggaaggcccaactggcccaacgccacctgcaggcgcttaatccgcaggtcgagtcgatcgcactggcgcagcgcctgcagggcgcagaactgcaacaggcggtggcgcgcgccgatctggtgctggactgcagcgacaatatggcgacccgccacgcaatcaatgccacgtgcgtggccgccggcaagccgcttatcagcggcagcgcggtcggcttcagcgggcagttgctggtcatcaccccgccgttccagcagggatgttacgcctgcctgtaccctgaccagacggagccgcagcgcaactgccgcaccgccggcgtactcggcccggtggtcggcgtcatcggtacgctgcaggcgctggaagccatcaagatgctggcgggcatgccctccgcgctcagcggcaagctgcgcctgttcgatggcaaacagcaaagctggcatacgctgcagctgagcaaagcccagtcgtgccccatctgcggaggcgatctatgcaaatccgcctga

SEQ ID NO: 444768 - DNA, 201 bp, Serratia marcescens
atgcaaatccgcctgaatgaccaaacgctggagctggcggcgccgctcagcgtcagcgccctgctgtcgcagctgacgcgcgaccagccgggtaccgcgctcgccatcaatcacgtcatcatcccacgcgccgactgggccaatcatctggtgcaggacggcgatgacattctgcttttccaagcgattgccggaggctga

SEQ ID NO: 444769 - DNA, 1134 bp, Serratia marcescens
atggcggatgatttctcgcaacgctggcaaacctttgactgggatgacatcaccctgcgcatcaacagcaaaacggcgcgcgatgtggagcgggcgctgaacgcagagaagctgacgcgggacgattttatggcgctgatttcaccggcggcggctccctacctcgaaccgctggcgcaacgcgcccaacagctgactcgccagcgtttcggcaacgtggtcagcttctacgtcccgctctacctatccaacctgtgcgccaatgactgcacttactgcggtttttccatgagcaaccgtatcaagcgaaaaacgctggacgccgacgagatcgccctagagtgccgcgccatcaaggcgctgggtttcgagcacctgctgctggtcaccggcgaacaccagactaaggtcggcatggactattttcgccgccatctgccgcagatccgctctcagttcagttcgctgatgatggaagtgcagccgatgtcgcaggaggagtatgcggagctgaaaaccctggggctggacggcgtgctggtgtatcaggaaacctatcatccggccacctatcagcagcaccatctgcgcggacagaagcaggatttccactggcggctggcgacgccggatcgcctggcgcgcgccgggatcgacaagatcgggctgggggcgctgatcggcctgtccaacagctggcgcaccgattgctatctgctggcggagcatctggcctatctgcagcaaacctactggcagagccgctattcgatttcgttcccgcgtctgcggccgtgcgccggcggtatcgaaccggcgtcactgatggatgaagcgcagctggtgcaactgatttgcgccttccggctgtttgcgcctgacgtcgaactgtccctgtccacgcgcgaatcgccgcattttcgcgatcacgtgatcccgctagccattaacagcgtcagcgccggctccaaaacgcagccgggcggttacgctgacgatgtgccgccggaactggaacagtttgagccgcacgacggccgctccccgcaacaggttgcccaggcgatcgacaaggcagggctgcagccagtatggaaagactgggatagctatctgggacgcgcaccgcaataa

SEQ ID NO: 444770 - DNA, 819 bp, Serratia marcescens
atggaggcgtttgcggtttttggtaatcccatcgcgcacagcaagtcaccacgtattcatgccctgtttgcggaacaaaccggcatagagcatccctacggtaccgttttagcgccgttggatggttttgcggatagtctgcagacatttatcgatgcaggcggcagaggtgcgaacgttacagttccttttaaagagcaggcttaccggctggctaatgagttgacggaacgcgcgcagatggccggggcggttaatacgcttaagattcagtcaggtggtcagctgctgggcgacaataccgatggtatcggcctgctgagcgatctggagcgccagcgcttgatcaaacccggcgatcgtattttgctggtgggcgccggcggcgctgcgcgcggggcgattctgccactcctgtcttttggctgctcggtggtgattaccaaccgtacgttcagccgggcacaagaactggcacaggcgttccggcatttgggcgagatcgcggcgttgtcgttggatcaatgcgatcgggccgagtatgagctggtgatcaatgcaacggcttccggcctgggtggtgaagtgccggctctgccggtgaaggtgcttggagcgcaaacccgttgctatgacatgttttatcaacgcggtctgacgcctttcctcgactggacgagccaacaaggcgtcacgcgatatgccgatggtttaggcatgctggtgggtcaggcggcccatgcgtttttgctatggcatggtgtgatgccggagattgagccggtgctgcagcagcttcgccaggaagctgccctgtaa

SEQ ID NO: 444771 - DNA, 558 bp, Serratia marcescens
atgagctcagaattcaccgccattattaatgcactgaacaatcaacaggtcatcgcctatccgaccgaggccgtgtttggcttaggttgcgatcccgataacgaacaggcgctgcataagctgttggacttaaaacagcgcccgtgggaaaagggactgatcctgattgccgccgattaccagcagctgttgccttatatcgacgacagtcggcttacgccatcgcaacgcgaaacgatgtttgccagttggccaggcccggtaacgtgggttatcccggccaaaccgactacgccgcgtctgcttaccgggcgtttcgactcactggcggtgcgcgtcagcgaccatccgctggtgcagcagctatgccgcgagtttggtaaaccgctggtatcaaccagcgccaatctcagtggtcagccgccgtgccgtcaggctgcagaggttctgcagcagtttggcgaagggttcccggtgctgccgggtaacgtgggtggacgtcagaacccgtcggaaatcagagatgcgttgaccggtgaacagatccggcagggctaa

SEQ ID NO: 444772 - DNA, 1122 bp, Serratia marcescens
atgacgcctgaagaaatagggttgagattatcttgggtgagtgggctgggcgcatcgctggccagcgaactgcagcagcagttgattgacgccggcggtgagccgtctcaccatttacgctccttggggctgaacgccaggcaatgtcggcagttcaatcaggccgatccggcggcgctggctgcgaccttggcctggctggaggcgccgggccgccatatgctgacctacggttcaccgcattatcccccgcatttacatgcattagtcgatgcgccattcctgctgctggttgaaggctgtcttgaggcgctacaacagccacagatcgccatggtcggcagccggaacgccagccattacggcgctcgttgggggcatgaattcgccgtgggcttggctcagcagggctatgccgtgatcagcggactggccctgggtgtggatggtatttgccatcgcggcgcgttggccgcgcagggtacaacgctggcggtgctgggcagcgggttggcgaacatctacccgagccgccaccgtaagttggctgcgcagatcgtggcgcagggcggggcgctgatctccgaatacctggtgacggcagtaccgttgccggcgcatttccctcgccggaaccgtatcatcagtggcctgagcctgggggtgttggtggtagaagcggcggtacgcagcggttcgttgattaccgcacgcctggcgttggatcaagggcgtgacgtttttgccttgcccggcgcattaggcaacccgatgagcgctggcccacactggctgatccagcaaggtgcccacttggtgacacagccgcaggagattgcacaattgttgggaagcgggctgaactggctgcccatggatgaaaaaacaactatttcttcatcagacgtcgaagttgaattgccatttgctgatgtgttggctaacgtaggagatgaggtgacacctgttgacgtcgtcgctgaacgtgccggccaacctgtgccagaggtggtaatgcaattactcgaactggagttagcaggatggatcgcagctgtacccggcggctatgtccgaataaggagggcaagccatgttcgacgtactcatgtacttatttga

SEQ ID NO: 444773 - DNA, 945 bp, Serratia marcescens
gtgtctgattctttacggattatctttgccggcacaccagacttcgcagcgcgtcacctcgacgcgctgttgtcttctgggcatcatgtcgtcggcgtcttcacccaacccgatcgaccggctggccgtggcaacaagctgacgccaagcccggtgaaagtgctggcgcagcagcatcagctgcccgtgtttcagcccaaatcactgcgtccggaagagaaccagcatctggtcgccgatcttaatgcagacgtgatggtcgtggtggcttatggcctgatcctgccaaaggcggtgctggatatgccgcgccttggctgtatcaacgtacatggctcactgctgccgcgctggcgtggcgccgctccaattcaacgtgcgctgtgggcgggcgatcgggaaaccggcgtgaccatcatgcagatggatgtcggtctggataccggtgatatgatgcacaaaattgcctgtccgatagaagcaacagataccagcgccagcctgtatgacaaattggccgagcttggcccgcaagggctgctgaccacgctgcagcagctggcggacggtacagcgcaatgcgaagttcaggacgaagcgctggtgacctatgccgagaaactgagcaaggaagaagcacgtttggactggcgcctttccgccgtgcagctggagcgctgcgtacgcgccttcaacccgtggccgatcagctatttcaccgttgatgaacagccggtgaaagtatggcaagcccaggcgctggctggtaacagcgatgcggaacccggtactatcctgcaggcggacaagcacggtatccaggtcgccaccgccgaaggtattttatgcctgacgcagctgcagcctgcgggcaagaaaccgatgtcggctcaagatttgttaaattcacgccgcgaatggtttgcgccaggtaaccgtctgtaa

SEQ ID NO: 444774 - DNA, 1272 bp, Serratia marcescens
atgaaaaataactacaacctccgcagcatcgctgctcaaaccatcggccaggtgttggatcaggggcaatcgctcagcaccctactgccggcactgaataacaaaatttccgataaggaccgcgccctgctgcaggaactgtgcttcggcacgctgcgcgtgctgccgcagcttgaatggtgtatccaacaactgatggcaaaaccgatggtgggcaagcagcgtacgttgcactatctgctgatggtcggcatgtaccaattgctgtatacccgcatcccggcccatgccgccctggcggaaacggttaatggcgcagtcgcgctaaagcgcccgcagcttaaaggattggtcaatggcgtactgcgtcagttccagcgccaacaggaagcgttgatgcaacgcgcggcgaatcatgacagccgctacctgcacccaagctggctgctgaagcgtatccaacaggcttatcctgaacagtggcagcagatcgtcgacgccaataatcaaaagccacccatgtggctgcgggttaaccgccgccatcacagccgtgatgactatctgcacctgctcacgcaggccggcattgatgccgtcgcgcacgaggaataccccgacgcagtgcgcttactcacgccgtgcgcggtaaacaatttaccgggattcgccgacggctgggccacggtgcaggatgcatccgcacaaggctgcgtcgatctgctggatccgcaagacggcgagcagatcctcgatctgtgcgccgctcccggcggcaaaaccacccatatccttgaagcggccccacaggcgcatgttatggccgtggatattgatgagcaacgtctgagccgggtaaaagaaaacctgcaacgtttacattgccacgccgaggtgaaacagggcgatggccgcacgccacaacagtggtgcggtgacaaacagtttgaccgaattctgctggacgcgccttgttccgccaccggcgtgattcgtcgtcatccggatatcaaatggctgcgccgcgatagcgacattgccgaactggccggcctgcaggcggaaattctcgatgccatctggccacaccttaaagcaggcggcgtaatggtttatgcaacctgttcgattttaccacaagagaatagccaacagttgcaagccttcctattgcgccatggcgacgcccggctggccggcaccgaacggcaaaaccttcctcaccctgaagatggcgatggcttcttttacgctaagctgattaaaatgtaa

SEQ ID NO: 444775 - DNA, 207 bp, Serratia marcescens
atgacgaagtaccgtcacactaaaggtaagatacaagacaacgctattgaagcgttattgcacgatcctttattccgtcagcgggtggagaagaacagcaaagggaaaggcagctatcggcgtaaagaaaaacatggcaaaggggcaaactgggaggccagtggtaagcaatcaaacgattatttaccactggccttctggttttaa

SEQ ID NO: 444776 - DNA, 375 bp, Serratia marcescens
atgtggttactcgatgaatgggccgaacgccatattcgtaacgcacaggatagtggtgagtttgagaacttgccgggccaaggtaagccgctggagctggatgacgacagtgcggtgccggccgaattgcgctcaggcttccgtctgttaaaaaatgccggctatctgccaccggaattggaggcgcgtaaagaagcgttgaccatagccgccttgctgcaggaaattaacagtgagcaccctgactatatcgctttaaataaacgcatggcgctgctggaataccgtctgcagcaagctggaatgagtaccgatttcctgcacggtgaatatcatcaggtgattaatggcaaattagggccggaggagcgctaa

SEQ ID NO: 444777 - DNA, 306 bp, Serratia marcescens
atggctaagcaatcaatgaaagcacgcgaagtaaagcgcgtgaaattagctgacaagttctttgctaaacgcgctgaactgaaagctatcatctctgatgtgaacgcgtccgatgaagatcgttggaacgctgttctcaagctgcaaactctgccgcgtgattccagcccgtctcgtcagcgtaaccgctgccgccaaactggccgtccacatggttatgtgggcaaattcgggttgagccgtattaagctgcgtgaagccgccatgcgcggtgaagtaccaggcttgaaaaaggctagctggtaa

SEQ ID NO: 444778 - DNA, 1491 bp, Serratia marcescens
atgataccgaactctatctctagaaaagcaaaagttggtttgccatttgttcttttagcgctcggttctatgaatgcatatgctgccagccagcaattgtacagtctccaaatcaaaaatacccgtgaggatgtgaatgaccaaacctcgaactatgtttatgacaagctaatgaatcgtaaaatatcatctagtcatgatgataatacgcagtttggtgtacatggtatggaaagacccttagtgaaggtgggggttgattcggagaaagtagataaagcatttgagctattggcgcgtgccggtgttgatagtttacggagtacggagtcagcctggcaccgtatcgctgataaacagggaaatccaactaacttcaaagatctcgactatcaactaaaagaagctaaaaagtacggaatgagtcatttgtttgttatcggatacccgccagcaaaattcacggtggcaaataataaactttctgctgttgctcctcgctatacggctgcttatcaaaattacctcgccgtccttttaaaacgtttccaaggctatgatgttaagtatctggaactaggcaatgaagtcgatgctccaaaagtatggtgggttaactctacgcctgccatgtatgttaacgaaatgcgcatgctaaaaaatgcaacgaataaatattatcctgctgccaagaccgttgctttttctgctacttattcaaggacgccagggaagggaggcccatctggcggacgtaatttcattgaaaaaagttttgctctcggtattgataagtatactgacgcttactccattcatcatttttcattcgcggggcagggaaaccttccagcttatatgcaagcaatgatgaataaatataacgccggaagtaaaccattactggataccgaacagctggatacagggattgctgataaaaccaagtcaaatccgtatgatataatcaaactatttgctcgtgcgttcttctatcacgatatgaagagaatggattattatcttgcacgggatgtctactttggcaggaagctctatagcatggggctgtttgatcttgagtggcgtccaaagttgcgtttgttggcctatgcgatggctgctgacgcaatgaaagggaaaaaactggtgtatatggctaatcctgcaaaagatgtggaggcctatgttcttacctcgaataaaggaaacggtaaaaaatacaccattctcatgtggaaaaattcggttaacaatggcaaggtttctcctgtgatggttccgggtatcaaaggtagcgtagatatagagaaatggaacctggatgttgaaagtaagagcgatatctcaaaaggtatccctcttgacggccgtccaatcgctatctataccaatgagaaaccagattggcaacctgcggataaatctgtttttaagaaaaatggccctgcggtacaggctagtcattctccaatgccgaatgatgactga

SEQ ID NO: 444779 - DNA, 972 bp, Serratia marcescens
atgttgatcgtccttgcccatgtaaatccgcctactgcgctattccagctaaggacatttgatgtacctttgatggtttttgtttctggtatggcatactacatctcgggcaaggacaatgtgaagatattgccttatgcaatctccaggttcaggcgcctagtattgcctgtttgggcattcctggttatattcttttcggctatttacttggcgaagatagatgtcttccagtctttaattgaatcgaaaaaagttatttttgcatttatgctttatgactttggctatgtgtggattatccgcgtttttttgatcatagcactactgtctccattttatgttaagcttgccaatcgctttaacctattttattttattgtatttgatgccgcaatcagctttctttacttatctctgccacactcggatgtcaagttactgaatgcgttattaattgaggttgttattcctgcaatttcttatggtgtaatgtttattattggttacaaagtatctcgattgcaaagtagagagattaatcagttactgatttttactatatgtctctttgctgtgcaggccgtatattacttctttgtggagcataagttcttcggtcctcagaactttaaatacccgccgacgatatactatatttcttatgccatagccatgatatttgttttgaggaaatttgttgctatttttctcgataagttcaaggaggatggcgcattaggctcgttcattaaatttgtatccatgaatactatatggatatatctgtggcatattcctattgttgcttttttccatatgggggaatttaaagccaactttgttattgaatatttaatcgcgtttgttattcctcttgttgtggttttcttccaaagaaagttggttacctatgctaccaggaataatccaggatattctcgtatagttaaagatgtctttaccggctaa

SEQ ID NO: 444780 - DNA, 1764 bp, Serratia marcescens
gtgaccccaacgttaccctacaatgagatagctgctgtaatacgtgcgcgtagcaaggtgttctggactctaggtatattcactgcgttaattaatttattgatgctagtgccgtccgtttatatgttacaggtttatgaccgcgcactgccttcccgtaacgaaattacgttattgatgctgacgctgattatgttatccatgtttggcgtaatggcattgctggagtatgtgcgtagcatggtggtcatacgtataggcagccagttggatatgcagctgaatacgcgaatttataccgcagcgtttgagtctaatctgaaaaacggctcctcagacgcagggcaaatgttgaatgatttgaccaccgtacgccaatttctcaccggcagcgcgctcttcgccttctttgatgctccctggttccccatctatctcctcgttatcttcctctttaatccgtggttgggtttgtttgcgctgattggctcgctgctgctgattgcgttggccgtgatgaacgaagtactgtcccggaaacccttaggggaggccagcaagctgtcgattatgtccggcaacttggcaagcaccaacttacgcaacgccgaggtgattgaagctctcgggatgttaccgaatctgaagcgccgctggtttggtctgcaccagcgttttctgaataatcagcgtattgctagtgaacgttcggcgcgtgttacgtcgatcaccaaattcgtacgtctctccttgcagtcgctggtgcttggcctgggcggctggctggcgattgacgggcatatcactcccggcatgatgattgccggttccattctgatggggcgaacgctggcaccgattgaacaggttattaacgtctggaaaagttacagctcggccaagctttcttataaccgtctggtacagctgctggacgctcatccgcaacgcggcgaaggaatgtcgttaccacgtccggtcggtgaactgtccgtggagaacgtcaccgcggcgcctccgggttcgcaggtgccggccgtgttgcataacgtgagttttgctctgcaggcgggagatgtgctgggcatcatcggcccgagcgcgtcaggtaaatcaacgctggcgcgtctgttggtgggaatatggccggtatcttccggcattgtgcgccttgatggcgccgatatttaccaatggaacaaagatgagctggggccgcatatcggctatctgcctcaggatattgaactgtttgccggcactatcgctgaaaacattgcccgttttaatgaggttgatgccgagaaagtcctggaggcagccaaactggccggcgtgcatgacatgatcctgcgtttccccaaagggtacgattctattatcggtaatggcggtgccggactgtccggcggtcagaaacaaaggatcggcctggcgcgggcgctgtatggcgagccgtcattggtggtgctcgatgaaccgaactccaacctggatgatgtcggggagcgagcgcttaaccacgcgattcagacgcttcatcagcgtaaaaccaccgtggtgttaattacccaccgtaccaatttgctctcaatgactaataaattgctgttgctgaccaacggtcaggttaatgcgtttggcggtactcagcaggtgattcaggcgctttcgcaagcgcaaaaatcgccggtgcagccgaatgcccaggcggtcaacggcgaacttgagcaagaaaatacggcaaaaacacagactcattaa

SEQ ID NO: 444781 - DNA, 1332 bp, Serratia marcescens
atgtctacgcaaattagtgatgcagggagagcgaataacggcctgcttcctctggatgaacggcgttacacccggatggggtggatggtcattctgattggggtggtgggttttttagcctgggcagcgctggcgccgctggataaaggggtggcctcttccggttcggtgattgtttccggcaaccgtaaaacggtacaggcgccggccagcggcatcatcaaaaatattctggtgagcgaaggtgagaaggtcaaagccggtcaggtgctggtgaagctcagccagacgcaggttcaggcacaggtggattctttgcgcgatcaatattacaccacgctggcgtcggtagggcgactgctggccgagcgcgatggccatgagaacgtcaccttctccccgatactgaaggcggtgcaaaaagagccgcgcgtagcagagattttgtcgctgcagcagcagctgtttacctcccgtcgtcagggcttgaaaagtgaaatcgatggttataagcagtcgatggacggcatccgcttccaactgaaaggctcgaaggattctctggccaataaaagaattcagctgtccaccctgcgcgaacagatgaacagcatgaagtcgctggcggccgacggctatttgccgcgcaaccgctatctggaaattcaacgtcagtttgccgaagtcaacggtggtattgacgagactctgggacgtattggtcagttggaaaaacagctgttggagtcgcagcaaaaaattgaccagcgtttggccgattatcagcgggaagttagaacgcagctggcgcagtcgcagatggataccagtgaatatcgcaacaagctgcaaatggcgaacttcgatttgggcaacaccgagatcaccgccccggtcacgggcactgtcgtggggctgaatatctttacccagggcggcgttgtggcggcgggcgatcatctgctggatgtggtgccaagccaggcgacactggtggtggatgcccgtctgaaggtagatctgatcgataaagtctataacggcctgccggtcgacctgatgtttacggcatttaatcaaaataaaacgccgaaaatccccggcacggtgacgctgatttccgcagaccgtctggtggataaagccaatggcgaaccttactaccagatgcgggcaacggtgacgccggaagggatgaagctgttgaacactgaggaaatcaggcctggtatgccggtggaagtgtttgtgaaaacgggttctcgctctctgttgagctatttgttcaaacctattttggatcgcgctcatacttcattgactgaggaataa

SEQ ID NO: 444782 - DNA, 1377 bp, Serratia marcescens
ttgattcgatttccatggaaggtgaccggcctggcggtcggtcccttattactggcgatgtctgcgccggcccatgcattggggatactggacgcctatgcgttagcacttgagaaagacccgacttatcaggcggcgttgaaggagaagcaggccggagatgagaatgaaaagatcggtcgggcaggactgctgcctcaggtttcactgagttatcaaaatgcaccgcgtaactggcagacacaaaagtatcagcagtcggatatttttggtcgggtttctgatgtcaccaagcggcagcagtaccgcagttatgctggctcggtcaccctgacgcaggcattattcgactatgaagcctatgcacgttataaggctggcattgcgcagaccttggtgtcggatgaacgctatcgcggcaagctgttcgatttagcggtcagggtcatcacggcgtacgtggaagtggcgtatgccaaggatcagattgcgttggcggtagcgcagaaaaccgcctatcaagaacagctggcgctcaacgatcgcctgcttgctgctggcgaggggacggtaaccgatctgtctgaaacccaggcgcgttatagcctggctgtggcgcaggagattgaagcgcgcgatgcgttggactctgctcagcgggatttggaagtgattatcggcgtcccgctggaacagctggacggcctgcagattctaaaacccggcaagttcaacgtggttcccctgagcccgtcaaagtttgaggactggcagaaactggcgctgaaaaataatcccgagctggcggcctcgcgtcatggggtcgatgcggccaagtatgacgtggagcgcaatcgcgccggctttatgccgcaggtgcagctgtacgcatcgcactcggaaaacgactccagcagcgataacaccattaaccaaaaataccgtactgatagcatcggtctgcgtgtcagcatgtcgctttactccggcggtggagttgctgcctcgacgcgtcaggcggcggcccgctatggtcaggcgatgtatgagatggatgcgcaggtaggtacgacgctcaatgatttgcgtaagcaatataatctgtgtatcagcagtcgcgcgaagctggcagcttacgagctggcggtgaaatcggccaccacccaggttgaagctacgcgtaaaagcgtgctggccggacagcgcgttaacgtggacgttctgaacgccgagcagcaactgtactccgcccagcgcgatctcgcgtcggcaaaatatacctacatcaagtcctggatttcgctgttgagtgactccggaacctttgatgagaaagacatcaagcgcattgcgcaatatttcacccattcatcttga

SEQ ID NO: 444783 - DNA, 882 bp, Serratia marcescens
atgctaaaagctgttatccctgttgcaggtctcggtacccgcatgttgccggcgactaaagccatccctaaggaaatgttaccgatagttgataagcctcttatccagtacattgtggatgagtgtgttgccgcaggcattaaagaaatcattttagtgacgcattcatcaaagaatgccattgaaaaccactttgatacctcgtttgagctggaaagcatgttggaatcgcgtgttaagcgccaactgctggaagaggtccaggctatttgtcctaaaggcgtcacgttgatgcatgttcgtcaaggtcagtctaaaggtttgggccatgccatactatgtgctcgtccgttaattggcgatgcgccttttgccgtgctgctgcccgatgtgctgatggatgatgccgcttgcgatcttagcaaagataatctggcgagtatgataacccgattcgagctttccggacgtagccaggtgatggttgagccggtgcctgagcaagatgtgtccaaatatggtgttgttgcctgcgacaatgctgctgttctcccggggcatagtgtgccgatgcacgcaattgtggagaaacctgatgttgatagcgcgccttcgaatttggctgtggtggggcgttatgtattggctgctgatatctggccgctgcttgagaaaacgccttatggtgccggtgatgagatccagttaacggatgccattgccatgttgatggggcaaaaacctgtggatgcttttgccctttcggggagatcccacgactgtggtgataagatgggctatatgaaggcgttcgttgagtatggtctacgtcatccaaaacaaggcgaagattttgccgcgtggctggaaggttgtatctaa

SEQ ID NO: 444784 - DNA, 672 bp, Serratia marcescens
atgaaaaaaattgatgtcatattagccagttataatggtcagaagtatataggcgaacaaataaaatctattctgaacaactttgataaaattgatgggtatgagtgccgattgcttgtttctgatgatgcctcgagcgacggaacctgtgcgataatcaacgatatctataccgagccgacattagggcagcttctggttagcaacagcgtcacgggttgcgtgatggcgataaacaattcgctgttaggtttggtgaaaggtaagaacctggcagaaactattatgcatgactggtatcttgcgctggttgcaaagtgtttgggggaggtgaagtttttaaatacagcgacaatattgtaccgccagcacggggggaaccaggttggtagtattgctcgtagtggacgtgattacttctctatccagaagattattgcatttgtaaaaaaatcgaagtgttctattaatgaaacaagaaagcaagctatacatcttcttgctgagtatggtccattgttaaaacaagatgaacgaaagtttattgaagagtatgttcgttccttctctcgctgggcggtattgaaaagaaccaagctattcctttctaagcaggtagaaaagaaaggaacggcaagaaacttaatcttcttctttttatatgtattctaa

SEQ ID NO: 444785 - DNA, 1098 bp, Serratia marcescens
atgttcggctcggaacacatcttattaaaaagagtgagtaaaaaccgcagttcgggcataaagttaatgctatcgacggtaaaattaaggaatatagcattctttatcatctctgcgattgttctggcggtgttgtatatcaagtctgatcacgtcacatttgtgtttggtgttgcaacggccatcgcattttattttacgaccatagatatatattctgtatataataacgccacactaaactcaaaaataaacacggtatgtaatgttattggtttagtgatcagtctactggtgcgcttggtgatcgctaagtttgagatgaatttcttatatctctcgataccaatcgttttggtaacgatggttccttatgtgataaagaggatctcattttccaaaagcaatgtactcaacaaagagttctcttttagaaatgagttgaagtacagcaagtatatgttctatgcaggcgtgcctcttgcagtatcgaccgtatcggtgattatctatgctcgccttgctcagttctttatcatgaaatttggcggtaatgagcagttaggtatctttgctgtcggcagccaacttgccacggcatggacttttattacggctgcaatcattacgtcttattttgccaggatatatgaaaccaaagacaagtcgacagccattaatatggcggcgaaattaaatggtcttgtcttcctgatggcgatatttattgtactctgcgttgatttatttgggcagttcgtcataaacttactctacggggttaaattcgaagaggcctacagtatattaatgatcatgacatttaattcgctatgttcatgtatggggccgattgctaataaatatataatctatgagtctgggtatagttacttatcgaagaagatgatagcggctatgttgattacaatacctatttcttacttcttgacgagtaaatatggtatgtatggtgcggcatatggcaccgtaatcacggagtttttatcgttaacactgctgaattatttctttaataaaggcgtggttctgaaaattcacttgaaagcactaaacccaaaaacatatttcaagtga

SEQ ID NO: 444786 - DNA, 882 bp, Serratia marcescens
atgaatggaaaagaatttaaaatattcgctttcatgacggtaaaaaacgaatcagatatcatcattgaaactcttcaaggtgcagtgaagtgggccgataagatttttgtcatggataacatgagtaatgatgatacctgggagaagttagaagcctttgccaaagacaacgataaagttgttctttggggacgttatggcggtaagttccatctgtcattgcgacaggtgatatttaatgactacagacaccttgccaaagatggcgactggtggtgtcgactcgacggtgatgaattctatattgatgatccaagggagttcttatcacagttagatagtgatgtagattgcgtttacaatgcatccttccaatattattacacggaggatgattttgagagagaaaaatcggcttctggcgaacttggcgttgtgaccgacagattgatgcattataagtgcaaccattcagaaataaggtttatcaaagaaaatgctaatctttgctggccgcagtatgcggagtggccaattaatctgcttaacccgacgtcaaaaagaataagattaaagcattatcagtatcgtacgctgcaacaaatcagcgaacgactgcgtgcacgtaactcctcatcttcaggcgcttcgttttctcatgaaaaagtttctgcagaagagtggtatcgccgccgcggctttaagatgccggactcggaagagtatcaaaatcatagagttgtcatgaaggctgatttagacagcaatcaggactatatctataacgacggtaaattgccgccgattttccgaccaaacctcaagagtaaaatgaagagagtagttgtttcttcatttattaattacgtgaataaaaaataa

SEQ ID NO: 444787 - DNA, 858 bp, Serratia marcescens
atgaaagtattgttgaccggggcgaaagggcagctgggcagctgttttcaggatcgtctgccacaaggctgggaagtgttggcgacggattccgacgtgcttgatattaccgacttggacaaggtcaaacaggccgtcgcacaatttaaacctaatgtgattgtaaatgctgccgcttataccgcggtggataaagctgagagcgatcgtgagctggcggcattaatcaacgagacagggccaaagaatctggccctggccgctaatgaagtcggcgctcgcctagtgcatgtttctaccgattatgtgttcgacggtaaggctaacgaaccatactccgagtccgacccgaccaatccgctgggcgtgtacggccaaaccaaactggatggtgaactcgccgtcatgggggttcagcccgatgcactgattatccgtactgcctgggtgtttagcgagtatggcaataatttcgtaaaaaccatgcttcgtttaggtaaggaacgtgatgcgttggggattgttgctgaccagcgtggttgtcctacctatgcgggcgacattgcccaggcgattattgatttgttgaaggctaacgccgctggtgggatatatcatttctgcggcgacaaagaagtcgcatggagtgatttctccagagctatctttgatactgcggttaaagcgaataagttggcgaagtctccggttgtcaatgagataaaaactgaggattaccctacgccggcagaaagacctcagtattcatcattgaactgtcaaaaagttatttcattagggatatctccctcccattgggatcgtgcattagtgcatgttataagtcgaatagcttag

SEQ ID NO: 444788 - DNA, 2175 bp, Serratia marcescens
atggcagataagaatagagtaaacgtgtctcaaaatgacagttccgatgaactggacatcggtcgtctattgggggaactgattgacaaccgttggctgattataggtattacggcaattttcctgactttcgggattatatattgcctgtttgcgacgccaatatacagcgccaacgcaattgttcaggttgagcaaaatgtcggcaataagctgttgagcaacattaatcaaatgttgccttctggtcagcctgagtcagcccctgaaattgaactgttgaagtctcgtatgattttagggaagacggttgaagatctgaatttgaccacggatatccggcagaattatttccctatttttggccgcggatttgcgcgattaatgcacgaagaaccggggcaactggctgtatccaaatttagtctgccaaaaagctgggattctgcagagctaatgcttaccgtagacagcgcaacggaatacaccatcagtaaagatggcgatgagctgtttaaaggtaaggtaggggtatttgctcaggaaaaaggtgtatcgattttagtcagcgatattgttgcgaagcctggcaccagcttcaccatttcctcaaaaacttatttatcagcaatcagacagttgtctgatcaatatgaagttattgatcaaggtaaggatactggcgtactaggattgactctgacaggtgataaccctgtattgattcgaaagatcctggatagtattacgcgtaactaccttgagcaaaatattgagcgtaagtcggaagaagatgcaaagagtttggtattcttgcgtatgcagctaccgaaagtgcgcacgtcattggataatgctgaggataagctaagccattatcgtcagcagaaagattctgttgacttgacgatggaagcgaagtcgatactcgatagcatcgtggcgatagaaggtcagctaaatgaattgactttcaaagagtctgatatttccaagctttataccaaacagcacccggcttaccgcgccctgatcgaaaaacgtaaaacgttggaagaagagcgtgatcgtttaaacaagcgtgtgaatgccatgcctgaaacgcagcaggaagtggtgcgtttgagccgtgatgtggattccggcaaagaagtgtatatgcaattgctgaatcgtcagcaggagctaaacatttctaaagctagcaccatcggcaacgtacgtatcgtggaccgtgcgatgaccggcgatagcccggtaaaaccgcgtaagtcgatcattatgttgctgagtttgattctgggtggcatggtgtcttgcggttatgttctggctcgtacttacctgcatcgtggaatcgaaagccctgagcaactggaagaaatgggcgtcaatgtttatgcgagcgtaccgctctccgagtggcagcgtaagcgtgatatggagttgatttcgaaaatcaagggtcggaagcagaatgcagatgctgattcgctgctggcttttggcaaccctgctgatttggcgattgaagcgattcgcggcctgcgcaccagcttgcactttgcgatgatggaagccaaaaataatgtgctgatgatttctggtgccagccctggtatcggtaaaaccttcatcagcgccaacttggcggccgttgttgcgcaaaccgggcagcgtgtgctgttaatcgatagcgatatgcgtaaaggctatgtgcacgaactgatcggtgcagatggtaagaaaggtctgtctagcgtattggcaggcaagatgtcgatcaatgaggcgattcaacatactcagtccaacgtgttcgactttatttcgcgtggtcaggtgccaccgaatccttcagaactgttgatgcaccgtcgttttgaagaagtcttgaaatgggcttctgagaattacgacctggttctggtggatacgccaccgattctggcggttaccgatgctgcgattatcggtaaacacgccggcacgtcactgctggtagcccgcttcgagctgaacagtccgaaagaagttgaagtcagtattcgacgcttcgaacagaacggcatcgaaatcaaaggtgttatcctgaacgccgtggtgcgtaagttatctaactactatagctatggttacgataactatagttataactataaatcagataactaa

SEQ ID NO: 444789 - DNA, 132 bp, Serratia marcescens
atgctctatggccactggcttcagcaaagagagattgcggatccttataaacagtctcgagaagcctttgagtttgtatacggcctccttgataaatcggcccagaaatgggttcatgctttaagtcgctaa

SEQ ID NO: 444790 - DNA, 1038 bp, Serratia marcescens
atgtctactgaaagcgcgtctttaaaaaatcacaatacctttgcgctcccggtcaatgcagcgcaattggtcattgcagagaacatcgagttaatgattaaggtctggcagaagacgaaaaaacgtcaagagccgctgctggttcttggagagggcagtaatgtcctgtttttagaagactttgctggcacggtcatgattaaccgcctgcacggtattaaggtcagggaagagcaggatagctggcatcttcatgtcagcgccggtgagagctggcatgagctggtaaaaagaacgctcgacggcggtatgcccggtttggaaaatctggctctgatccctggctgcgtcggttcggctcctatccagaatatcggcgcgtatggcgttgaatggaaagatgtctgtgaatacgtcgacctgctcaatctgacgaccggagagatcgatcggatggtgcctgaacgctgcaactttggctaccgggaaagtattttcaaacatcagtttaaagtcggctatctcatcgttgccgtcggtatacggctgaataaacagtggcagccgctattgagctatggcgatctgactaagctggataaagagacggtaacgccgcatcaggtatttgacgcagtttgcgcgatgcgtcgcagtaaactcccggatccgagagaaaccggcaacgccggcagctttttcaagaatccggtggtggagaaggagcaggccacagaactgttagctgcttaccctgctatgccgcatttcccgcaggcggatggtcgggtgaaactggccgcagggtggctgatcgatcaatgcgcgttaaaaggctatcgtatcggcggggctgcggtgcatagtaagcaggcgctggtgttgattaaccaggataatgccgttagccaggatatcgttgcgctggcgcgccacgtgcgcaacacggttgcagagaagtttagcgtctggcttgaacctgaggtgcgctttattgcatcggcaggtgaagtagacgctgtagaggctatttcatga

SEQ ID NO: 444791 - DNA, 963 bp, Serratia marcescens
atgagagatacgacggttccattaaagctcatcgccatgctggccgatggagatttccattcgggtgaacagctgggtgaatatttgggcatgagccgtgccgcggttaacaagcatattcaaaccgtcagagagtggggcgtagacgtgtttaccgtcccggggaaaggctacagcctgccggcgccgattcaactgctggaagcgcagcgtattacagcattgctggatgagaagcaggtgacggtattgccggttgtggattcaaccaaccagtatttgctcgatcgtatcgccagtttgcaatccggcgatgcctgtgtggcagaatatcagcaggcggggcgaggtcgtcgcgggcgccagtgggtgtctccgttcggtgccaacctctatttgtcgatgttttggcgtttggagcagggaccggcggcggcgattggccttagtctggtgatcggcatcgtgatgaccgaggtgctgcagcgtttgggggcagaaaaagtccgggtgaagtggccgaatgatctttacctgaatgaccgaaaactggcgggtattctcgttgaattgaccggtaaaaccggcgatgctgcacagattgtgatcggcgccggtatcaacctggcaatgcgggatacgcagagcgacagtattaatcagggttggattaacctacaggaggcagggattgctatcgatcgcaatgagcttgccgctacgttactcaatgagatgcgtcagtcattgcggcagtttgaaagtgaaggactgtcgcctttcattgcacgttggcgtgagctggataactttatcgatcgtccggtcaaactcttgattggtgagcagcagatcctggggattgcgcgcggcatcgatcagcagggtgcattgctgcttgaaaaggatggcgtgatcaaaccctttatcggcggtgagatctcattacgcagtgccgagtga

SEQ ID NO: 444792 - DNA, 549 bp, Serratia marcescens
atgaaaattgtaccgataaatgccagtacgctaccggtctaccgcagcgagttggcagcactgctgctggatgccgtaaaagggggcgcatcaatcggctataccgaggacattacgccagaagaggcggccagctacttccacggcctgcgcccggcgctggcgaaaggcgagctactgttatggattgccagagacgaaagcggtgttaccggttgtgtgcagctggaactgtgccaaaaacccaatgggcgcaaccgcgcagaggttcaaaagctcctggtgcacagccaggcgcgtcgtcaaggcatcggccgcacgctgatgaaaaccgtggaaaatacggcgctacagcatcagcgcggcctgctctatctcgatacgcaagctggcagcatcgccgaatcgctgtatcgtgccatggggtaccactgcctcggagaactgccggactacgccgccaccccagatggttattaccaccctaccgtgatttactataagcgactgttcgcggtcaatccggcatcccgctcattggccagctga

SEQ ID NO: 444793 - DNA, 309 bp, Serratia marcescens
gtggaaaagtatggcggcacggccatcggcgacggttcaaaaattgccgcctatcgggtgcatggcgaggtattaacgaagctgcaggaattccacttactggatgatttaaagagcgtgaactacgatattccgctgctgatgatgaaacggcagctctctgcgctattaccgagcgcggcgggcgccgcgaaatggctgccgggcggtgagggtagcgccattgataagcacggtatgcagcaggtgatcgacagcctggaggagcagaaagaggcggatatgaccaccattactaacaggttataa

SEQ ID NO: 444794 - DNA, 1008 bp, Serratia marcescens
atgagattgatttcactatcaacggaagagctcgaacctttccaattttcccgtatttttcatcccagttcggcacgttatgagttggagtcaaaatatctgttcggggcgtcatcgatgccctcgatcaatcgtcgctatccggtcagccgccgtgagatttccggcgtcggtgtgtcgcagttccgggaagaccggcagataaaaaatcaggtgctggccgagttggattcagggcagctgcttgccattgatgacaactgttttggctggtcgccggcgcggcacctgttctttatcgaccaaaccggccggctggtgcagtacccggccattttgccgccgctctacccgatgcagcggataattcagcgctatgaggcgatggttgcccgctatcgcgtccgtccgccggcgacggtgctgccccccagctaccggccgcagcagaaagcgccggcagtcgtcgcggcggccaccgcgatggcggtgcgccgggatccgctggccgctatgcgggatatgagcaagcgcgaacgttggcagacccggcaaaatctgatcggccgcgggcagcgcagcatttaccccgatgcgcgcattgccgcgacgcgcctgggtgagaacaatatcgccgttgagtatgccaaactggcgcaaaatgtttacggcgttgacgggcaaccgattgacgcgttgggtacgatgccgaacgtacccgaagggtggcgtgatatcagtaataataaaaatgctttagaccggctggggttaaagccagagatgttgtatgacaatcctgacatgccagactttttttctagagtttatgcgccagatccgacggtgttcggtaacgctatgaagccaaccgtagtattccgggggaccaggatggagaaaatggttgattgggaaaacaacctggggcaaggcgctagtctcaattcagtttattatgagaaatcggtcactattggcaataagttgatagatttcccaggctag

SEQ ID NO: 444795 - DNA, 690 bp, Serratia marcescens
atgaagaaaattgaaccggaagactattttacgggccaacagctggccttagccaaggccattgaggcgggggacctgggcagagtaaaacaactggcgccggaaacagatttaaacaccccgggcgagcaggatttaaccttattattcttcgccttgaatgagacgtactacaataataatcccaaaccacgtttgcaaattgtgaccgcgctggttaaagcgggagctgatcccctgcaaccgcagtctgatgggatggccagtcctgctgaaatggttgctatgggggataaggatctctggctacaggcgctattggatggtgggttatcagcaaatgcaaaaaataaacagtggggaaccgctattatctttgacacgctaagagcaaagaacacggcaactctggctctattaatagaacgtggagtaaatatagattcccgtaactcattagaagaaacaccgttaatggcagcctttcttcgcaaccgctttgaacacgtaaactatcttctggatcatggtactgacccaaacccggtaaataaactgggctgggtatttgcttcgctggtgcaaagcagcatcaatgacagccggccggaaactgaataccaccagaactgtctgcggctgcgcgacaagatgatcgcgcggggggtgaagtggccaccggaggcgtaa

SEQ ID NO: 444796 - DNA, 429 bp, Serratia marcescens
atgaaaaattctttaaaaatcaccatagctatcgttaccattttcgccgctgtattggtttactttttgccgatgataaaaatgaattttgctgggagtgcgcattataccgaacaggatcggcgggagtatgacttttataccccggaaatattgcgggacatgccgcgtatctctcagcgatatgatttcaattttgccaacattacaggcccggctatgcatgtaaatgcggtcaggttctatggcacgcgcgacacaagcaagattgatagctacttgatctcaaaggaatacaagaagcaggaaacctgtgatctggaggccgtatgctggaaagcctctgatccacaagaaacaatttatgttgggacattgacgacagaggataccgtgcaagtgcaggtggcttacgacttttacaagtaa

SEQ ID NO: 444797 - DNA, 705 bp, Serratia marcescens
atgagtaaacgcagtgatattactgatggtcgcgatgctggcaatcagagatctggcctgatctatacgaaagtcctgggctggatagaccttggtcatgcccgtggcgaggatatcagaaggttgcttcgcgatatcgatgccggggagtcatccggccaggaacgctatgacgtggcatactcgcaatccatgtccgatccggccatgacactaaaaatgggcaagttcattaagtggcggattaagcgcggccgcacttatgcagagcgacagagtatcgccttggccatgatgatgtcactagcggtgaagtttgagcgactgcaggcgtcattcccaataaatctggtgacagacagcgggttcagcggtgaagacctggtgtcgaatttactaggcttctaccgcgtggtcacaatacaaaacccgttcccgttcctgcaaccggtcagcaaagaagaagcgctgatgcgatgggatttctacgggaagattggctcttggaaaaacgagggctttaccccgcttttgttcccggatcctgaacgattccgttacgctcatcctcgaaaggggatgctgccagcttttatgcgtacagtcacgccgtggagcgactttaggtccggtatcgttggtatagcgactgcgaacgggaattatatggatagcgcgaaggggggagtattaccgtatgcgtaa

SEQ ID NO: 444798 - DNA, 249 bp, Serratia marcescens
atgagctgcctgtacggcagtgaactgcagttcgacatcggtcagtgtgacgttggatttctaagctgcctgcacggcagtgaacgtgagttgctttccgagaatatcctgcatatatttctaagctgcctgcacggcagtgaactgttgcagtatagcgctaatcgattgtttaaacagcataagcactatcattttgcccataaccctttttttagacgcactaattatagctttataaatcaatag

SEQ ID NO: 444799 - DNA, 438 bp, Serratia marcescens
gtggcgattcatacctatacctcactctttaccctgataaactgggccgccgcctgctacctgttctttctcgcctggcaattctggcgttatcagccccaggcggtaaatatcgaccagaaggctacccgtcgtgagctaacctccgcatggctgtccgggttgacgataacgcttgggaaccccaaaaccatcgccttttacctggccattctaccgctggttatctctttggatcgtgtatccctacaggtttggggaacgatgctagtgccgttgaccatgtctgtcctattggccgtcggcgctatctttattctggcggcaataaaaatacgccgtttcctcactagcgcttcgtcacagcgcatactctttcgtaccacgggagttattatggtgctggcagcttttggtatggtgatgaaatctttgtaa

SEQ ID NO: 444800 - DNA, 705 bp, Serratia marcescens
atgagtaaacgaagcgatataattgatggagcggaggcttccagtgcgccgtatgggctggtatatacggaagttattggtttgatcgacctgggacatgcgcagggcactgatattcgaaacctaatgcgcactattgattccgggaaatcctctagcgaggaatattatcgggtatcatattcgcagtctatgagggacccaacaaagacgattaaaatgggtaaatttataacctggcgaattaaacacgggcgttcatattacgagcggcaaagtattgcgttggcaatgatgatgtctttgccgctgaagtttgaagggcttcaggcctcatttcccatgagtcttgtgacagacagtgggttcagcggggaggatctgatatcaaatttgttgggcttttaccgtgccgtatcaatccaaactccatttagtatgctgcgccccgtaagtaaagccgaagcattaaaacgttgggatcactatgggaaaataggttcttggaaaaatgagacgttcaagccgatactgttcccggatcccaaaagattcccacatgccacaccacgaagaggggagttacctagtttcatgaaaacagtcaggccgtggagtgacttccgttcaggtattgttaagattgccactgctaatggttcatatatagatagtgcgaggaacggggtattgccctatgcgtaa

SEQ ID NO: 444801 - DNA, 765 bp, Serratia marcescens
atgggtaaatttgaccaaggaatatcatcttccgctgagttgtcgggggctgaaaatccagacgatttaaatataacaaatgttagaattaaaagaaaaaaatacattcttactgttggatttgaagttaaccatccgggggcttttgttgatggagtccaagatctgtcagttgactatggacatgctttcttttatataactaggaacaatgaagttgaggttttttttagttttggaccaaaaggtcttgctgcaccagggaagattactgatgaatattcagggcctagaccaggggatacaaattatagaataactgaaataacacgactgtttagactaaggattagtgaagatatggctgtaaaggtgaaaacagttgctgatatatttaccgataaagttaatgcaggtacagagcattattatgcctttatgaatgatacctgtgctgaaacggcaagggatattttaagtgaaggtggtatatctacaccttctgggagtggccctatcaaaggtgtaggctctgatgggattacaacaatgggaagttttgttaacccttataaatggcattttgatttctctaaaaaatatggaacggtagggattttatgctatgggactggtggggttggtggggtggatagtgatttgatcacactctctaactcatgggttctttctcctggagagaatgatgtattattattaacaggtcaaacggagataatccatggagatcttacgaaaatttag

SEQ ID NO: 444802 - DNA, 636 bp, Serratia marcescens
atggagatcttacgaaaatttagatttttttttaatgtggtggtattttctttgtgcgctatgtttttttcaatttttgaagtgcattcaactgaaaagaaggtaggtattgacagcggttacgaggagaaatatatgctatgcaataaccaagaatcattgcttcaggtaattgatgtcgcaattaaaataatatcacaagaaagtacaatagaaactcaactagaagagagtaaagatcttttcgacgaggcagaacctcattaccctaaaaacggccatgtaaatagatattatttttctcacaacaaagaaataaatatggatatttttaaagataaaatatcaagggtatggaattcagcatatatttcttttggtgcttgtggtgggagggcaggaagtgaaatttcatttgattttgattatattataaaggctaaactttcatttgatggtgtatataaaagagaaagtgcatatccaaatgccaatggaaggcgaatggtatataaatttaatgtcgctcgctatcgctataaaaataatgttattattgattttaaattaaatgatgaaaaccagcgtgatgaatcatacccattaaggttttctaagatacacatctacatatga

SEQ ID NO: 444803 - DNA, 504 bp, Serratia marcescens
atggccggaaatatcgttcgaatagacttccagaccacaatgtacatcgtcgcagatacgctgatagcgcgtgccgctatccacttccgcccccacgcccggaatgttggcgacaaactgcgtcgggccataggccacgccatcggcatcgggaatgcggaacgcttccgggatatcctgctcggtgtagaacatccccggcccgttaatcgccttgccgaggttaatcatcccccagccgtacagcgcgtcaataccgggtgctcccatatcggtggcggtggttttcaacacatcggcaatttgcgccgtcgacaggtaagggaaacgctgcagcaatacggcaaccgcgccggtcacgtgcggcgtcgccatcgaggtaccgtttttattgccgtagtccgacgtcagctgctgtggatcggaaccgttggccaccgcgctgtaaattttgctgcccggagacgcaacgcagaagctggcggtgtaaccacagcgggatga

SEQ ID NO: 444804 - DNA, 597 bp, Serratia marcescens
atgcagcgcatccggatccttaccgccgtcggacaagaaatccggaatgctaacgccccagctgttattaatcacccgtacaccgctttcgatcatcgcctgccagccggcgttggttaccgcgccgtccagccccagaaactcgccgtaggccggaccgtcattgtcgttgtccacgctgataatctgcgaatcaaacgccacgccgtgcatccccgcaccgtcgcggttggcggcagcgatccccgccacatgcacaccgtgattgctcagcgtctcgccgttgtagaaatggaaactgccgtcgaaatagaacggatcgccggcgttaatgcccggccggtggggatcggtataggcgcgaatgccctgcgttaccacattgatcaacttgccgtcgccggcaaactcgggatgctggttatacactggcgtatccagaattcccactttttgtcctttgccggtgtagccggcagcgtaggcctggtcggcatgaatcgcccccagcccccagtcggcgttaaactcgtcgctgcgccagctggccgggtctccgactttcccctcgtttgcctgtacgctgcctgcagctaa

SEQ ID NO: 444805 - DNA, 1170 bp, Serratia marcescens
atgacggtccgacagcaacccgccgtagcccagcgacagcgacgcgttctggctcaccgccacgtccgcgctggccttcagcagcaggccgtcgcgcgataccggcacgctgttgctgacgaacgccgcatcaccgccgcggaacttcagcccggtgccgcgctccagctcgccgtactgatgctgccagcccgcctcgccgcgcagcgtcaccgccgtttcacggctcaactgccactgatggtccgcacgcaggcccagcgtcgacaccgtggcgtccgtgtgctgcttgtcgccgtgcagcgccgctgcgccgccgtcttcgctgatgccgttgttctggaagttgatgtacgccagattggcgaacggctccaggttcacccattcgccctgcacgctatagcccgcttccgcgaacagctgctcggtgcgcgcgctgtatttcgccgtcgcgcggtccgactgcagcccgtagttcaccgagcgcgccgtatcaaaccggtgccaggtgtaagacccaccggcacgcagcgccaaatcgccgtactgtttgctgccgtataccgccaggtggtagttgtcgctgtccgcattcgagccgtagccgccgtccagcgaggtgcgggtatagccggtcgccacacccagacgccagtcgtcgtaggccgaatccagacccagcagcaccccgtaggtcgaggcctgatagccggtggcgttcacgtcgcccgacgcatggtcccatgccccgacaaactgcgcccacgcaccgccgtcatccgccttgatgtcctgcgacgtcgccagcccttccgcctgacgcaggcggctgttcagcgcatcgcgcaggtaacggctgtcgttcacctgcgccgaggcgatatccgcgtggatctgccccgacagctggcggaacgcctgccgcgcctgcccggcgctgccggaggccagaatgctttcatacaccgggttgcccgccgccagcgcatccgccgccgccgccaccgctcgctcgttctgcgtggccgccacgctggcgaacgcggtgtcgttacgcgccacgtccgccgtcagccggttgccctgcgtggacagcgtggccgccaggaacggcgaagtggttgtcgcgccgtcaaactggccgctgatcccctgctgcgcctgtaa

SEQ ID NO: 444806 - DNA, 711 bp, Serratia marcescens
atgttgacgaaaagcgagcgtcatcatctgcaaggtttgttgaaagagagtgaacgggtaagacgttggtcaacagtggataataattttgcacttggcagtattgaattgattttgtcaggaaccgatcgcgtaaaagatttgcttgaacagttcaattggcagtttctagccagagaagatttttctgttggcccattaagtggcgtgctgttatccatgactcaaataaagcaagttccagctttgccacccgatatttatgtggcattctggcagacaaaaaaaaaccaatggtcagaagaaatccagccaacaaatagcgacctgttaatgcgctgtcgggaaaagcaacgtaatcgttattttattcgggcagatacggggtactggcaaactgatagctttgcctgggcgttaatggctcacgtcatgaggtcggaaaaaacgcttggtactcaaagtcactatggcgatctcttctggtctaaatcactgattactttaccgatttatgtcactcagtggtggttacatttcgccggcggttgttgtaccgtcagtgatgacggaaggataatatttgctggtagaggggatgaattgtggagaggcgttgagtgtgatgataatgctgttttcccggttaatcgagcagtcactcggcgggcgagagctttggcgctacgcaggataagcagcatcaattaa

SEQ ID NO: 444807 - DNA, 549 bp, Serratia marcescens
atgatgttgatctccttgcgcgccagcagcgccatcagatcgttctgcgcctgtacctgcaccggaccctggttggcgataagcttgatccccagctttctgacaaacacgcttaatgcattacccaccccgacaaacaggtttttcaccacgctgatatccgcatgctttcccgcggtagcaatcaggttactgcctgccgacagctgcagctgctccccgctgctcagcgccatgccgtccggcgcactcatcagcaccaccgattgcttcagcgcgttcaactgctgctccagcaacgctatctgggccgccacatccgccgggttcgccgtcgcgctttgcgcatcgtcggagatgctgctcatctgctcgcgcgcattctccagattaccgagcgccgcttccatcgccagcacctcgccctgcgcctttggctggccgtcggcgctgatgaacagccccttctgcgcccggatggcgccccagctgtcggtgcgcagctcaaagccctcgccgcgctgctgcttttccgcatcgaccaaatga

SEQ ID NO: 444808 - DNA, 723 bp, Serratia marcescens
gtggagcaggtgaccgctatccgcttacaccagccccgactgggtacacgcaagctgcaccacttactgcgacagcagccggaagcccccgtgcatgtggggcgagaccgcctgttccggatactgcgctgcgcccgtttactggtgatgcctaaacgggcgtatcataagacaacgcacagccatcatcgtttttaccgtcatcccaacttgctgaaagcgggagaaaatcaggttatagccagccgcccggaacaggtgtgggtagcggatatcacctatctgccgctgaaaacaggaacggcgtatatcagtctgataacggatgcgtggtcgagaaaaatcgtggggtatcatgtgcatgacagcctgcatacccggcatgtcgccgccgccttcaaaatggcgctggccagcaggcgcaccgcagctccgttggtacatcactcggaccgggggatccagtactgctcgcaggaatatcagacgttacaccagcgacatggcgtcacctgttcgatgacggacgggtatgactgttaccagaatgcgctggcggagaggataaacgggatactgaaaacggaatacctgcttggcaaaccgaaagacatcgtgcaggcaagaaagatggtcaggcagtctgtggaaatctacaacgcacggcgaccgcatctgtcgctacaatacaaaacgcccgatgaggttcatcgggcgttataa

SEQ ID NO: 444809 - DNA, 930 bp, Serratia marcescens
gtgtggcattttaaccctacggagtttatagggtactttaggaaatgtggttggttaagttctaacgagctcaagcagattattcctcgttatattattcggccttctgggagtcgtaattactgggagccagtatcactcaaagagaattcagcatctgtttttaaagtgcatcatcagatgattaataaagcaacgcgtaagtattgtattaatacaccattgcggttggcaagttttttggggaatgcagttcaggaaacaacatggttgagtgtgacaagagaggggtatgtttattctgataaggatgagaacgggaagagatacacatataatatttggtattacccttggtatggaagaggttttttgcaattaaccaaccctgataatttttataattatttcacatatcgagggaggcgatttaataattctgtgagacgcggattggttaatgcttatcgtagactacaaagagataaatcattaagactcaaggaaagaaagataactaacagaatactatatgataatcaacaccccggtttgacagatgaggtcattgcctggcggaatgaggttgagtcggggcgttatgcgccagcggacagcgccggtttttactggtcgttcacagatatggcaagatatgctgatagtgctcatatcattgaacgacagtctgtgatgacaaatcgtggctctaagacctattatagaagcccggcattttggcaagcgagtgcaacggtgaacttaccgggagctattgggagggatgactatcgaggaattaatggttttgttgaaaggtgctgtgtctatagtagtgcgatttccgtcttaacagaaatgaaatatccagatggtcgaggtgatttcatcttggattcacctgagggtatggagttgaggaggttataa

SEQ ID NO: 444810 - DNA, 450 bp, Serratia marcescens
  misc_feature (352)..(361): n is a, c, g, or t
atgactatcttggagtctagaattaacggtcagagtattaatgactcttctgatatagaacgaatgatccaaaaccgagggattataaaggcaatatatgactatccaatccttggccatggattagggtattacattcctaaccttactcgttccgccagcgcgaaatacctgtatgagactcaatcgctatctattgtgatggtgtttggctttgtcggcgtatttatgtttatgctgttggtattatggcttgtcctgcctaaagagaaaaaactgtataaatataccggcccgctcagctttgttttcttttggattgtgtgtggttcctttaacccagtattgttcnnnnnnnnnnttttatacttcgcggcaaggttcaatagtattaaaagaatgctatctggtatcaatgataatggtaagtctattgaatctgaatattga

SEQ ID NO: 444811 - DNA, 648 bp, Serratia marcescens
ttgcttgaaggggcgatcaagaaagatacccaggtgctttttactggttctaccgaagctgaagcggtgaaacttttcgctaatacctatttggctatgcgcgtggcttacttcaatgaacttgatagctatgcggaaacctttggtctggatactaagcagattattgaaggtgtatgcctggacccaaggattggcaatcactacaataacccatcgtttggctatggcggttattgcctgcctaaagatactaagcagctgctagctaactataaaaatattcccaacaatttgattgcggcaattgttgatgcaaacaggactcgtaaagactttatcgctgattctatccttagtcggaatcctaaggttgtgggaatcaaccgcctgatcatgaagagcggttcggataatttccgtgcctcttcaattcaagggattatgaagagaatcaaggctaagggtgttgaagttattatttatgaacctctgatggaagaagaagagttcttccattcaaaaattattaatgattttgatgcatttaagagcaaatctgatgtcattatttcaaaccgcatggatgcagatcttaaagacgtagagagcaaggtttatacacgtgacttatttggtaatgactaa

SEQ ID NO: 444812 - DNA, 1986 bp, Serratia marcescens
  misc_feature (1552)..(1561): n is a, c, g, or t
atggcaatgattgatgatagagttataaagattgaacagtgcctttttggctatagcgatggccatcgtttactttcttcatcgataattttaggtgacagaattttaaatgaactattaaggaaaagtgacacaccttttggtgatatagcctcatcgaataagttccattattcaggtttcccaataattagcgagaaaatttatgctttaatcaaaacatggccagctccagagatgaatcgaccaggttgcgtatggagccacgtattacttattaaattttctgattttgataaaatcgataacctttctgttttagattttttatttaaaagacctagtcataacttttacaattacgctagttcaattgaactttctcttaatgacacaattactgttccggggcatttacaatcagaaaaactccatgaaattctcaatgccatttattcgccccaagaatcaaatagaatcatatatacatattctcctggtgactatattgatgaaatatatgccatttggtcactgcagtggcctaaattaagacgttccctaagttttttagtagcttcatcaagctctggtaatgtaaaagacttgctcaaaagaaatgatattgtatttattatggatgaccgtattgatggcaatatcaccacctatagtacatggcaatatattctctttcattggatggagcatgaaccagagaatttgagggagtatttatggagtattggtaaatttatcaatggcggcagagcaaagtttcctttaatggttgaaatcttcgacagcattaactctcatgaaattagcaaacttacttacagtggtgtgctgaatacgctgcgaaaattaaataaaatcgttaagggtgaacatgaagtaaaatattctctagaagagatatataaactacgaacagtatacacttctgatagtcaatatttggtatattacgcagctgctattttggaaacttattcatatgcagaatcacttataccaaaggaaataataactaacttagcacgcaaattatcactcccttatgacgagaacttaaatttagattgtttactgcagaatcccatggtagctaatgcacaaagtttaataaaaatggtcattgactatacgcccattgataaattcctattaagtgcctattcacttagaagtctagatcgcatttgtgagattaaaaacgatttgatatcaaaagactatatttactgtttgtcttctcattttgttatctatcttgccaagaagtattggactgtattaccttacgatttaaaactcatacttgtaaaaaaagcatgtcagactaataactttgagctattaaattattttaatcaagcaaacaaattagatgtattaatgataatggtcgtggatgaatattttttctcattagatttagactctaaaataaaaaacgaactcatttactttctcattgaaaaccttgtgttagcacaaaagcagaccgatgattataatgtactatatcgcctcttatgtgaattcnnnnnnnnnnacttcaaccattatattattaatataatacctgcgtctatcattgaagaatcaatgacctaccatattaacaatttaggcttcaatgataaattcaaattctatagctttgtatattacaaaacctttaacaatgttaacagtaacactttacatctacttttttattctttcatccaactacattccatgttgtcagaaaacgagttttctttcgagggttggagaattatagaaccaatcttacctacagtgtcttactttaaatcatgggacaaatgctatatccttcgtaaatctctagttaagttatgtaaaagaaacaatgatgccatgaatagccttagaacattattaaataacagtgagtctttgagggattttttgaagggcgatggcattattaatgagtatgatattctctaa

SEQ ID NO: 444813 - DNA, 720 bp, Serratia marcescens
atgagaaaatttaaaaataagattggactttgtataaagagaactggttttttagctatcttagctatatctattgatgcaggtgcggctgggttcgattgttcaaaagcgtctaccgctatagagaagatgatttgtagtgatggaatactaagtgatcttgattctgcaatgtcaaatttgtacagcagtaagaaggatgacaagctaaaagagatccagttagattggattaaaaacaaaaggaatcatgcacattcatctgatgaattacgtgtattatatgcagagcatattcagtttttatctacatatgtagggaaaactaacaataatgatgctggaaataaatcagaagatgtatcaaaacctgtagagtcacgtaaaccaataactaacgagaagggtgggccagatagtttacagttatcggactttgaaaatgaatttatatctatcaatggtatggagtattctactagataccaagagatgaataaatcgaattatgtaattcgatgtgctgatgctatgatgatagacgtaatgaattcatggaggagtaattccgcgaagaaaaatcaaattcgcgatttcagccgactacgaaaaagtatctataatgggttatggaatgctattgtagatgatattgaaagtaaggtaaatactcaacaaatgaggatggtttgcgacttacttatcgccgctaatagataa

SEQ ID NO: 444814 - DNA, 621 bp, Serratia marcescens
atgttgtcttcaccgacccgcttcttgatttccgtcgctaggtacggcgaggcgccgcttgccagcgcccccgccaggttattgcctgccagcgccgtcagcgcccccgtcaccgcctgcgccgccttctgcaggtcgctgccggtgccatattgccgcatcgcgttgtcgtatgcccgctgcatcaccgccgcatcggtcgtcggtttaccgctcttctcaagctgctccctggcctgcgccagcgccaccgggtctttctgcgccttcagcccggcgatatctccctgcgtgcggatgacgtccatcgcctggccgccaatctccccaatcaactgcgcctgcttgagccggttttgctccttctccttgttgaatatcgggctgatgctgccgtcgttggcatgctcggtatcccggttcagctgcgccacatcctgctgctgtttgtctttgtcgcgaactatcagcgtaccttcgctgaccccggccttcgtcgtgccctcggcatgcccgctgttgttggcgcccgacagcatgccgccggccatgttggtcagcaggtctttgcccaccggcccgccggtgctgaagctgccgccgctgtgcgtcgcgctgtag

SEQ ID NO: 444815 - DNA, 780 bp, Serratia marcescens
  misc_feature (704)..(713): n is a, c, g, or t
atgcttttgatacatctctctgatgtccacctaaagtcagctgatcacaaaaaccccatggaccccaaccaattgctacgagcaaagttgcaagaagacatatcacatatgtgtgacacgttgggtaagtctccaaaaacaattatcatttcaggcgacattgcattctcaggtcaagaaaaagaatatcaatttgcacaggagtggttacaagaactttgcaccaatgttggagctgattacagctctattttcataactccaggcaaccacgatattgacaggacagtatccgaaaatggcgtggtttcagcattaatagataaagtacgagctacaaagaaaggtgatactgaacaagagttaataaagataattaatgaaaagagcatagcagagttgctattaaagcaaattgagaactacaataatttcgctaggaattttgcttgcgatttgaactttaacgacaaactacatgtgacaagacgaattgaaattgaggatggtatttccttagttttatggggattaaactcagttgttgtttccgatagtaaagatagtgaatcggacaagaatttatttgttgtcccgtcatatagaacaatcctggaacaagatggagaggttaacattgtagtttgccaccacccccataattggttaggcaatggcaaagaatttcacgaacatgtgactannnnnnnnnnaaaattttactctttggtcacgagcacgaaaatagatttgtgccaacgcaagattatatccacataa

SEQ ID NO: 444816 - DNA, 795 bp, Serratia marcescens
atgagttcctttttgaaaaggacaaaaccaattattatatctgttgtaggtgataccggatgtgggaaaagctcattaattcaatgtttatatgaactttttcaagctggccctgtatctaacaaaacctttcaacgtagtcatactttaattgggtttgatagacgttcctatcatgcaagacttatatctggaggtaaaatagccactatacaaagaacacctattggcgtcggtgtgcagtactaccatttctgtgttagtgatgctggtactaagaaagacattattatagccgatagagctggagaatcgtataaccaatgcaaaagtacccccccgctagtaaatcaatacactgaactaaccatctgtaataagatattgatattaattgatggcgaaaaactatctaaaagaaatcaggttgccaaaactttcatttcaattagacagatggttatggctataatagacaatttaaaaagatccttagacttctcagtaaatatagttatttccaagtctgacttgatagataagcaacccaacagccaagaaataaaaagtaaaataaatgagttcttcaaaaacattaaggcttactcttcaaaaattgaagtggattttgatcttaattatatatcttcacgacctgactcaggagatataccatatgggaatggtctgagcaatttactagactcatggtgtgaaaataataaagttggaaaagttgaccttcctgacaataatttcacaggtaaatcaagagttatagatatgcttgtttaa

SEQ ID NO: 444817 - DNA, 276 bp, Serratia marcescens
atggccacaggatcccttgccctcctggccgtcttggccggcattgcgggcttcgccctctataaacatttaaaatctcagaaaaaagcacactcatccgcccgtacgatcggtaaccggcaacgcgctttcaccgcgaaggcccggcacaacgcacgccgcgccttcgcgggctgtcatgctttcatcacaaaattgtcacactatggccatatgataattcgcgtttatccgctctggcttaacaccaaggatttcgcccatgaccataattaa

SEQ ID NO: 444818 - DNA, 528 bp, Serratia marcescens
atggcctctttagtcatcgacgatattccgcagacgatcgttaacgtcaagcgccagctgcgccaggcattgccgaactaccgcgacgtatttctggcgctggaagagaacatccgcggccaggtcgaacagatccggcgcgagctggccgccggccacaatccggtgccgcagatcgacgcggaagatatcctgcagcagcgcgtcagcgagcagcagatagcgctgatcaaacagcgcggcgcctgcgccattcgcggcgtgtttccccgcgccaaggccgagggctggaaccgggaaatcggcgactacctcgagcgcaacaacttcgtcgagcggttgaaaaacgccgccgaagacaactatttcggcaagctggccgccagcaaaccgcagatctacggcatctatgtagcgcggcgaaaaatttcggactgtttcgcgcttaataccggactcaagaatcaggcgaaaatatgcgattttggacagtccagaaaaacacgcaacggcgagaaattggcataa

SEQ ID NO: 444819 - DNA, 1089 bp, Serratia marcescens
atgcttaatgaattactcgatatttttgcaagtcctgaaatgaaatttgattatacccaggatggtaataaaaagatagaagtagcatgtagatatctttttgaaaaaattgcatctgactcggctatgaggggggcagaattttatactcccgaaggtatttcactactatttgcagagttattgcagcctagggatggagatagtatttgtgatcctacttgtgggtctggttctcttttaattaccctagggaaaaaaataaaaaaatcctttagaagcaataattatactttatttggtcaagaagttaatagatccatttgggccttggctaaaatgaatatgattatgcataacgaaattaatagtcggatagaatggggggatgtaatatctaaccctcagcttctggatacagataatagattgatgcagtttgatgtagttgcttctaaccctccgttaaatattatcggttggaatcatgatgatttagtacgtaatgattatggtcgctttaatttaggtttcccacctcagtctaagggtgattatgcctttattttgcacatggtttcaacacttaaaagtgcaactggtagaatggccatactggtatctcacggggtattgttccgtggaggtcaagaggagagtataaggaaaaatttaatcagtgaagggttgttagatgcggtaataggtctaccagataggttgcttcctgggacagggataccaaccgccattttgatcttcaggagagataaaaagaattctaatgtcctgtttatcgacgcatctgatttggctaaacccgtaaaggggcgcaatttaataacagatgaaatcattgggaaggtatcagaatgctactttgaaagaagtagcgtcggcaatttttcacatgtggcttcttttgatgaaatacaagaaaatgattttaatttaaatatatctcggtatgttaagaagcatgaagagcaggcttttattgatcttgacagcttacgtcaacagcgtgaagaactactatcaacattgcatgaattagaaagagaaatgaaaggttttattgataattga

SEQ ID NO: 444820 - DNA, 714 bp, Serratia marcescens
atgccattggttacctttggtgagctcactctcgatttgcagcgtaagccaatcaaaaacctgcatatcagcgtactgcctccggatggccgagtgagagtatcggcccccgtctcactgtcagacacagctatcaggatggctgttgtcagaaggctggtatggatccgacagcagcaagcacaatttcaggctcagccgcgtcagagtgaacgagaaatgtgtagtggcgaaacacactacctttggggaagaggatatcggctggatgtagttttagtagataagccagctgaagtgaaacttcagggtggttggatacgcatgaaagtacctccacattatgatacggcccagcgggaagctgttctcaaccagtggtatcgcggtattttaaaacaaagactgcctaagttaatggcaaaatggcagcaggaaattaaagttgaagccagttatgttggcatcaagcgaatgaagactaaatggggtagctgtaacccccaaaccgcacgtatctggatcaatctcgaactggtgaaaaaacctcctgaatgccttgaattcattgtggttcacgagctagttcatctacacgaacgcaagcacaacgagcgttttaccgctctgatgaacatgcacttaccaaactggcgcgaacacagagctaagctgaataagatgccattagcttataatcattggggatattga

SEQ ID NO: 444821 - DNA, 3096 bp, Serratia marcescens
atgaacagtgttggtcaacgtgaacgcatgacacaaaaacgtgttatccagttattcaccgatcatctcggttatcactatcttggtaactggcacaaaagagaagacaaccagaacatcgaaccaagcttagtttctgcctggctaacaaagcgcggcgtttcagaagtcctaatcgcccgagcattacggcaactggatcgagccgcaagcctcggtgaaggtcgtatcctctatgatgcaaacaaagaggtgtatcgccttctgcgctacggcgtaaaggataaagaaggtgcgggtgagcagaatcaaacagtgtggttggtcgactggaaaaatccagatgccaatgagtttgctatagctgaagaagtaacctacaacggcgaaaataaaaagcgcccggatttggtgctgtatgttaacggtattgcgcttggtgtcattgagctaaaacgttctacagtgtcagtctcagagggcatccgccaaaacctcgataatcagcaaaaagccttcatccgcaactttttcactaccatccaactggtgatggccggtaatgatttagaagggcttcgctatggtgtaattgaaacgccggagaaatattaccttcaatggaaagaagccgctgaatccccccacgccaacatgcttgatcgccacttggctcagatatgcaataaacagcgcctgctggaattgatccatgactttatcgtctttgatgctggggtgaaaaaaacctgccgccataaccagtattttggcgtcgctgcaacgaaaccttttattcagcgcaatgaaggcggcatcatctggcatacccagggcagcggtaaaagtctgactatggtttggctggcaaaatggatcagagaaaatatcaccgatagtagagtgctgatcataaccgaccgcacagagctagatgaacaaatcgaaaaagtcttcaacggcgtggaagaggaaatccttcgcacccgaagcggagcagatttggtaactcgccttaatcaaaccaaaccctggcttatatgttcgctagtgcataaattcggccgtcacgaagaggatgacatagaggccgacactgacgatttcatcgaacaaataaaacgaaatatccctgccgattttagcccgaagggaaaattattcgtgtttgtggatgagtgccaccgaacccaatccggcaaattgcattcggcaatgacaagcattttgccagatgcacaatttatcggtttcaccggtaccccgctgatgaagaaagataagaagaagtcagtggaggtcttcgggccttatatccacacttataaatttgatgaagcagtcaatgatggggttgtactggacctgcgctacgaagctcgtgacatcgatcagcgggtcaaatctcagaaaaaagtcgaccagtggtttgatgctaagacatctaaactttctcgccttggccaacagcaactcaagcagaaatgggcttcgatgcagaagctgttgtcgagccgctcgcggctggaacagattgtggctgacatccttctcgattttgaacaaaagccacgactcgccgacggccgcggtaacgctatgctggtttgttccagcgtctatcaggcctgcaaatgctatgagatgtttagtgaagctggttttgccggtaaatgtgcgattgtgacgagctaccagccaaatgccagtgagattaaaggtgaggagagcggtgaaggactgactgagaaactggccaagtacaacatctatcgcaaaatgcttgcggagtattttgaacagcctgaggctgaagcggccaaacgtgtaagtgattttgaaaaagaggtcaaacaacgcttcattaaagaaccgggccagatgcgccttctgatagtcgttgataagttattaactggatttgatgctccttcagcaacttacctctatatcgacaagaaaatggccgatcacaaccttttccaagcgatatgtcgcgttaaccggttggatggtgaagataaagaatatggctatattgtcgactataaagaccttttccgctcattggaaaaaaccgttcaggactacaccgcagaagcctttgacggttacgacaaagaagatgtagccggtttactgaaagatcgattgcaacaagccaaaatagatcttgatggtgctcttgatgccgttcgcaccctttgcgaaccagtaaaaatgccacgcaatcaactggattatcagcattatttttgtggagaatcaggtgcgtcgatagagcaattatctgagaaagaagctttacgtctgacattgtatcaatccgtggcgaagcttatccgtgcttttaccaatctggcaggtgagctaacagatgctggttatagcgagcagcaggcaaatcaaatccgcatcgatgttgagttttacacaaaagtccgcgatgaaataaaaatagccagtggcgatttcgtggacatgaagcagtttgagccaggtatgcggcagatgctggatctttgggtagatgccgatccaagtgaaaccctcatggattttgaggaactagggctgcttgagttgattattgaacgcggagaagaagcactggatggacttccagccgacatgcgtggtaaccaggaggcgatggctgaagcgattgaaaataacgttcgcagaaccattgttgatgaaaacccagtcaacccgaaatactacgaaaaaatgtcggtgttgcttgatgaacttatcgcacttcgacgtcaacaggcgatctcctatcaggagtatctggagcacgtacgtgaactggcgaagcaggttaaacatccgcagtcaggtagtaaaagtacttatccaatgagcattgatactctcgctaagaaagcgttgtatgacaacctcgggcaggatgaagtcttggtgacaaagatagatactgcagtccgtcacaccaaaaaggccgactggtatggggatcgttttaaagaacgcgagattagtttcgctatcgcggaagagatcaaaggttattcagtgacggtcgcagatgtaatggccctggtgaaggcacagaaggagtatcgctga

SEQ ID NO: 444822 - DNA, 981 bp, Serratia marcescens
gtggatgttccgctagatgacaaacaattaatcgaccagttcgaacttcgactgttaaagcagaatgacccggttaaagcggtacaggatttcgtctttgcacttctcaaatgcaaatacctttttgatcagttcgtgataaaacgagagttcgcgaaaggtagcgatagctggagtttgaagcgcctgcgttggtattcggaaaaaagcaccagctataccaatacgtttaatgaagatgatggtagctatgtagacatcaaccgacagattctgatgctgctttccgcattccacgtttcaacccctactctggtttataaacactggttgaatggggctttgtactatctgtttaatgcccattccgctgaaaatcagatagatgcaaggaagtacctcggttatctggagcatctcgcctccgcgtttgtctttcaaaacttcctggcagaacaagaaccaaaatcatattttgagattatctacggtaaagaagcacctctccatcctgtggaactgtcggacaagactcagaagaaaatgcgctttggtatgatagcaaacaacttggtattcaattacctggactacttactgtggtgtcgtgacagaaataaagctgaggtagtgaaacgttttgaatttaccttccgaagttcattagagcatttctaccctcagcaccccatggatggctttaggacattaccagatacatcgttgcattccttcggcaacctaagcctgattagccacagcaagaattcgcgacttagtaatttccagccaaaacaaaagcaagagtacttcgaagcgagccttgaacgtaatgaaattgatagtctgaaactgctcgccatgatggagctgatgaagaagaacaatcagtgggcggaagaagaaatcgccactcacgaagcggaaatgctggcagtgttaaccagtggtagtgatagcgtatttagggaggtgttatga

SEQ ID NO: 444823 - DNA, 648 bp, Serratia marcescens
  misc_feature (617)..(626): n is a, c, g, or t
atgaataatgcacaggtaacatcctttacggtcagatcattgctgggcgatgcatctcgttatcttatccccatgtaccagcgtaactatgcctggggagaaggtgagatcactcaacttgtgcaggacatactcgactatcagcaaaaaagcctgcatagccctctccctcaaacttactacatcggtacgttggtcgtgttcactcgccctgatgggcagtcagagataatcgacggacagcagcgtttcactactctatcccttcttgctaactggttaaaaaaacatgcggaatccacgctggatatgagctggtaccaaaggattaacttagggtttgagagcagacctaagtctggcgaaacctttgctcgactctggcaaggtgtggaaccgcataaactgcggagcaaagaatttaatgacgggctgatcaacggctatgaacttattggcaaggtactacgcgacttgaagctgattggtgagtcattaaatcatttctgtacctaccttttcgaccatgtacaaattgcccgaatagaagtgcctgccgataccgacctcaatcatttttttgaggtgatgaacaatcgaggtgagcagctcgaaannnnnnnnnnctcgaaaagcatgaggtggtaa

SEQ ID NO: 444824 - DNA, 1344 bp, Serratia marcescens
atgaaaaaaatagttacggaaaataatagaaaaaaaactccagagggttacaagcaaactgaagtaggtattattccggaggattggagtgtatcatcattaggtgcactcgctgaaaaaataatggttggaatagcatctgctgcaactcatgcttattgtagcacaggcatacctatgctaagaaatcagaacatcaaacccaataaattagattctgatgatttactttttatcaataagcaatatgaacaaactttcaaaaacaagcgattaaagaaaggtgatctactcacggccagaactggttatcccggtactacctgcattatccccgacgaatttgaaaatgcacaatcgtttacaacgttgataacaaggccaacaaagaaaattaactccttgtttctttccattttcatgaactctgaaattggcatcagtttttttgaaagaaatcaaataggtggagggcagaaaaatattaatgcggcaacacttaaaacttttatagttgcgaccccatcattacaagagcaaacggccatagccaatgtgctctctgatatcgatgcgcttattaccgaacttgagaagaaaatcaccaaaaagcaggccatcaaaaccgccacaatgcagcaactgctaactggccgcactcgcctgtcgcatttttctaaacattctgatggatcacccaaaggatatatgactagtgaattggggatgattcctgaagattgggaagcgaaaccatttggtgagttgtttgaatcattacctcatcgtcggactctgcgaaaagaagacattgtttcttttgtcgggatgcaagatgtcagtgaaaatgctcaactaataaagcaaacgcaactctcttttagtgaaatgagaggtggatttacttatttcgaaagaggtgatgtcctagtagcgaagataaccccttgttttgaaaatggtaaaggctgtcataccgattcattgctaactgatattggcttcggaagcacggaatttcatgtgctcagggccaaaaactcctctcattcaaaattcatctattactggacaacagataccaatctgaggaaggcattagaatctgagatggttggtagcgctggccacagaagggtacctttatcagccatgcagaattacttaatcccatgccctcaaaccaaggtcgaacaaacagcgatagcagccatcctcttcgatatggatactgaactcgaggctctggagcaaaaaatctccaaggtccgagatataaaacaaggaatgatgcaacagctgctgaccggacgcatccgtttaccgttggatcgccagccatga

SEQ ID NO: 444825 - DNA, 573 bp, Serratia marcescens
atgcaaaacaaaccgcaatgggagccagactggtatctggaatctcttctgaacatccatattgacgaaatggttgatcgctatgcctgcctgcgggcactccgaatcgacttgttctatcagcatcacaccgctaagtactacctgcaaaaccacaatcatcttgaatgggatctccggttactcatggattacatgatgcaaatgggcgcagtcgtgggttatttctgggttatcgaatggacagaagaccatcactaccatgcgcacgtagtcttctgggtagatggcaaccgcagtcggaaggtttatccctgggctgagaaggcccgtgagttctggacgctaattaccgaaggtgacgggggcttccatcgtagtgaatacaaaaaatattacagagccaatatcaatatcccggtgcgttacagcgaaccagacagtatcgacaacatccgacaggtgttggcgtatatgaccaaaattcagcagaaacatggcctgctgctgttcggctgcaacgatgtccctgaacgaccagcaaccgggcgaccacgcaagactgacttctga

SEQ ID NO: 444826 - DNA, 255 bp, Serratia marcescens; identical to SEQ ID NO: 342686

SEQ ID NO: 444827 - DNA, 330 bp, Serratia marcescens; identical to SEQ ID NO: 209470

SEQ ID NO: 444828 - DNA, 633 bp, Serratia marcescens; identical to SEQ ID NO: 209471

SEQ ID NO: 444829 - DNA, 672 bp, Serratia marcescens; identical to SEQ ID NO: 209472

SEQ ID NO: 444830 - DNA, 894 bp, Serratia marcescens; identical to SEQ ID NO: 209473

SEQ ID NO: 444831 - DNA, 282 bp, Serratia marcescens; identical to SEQ ID NO: 209474

SEQ ID NO: 444832 - DNA, 282 bp, Serratia marcescens; identical to SEQ ID NO: 209475

SEQ ID NO: 444833 - DNA, 366 bp, Serratia marcescens; identical to SEQ ID NO: 209476

SEQ ID NO: 444834 - DNA, 609 bp, Serratia marcescens; identical to SEQ ID NO: 209477

SEQ ID NO: 444835 - DNA, 234 bp, Serratia marcescens; identical to SEQ ID NO: 209478

SEQ ID NO: 444836 - DNA, 258 bp, Serratia marcescens; identical to SEQ ID NO: 209479

SEQ ID NO: 444837 - DNA, 1662 bp, Serratia marcescens; identical to SEQ ID NO: 209480

SEQ ID NO: 444838 - DNA, 267 bp, Serratia marcescens; identical to SEQ ID NO: 209481

SEQ ID NO: 444839 - DNA, 786 bp, Serratia marcescens; identical to SEQ ID NO: 209482

SEQ ID NO: 444840 - DNA, 1830 bp, Serratia marcescens; identical to SEQ ID NO: 209483

SEQ ID NO: 444841 - DNA, 378 bp, Serratia marcescens; identical to SEQ ID NO: 209484

SEQ ID NO: 444842 - DNA, 309 bp, Serratia marcescens; identical to SEQ ID NO: 209467

SEQ ID NO: 444843 - DNA, 348 bp, Serratia marcescens
atggcgaaggagcgcgatagggaacgccatacggcccgccggcgggctgctggggcggtagatcgggaaacctacctggacgcggccgaggcgaagcgtgcgcaggcccaggcgctcaaagccgaggggctttccgtgcgtgccatcgcgcagcgcatgggcatcagcaagtccttggcggccatgtacgccaaggaggcggccgagtgtccaaagtccgtgcgtattacagccgaccaggccatgccggtggccagcatcgccggaagtgacgagggcggccgcgaaggtgtccaaagtccgtccgtattactaatggcggagcctaccggccggggggcggtgtga

SEQ ID NO: 444844 - DNA, 177 bp, Serratia marcescens
atgtgcatccagttattaagctttatcggcagcaaaaaagcgatttttcctttgggactattcccaattaactttgccgccgcctcgtttaaagtaaattctggccagatttaccttcaacgcattatttcctgcctatattcacccgagcagagtttccctaccctgccctggtga

SEQ ID NO: 444845 - DNA, 510 bp, Serratia marcescens
atgaataagcgtttgcacggcaacgcgtcaatgcgccgccaggcaggccgatggctggcctgtgtattgagcgctttgccgctgatggccgaggctgtcaccacggttacggtaaaagtcaccgtgatcgccccgccatcgtgcgtcatcaataacaatcgcccaattgaagtggacttcggcgatgtaatgaccacccgcgtggacggcagcaattaccggacagcggtgaattataccctcgactgcccgggcgcaagttccaatgcgatgaggttacaggtacgcggcaccggcgcggcatttgacggcacggtgctgcagaccaacaaaaccggtctgggtattgagctgcagcagagcggcggaaaactggcgctgaacagctggatgaacttcacctacccgaacgcgccgcaactgtggtcggtgcccgtgcaacagagcggaacctcgttgaccggcggcgcatttaccgcaggcgcgacaatgttaatcgcttaccaataa

SEQ ID NO: 444846 - DNA, 492 bp, Serratia marcescens
atgaaaaacgtaatgcggggcctgttgctggtcggcagccttgccgcagggtactccacggcgctggccgctggcgacatggcctttaaaggaacgctgatcgaaccgccgccttgcaccatcaatgacggcaatctggtcgacgtcgattttggcgaccgggtcggcatcaataaggtcgatggcgtgagctatcgccagccgatgaactaccagattaagtgtggcggtggcgggagcggcagttgggcgttaacgctcagcctgatcggcacagcggcaagcttcgacaacaacgcgctgaagaccaataaagatgacctcggcattcggatctatcagaacgataagccctttacaccgggcagcacgctgtctgtcacgctaggcagcgagccacacctcgaggctgtgccggtgaagaacagcggcgcgacgctgaccgaaggcgcattcgaagccctggcgacactgcgagcggattaccaatga

SEQ ID NO: 444847 - DNA, 579 bp, Serratia marcescens
atgagaacagagaccatcaaacatccagcgagaagaaattcacggtacgggcggtttattccggggagcatcagcgctgccttgttgttgcaggcgttagcgctgttgccgatagcggccaacgccgcagacaacgtgcgcctgcacggcgcgctggttgccgatccgtgctttatcccgccggggaaagagaacatcgcgctcgacttcaacaccgttgtcgataaatacctgtatctgaacacgcgcacgctggggcacgcgttcagcattccgctgacgggttgtgatctcagcctgggtaaaacggtaaaggtgaccttcaagggaacggaaaacgcagccttgccggggctgctggccgttgacggcgtgaaagggatcgctatcggcctcgaaacaatggcgggtacgccgctgccgcttgataaacaaagcgcctcctatgccttgttcgcaggggatatggaaatcccgctcaaagcctatgtgcaaggcgagcctgaggcgattgccaataaaaccattgagcgcggggcgtttacttcggtaacgacttttgtgttggattatgagtga

SEQ ID NO: 444848 - DNA, 744 bp, Serratia marcescens
atgttacgacttataactctgttgctactctcatttttaagcatgcacgccattgcttatgaagtacccattgtcaccaacataagagcacaggtaggtggcggctatcagttcgaaattgtttgggctgagcggactgtttttgcgccttgtgcaggcggcgcaatttcgacatatggcgtagcaatgggcaatcatgtaggcccagaccctgcgaggactgtattccaggttccagggttacctacattatctggttcgggaagttctttctgtatctcaagtttaaaaagagtcctcccggcaggcacttattcaaccaccgtgaacttatcccaatatacttacacaggagttgcggcatggggaggaggggtttcattcggccgtatatgggcaggtacagagaacagaaacccacggccaggtatttcatgcacagtagatgatgtcgtagaattcgaccatggttcggtgggactgaatgaaacatcagttcgaaattacgagctgacgactcaatgtacaggcaacgcctccgtcacattgacagtcaaagatagcagtttgaatctcggagatgggacaaccgcagcggtcacactaccgaacggccaaccctcgatgtcagtctctttaccttctggaactgggcacgtgtcattaacgagcactcttcgaactgttgcagctacaccaggggaaaaaagaggccaaactataatgtacttgctctataattga

SEQ ID NO: 444849 - DNA, 639 bp, Serratia marcescens
atggaactgggttcattgactgattggctattagtttttgcgaacttcattatggcattatctgctggttatgctgcttacaaagcgaaagactggttgaaagcacaaacgaaaactaaaggactagaggctgctattgaaaagatttctaaacttgatgaacagtatagtgatgcaatggatagtaaagagcgtataactaagttttcatatagaatagaacaattagatgagtttcgtggtaaagtagttgaattctatattgaccaagccaaagttgaatatgctgaaattaaaaaggcaagagcctcagctattagattaaaacgagaaatattttctattgaaagactcggcattgagattattgaaagagaacaacttgaaaacatatgcaactgtttagttagattctatactgtctcctcaattttcatccttacagcacaacaattcttaagatctaaacattctgatgggaaggacttgatgtataaaattcaattcgaagatatagattcattttctaagaacactttggctgatatctatgctcttaaagacgaagcctctacaaaactagattcatatttcgatgagcttattacagtaaaagtacacaggctttttcagagttag

SEQ ID NO: 444850 - DNA, 528 bp, Serratia marcescens
atgcagattatgcgaatggagtacaacgacttagccttgatgagtggtaaggcaactctacatgtatatggtcttggaaccttcaaggtgttcagtgggcgtgatcgatacatcaacaacccgaactgtacgtctattcccgactatggagcgatccccgtagggcagtactacattgtcgatagaccaccgtcgagtattggaaacacgatcaagaactttggcggcgatctgatcaacggtacaaatcacaatgaatggcttggattgttcaactccgaaacaatgagcgatcatgtgttcgttaatggcgtacaacgtggtggctttcgtttacatccactacggccaaatggttcaggtgaatcgtggggatgtatcactttcttcagtgtgtcagactttcaaacagtaagacgccgattgatgaatacaaagcaatcgcgtgtgcctgggtctagaaatggactgcttgcatacggacgtgtagacgttagagggatatctcgttttgaaaaatgcaactaa

SEQ ID NO: 444851 - DNA, 144 bp, Serratia marcescens
atggttcatgagctggttcatctgcatgaatgcaaacacaatgagcgttttgtcggcctaatgaatctgcacctgccaaactggcatgaacacagagccaagctgaataaaatgccactggcttataaccattgggaatattaa

SEQ ID NO: 444852 - DNA, 1875 bp, Serratia marcescens
atgtggcacgacaatgaaacaaccgttgattacgtcaactttcgcctagtagccaaggcttgtgcagagctcattcaagataccggtggggagccaatctcgattgggatctcgggaggctggggcgcaggaaaatcgtcacttgtacggatgatcgcatctgagttatcgatggaacagactgtcggagtgggaattgcctctgaggaacgaccaaaacatgtagtgataactttcaatccatggctttaccaaggctttgaggatgcacgcaccgcgctactacagacggttggagatgcagtactcgaggcggtagtcgctcagaatagtggacttttaggtaaggcaaaatccctcgtcaagcgcattaattttctacggttggctcaacttggtggagaagttgcagccactttgatcacaggggttccggtcggtcttattggaaaagttgtcgaggctggaaaaggtgcattgcagaatgaatcacttaatgaaggcatcgcagtcgccaaagatgcatcagaagctaccaaaggactcttgaacgaagctaaacccgtttcgctgccaaaagaaatacaatcctttcgggaagccttggaagagctactcgtcgagctgaatatcacgttggtagtctttgtcgatgaccttgatcgatgcctacctaagactgctatttcaacgctcgaggctattcggttgctgctgtttctgcgtcgaagtgcattcgtcatcgccgcggacgatgtgtttattcgtggagccgtccgtgtccactttgctggtactgggttggatgacgatatcgcaaccaattattttgacaagttaattcaagttccattgcgagtaccaagactgggcgctaacgagactaaagcatataccgcgttgctatttttggaacgtgctcaccgcagcggacagctgaaaaccgagagttttgagaaagctaaactcagcgtagaagctcgactacgagaaacttggacgggaaaaaccgttgatcttgcattcctcgaaacgctggtggaaaaggagaatgctgagttgctcgacctaatggggctagctgagaggttagctccattactttttagtgcaagtacagtccaggccaacccacgactgattaagcgatttcttaataccgtgtttttgcgtaagacattagctaaaccacaaggcattgatgtggatgtacaaattctggctaagtggcatttgctcgagcggtgtgatgaagctacggcgaatgcattggcagaaaaggtttcggccgaaaacgaaggaagagtcagcattcttcatgacgcagagatggctgctaaagacccggataatacgctccccaccctatttggagataaagagtttgttcgtgagtggctgcagcttaaacctctgcttggtgatatggatatgcgacctatattgcacctcagtagagatagcaccgttagggattttggtgcagatgatctgaacgtagcaggtaaagcattacgtgatgcgttggtggccgcccgaaattcgaacgaaacattaaaacagcaaataatggatgctggtgaactacagtctggtcttgccatggctcgcgcctgggaaattcggcgaccaagccgtttatggcaaaaggccgaagaggtcttgatgcttatcgaggtgtctcatattcacccaagtaccggggctcgagccgctgcactcattagtcaggcacctatttctcagctcgccccaggcttggtttcagctttgacagagtgtagctgggcgaaagatgttttatctaagtgggaacgggacgaacagattccgaaacctgttaaacgtgcaattgaaaatgcaaggaagatataa

SEQ ID NO: 444853 - DNA, 873 bp, Serratia marcescens
atgggtacctcgacctcaagcgcaggagccggttctggcgcatcatttgatccaccatggctagatgatgctgaaactggcattgactctagccatgcagacaaaccaatatcaccaaatcccgctcccgaagatggctctgatggtgaaaatgacagtgactcggagaatgacaacactacaccgcagcatgtagaaagtccggcgatagcgccagcgggtcgttatcaggaagcacgaagagctctcacgggtttcgtgcaatctggtagtggatctgatttacggcgaggtatttcgagtttcattaaaaaaggtatgggcggctcagtaaaagcggcgagtcgtatgcgcactagcactatagcttctgcttcattagggggctttctggcaacagcccgagatggaactgaccctgatatcgatgcgtgggttgcttcggtaaaacagagaaatctatctgcccatgatactgcgctagaagttgtacaaaagctgctgcccacgggtggaagtattgacgaagagtcagccaagcatgcaatgaatcaggccatctctcatctttatgaagtagatcccactgctgatatcttcaatcttgcggatgaccagattgccaatgtaatggcattcacagtggcgtacgatgtttacaaccgggttcaacttgaactcggaagagtttttgaaaagctaaaatatgtacccagcgtaatacaacagcgattagcacaagtgcttgactacattatggttgttgttaacaaatcgatgggaaaggtacgctctggcagtacttcacattccatgcgagaaattgcgacttcggcgttacaagacgcccttacggtgttctctgaatcatga

SEQ ID NO: 444854 - DNA, 1257 bp, Serratia marcescens
atgaaaattctttgctcaagtatcaattcgctaccccaaaatgtgccagtaggcactcgtgcattcaccttcctagaggcatcatcacgacccggcattggacgcattgcctctggttggctgcgtaagctagaaagtgctggctatgccccatcgatcccagtgtgggatttcatgcttttttgttttgctgtttatgcctcagatattgctgttcttcgcaaaaatagtgctgatggttggactcgccaaattgagctcgatattacacttaatgatccagttccttgggaagcaaataaagctattgcagaggaaatgcttcgagttctttctggtgacttttggacgctgcacttcctgcctggcggcccaacaccaccaaaaggcaatcacagggagtgcgaccgagattgcgtgtctctactttctggaggccttgatagcctgataggtggcatagatgcaacagcagcagggcgcaaaccaatttttgtgtcacaacttgcttttgaagattctgctcggcaagttgcctatgctgatgcactaggtggaggcgactggcatcaacagtggagtcataaagtcgtttttagtggtaaaaaagaaacatcgaccagagctcgctcaatggcgttctatggccttgctgtgctcgctacatcattgttgtcggtcaacagagccgaaatattggtgccagaaaatggattcataagtatcaatcctccattgcttccgggaaggatggctagcctcagcacaagaacaacacatccacagttcatgactttccttcaaaaattacttgatgtcgttggcgtcaatgcccaattgtgtatgccctatcggttcatgacgaagggagagatgttggcacagtgtgcagatcaaacactgctagcaagatttgcatgtgattcgacaagttgcggtcgtttccgtacctacaaccgaacacactgcggtcgatgcgtgccatgtatggttcgtaaagctgcgattcagcgctggggtatttctgatacgacaagatataaattcaccaatctgtcgttggcaggaaaagcaaatgctgacgatccaatggcagtggcttgtgctgtactcgccgccgaaaaaaaagggattgatgccttcctaggggccacactagcctttgcgtcagctgcggatcgtcctcattatcgtcacgttgctgaacagggtttagctgagttagctacattgcttcgaagggacggaataatttga

SEQ ID NO: 444855 - DNA, 735 bp, Serratia marcescens
atggatttccactgccacttagatctttatccggatgccaagaaagtctacatcgaagctttgaagcgaaccgaatttgtatggctggttacaactagtccaagagcatacgcagcaacctcgaaagttctggccaccactcagaaatgtttcatttccccaggtctccaccctgagatagcagataaaaaacatagcgaattggaaatgttgctatcacaaatggaggattgcactggtattggcgaaattggtctggatggctcagcacggtacaggcagtactttgaacttcaaaagaatatatttaaaaccattgtagaaaactgcgcaaaactaggcggacgagttctcagtattcattctagggctgctgccaaagaagttttagatattcttgatgcgaacacggggtttggcacagcggttctccactggttcaccgactctccttccttgcttcaacgagcagtcgaagccggttgttggttcagtgttggaccaacaatgatggagtctgctaatggacgaaagctgacagcactaatgccacgtgatcgagtagtccctgagagcgatgggccatttgcgaagatgcatggtgtgcatgtgatgccctgggaggcaaatactgtggcaattaaactcgccgagacatggggtatatcgcaagatgaagcatcgtttttactgaaatcaaatggcttacgtctaatgggactgctaaggatctaa

SEQ ID NO: 444856 - DNA, 1287 bp, Serratia marcescens
atgaacatcataacctctgtttatgtcaaaggattatggggtcatcaagatataaactttctaatagatagcaaaacaaacttcataattggagtaaatggtaccggtaaaacaacgctaataaacttactcgctgcggcactgacttttgattacgagaaacttttaagaatagagttcgaaagcataacaattagattaaaagaagttggtggttcacgtagaccaagcattcgtgtagtgaaagatatatcaatatcagacgatgttttaacttatgaaattcaaagagcagcaaaagatacacctacagtcattccatttgatgtaagatatgaaagattatttatagaaacaaaagatggaggtagagttgtaagcagaagaagagtcaatcaagaagtacacacatcaaatgaaataattatacttttaaaagaattaatcaaggtttcatggttgtcagttaatagagctgataatttatacaatagagacattgaaaaaagaacactatcaacaatagatcataagatcaatgaattaaataataatcttgttcgttatttctcggttttatcacagcaattttctgatcatactattgagtttcagaaaaaaagcttcctcgcacttattaataatgaaggggcaaatccaatatttcaattttcaagctcaatagatattgatcaagagcgtaaaaccttagtagaagtgttcgatgttttaggtgtagaaaacaaacattatgtgaagaaattgaatgagcatttttcccgcttagagaaggtcaaaagcaggactaatacaaaagctatttccgcagaggatttttctgttatttacaactcttggagagcacatactttagttgcagattacgaaatcttacaagcaaaaaaatcggacattttcagaccaagagataatttcatttctttactcaactctatgtttaatggacggaaaaaattctctgtttctgacaagaatgaacttgtagtgatgaccaaagatggaagagtcatcggtcttgatgagttatcatcaggtgaaaaacaattacttattatacttggtgaaacattactgcaacattctggccatgtgatatatattgctgatgagcctgagttatctttacatgttatatggcaagagcaactaattggagccataacaaaaatcaacccaaatgcgcagattattttcgccacccactcccctgatattgtaggtgttgaacaagacgctataattgacatggaggaacttgtttcatga

SEQ ID NO: 444857 - DNA, 897 bp, Serratia marcescens
atgacttttacaaggacggtaagtggactgaaaagctacagtcgattctacaaagttgaagctattgcctatatagaaggccgaattttagaacaacaaatgagtgcggaaaataatgataacttaaaagtatttgatgttattttctatagttctttattcaaggttttctcaccacataataatattaagattaagattgttggctgtaaagaaaacgtattagattatcatgaaaagattgttaatgagaaaatagaaaactcttttgccataatagaccgtgactatgatggtgtctatttcacacgcactcaaaacgacaaactaatcgtcactcatggatatagttgggaaaatgatttctggacatctaaactttgtttagaaactgtgagcctgctaagtttagatgctatccatgcttgtgatatcgttcgaaataaaatcaaacggtcaattaaaagattgtgcctcattaatagagcaaatttagcgtctcaatattttggtaatggcattttccctattagcaaaaaaggtggggagaaaggatttagatatgatgtcagttctaactatccgctatcaattagtgaagtaaagcggttattcaataaaatcccggaagagattaagttagatccaaaatttaaagaaattattctctcaacaaaactcgattttaatttcctaatccaaggtcatttcttcgagcatatgatattgcaaatattatgttacgcatacaaaatatcctccgacattgcacataacatgactgatgttaacataattaaaaatttggcatttaataatttcaaattaaagcctgactattatttagaaccttcaaccttagctcattacgagcaacagttttctagggttctttaa

SEQ ID NO: 444858 - DNA, 153 bp, Serratia marcescens
atgtatcgactttatacctatctctgcgacattcacgcacagccttctcaggtgcacataaccaataaaatggtaagtatcaaacgcttcctagacgacaaaacgtcattgaagaacgtgagatattctacgagttcagtagcggagcaatga

SEQ ID NO: 444859 - DNA, 894 bp, Serratia marcescens
atgaaaattaaaaataaagcagcaatagcctattctctgataattctattttttgctgtaatatactatttgacttggtcagcttacccagactcattcataaaaaataacgccctgaactccactcccattcacaatgctataaacttagcgttttcgtacaatggtgaaacgcatgaagattatgataatatttcaaacgaagatttttccaaagagacattgaaagcaaaaaaagaatttgacagaatagttaatcaaaatattaaacttgaaagtgtactatcccaccaagaatcaaaactaaaattaataaatgaaaatctgtcaaaagcatgggctagaaatacgcaggcgtatgtggatgaagtgtccctaaaacatcacaaggagctgaatattaaagaaaatgaacttaaggctatattgtcacaggataataaaattcaaaagagccagcttaatatcatgctggctgataaaaatttagaaatatcggaagtcaaactcaagatggcaatttcagaacgtgatgctttagaatatgttttgtcacatgttggtgacttccatgatctaaagctcgcctccgaattagatgccaccaatagcataatagatgacacaagatctaaattaattgcaaacaacaaagaaataataaaaataaaaaataatgtacaagacttgttgggtagacgtcaaaaggaagatctcaatttttgggatttcgttttttacagcattggaatatcaacaacgactacatttggtgatttagtagctaactcaagattaatcagaatgttagtttgcatacaactgttgtcatctattttggttttagccaacgtaactcaaagtttcttgtcaaaaaataaaaattcactatga

SEQ ID NO: 444860 - DNA, 777 bp, Serratia marcescens
atggaaatattctttaaatcgtatcagactgatgcctgttgcttatgcgggtctagtggttctctcaccggagagcacaaaataaaagcttcggcgttgagaaacatttttggaagcaatgcaatggtcattggaaattttgatgatggtggtattcttcgtgcagcacaaggccctaagtctaaggctttccacttttcggtacgaatgtgctctttatgcaatggctcacgcacacagcctgcagatcaggaatttgatcgatttcacactttagtgtcatcgcttttatcggaaagcagggatccttccgaggtgtttaatatgccacagtataattttgactcaaaagcttacctcaatgtgtttagatatttttccaaaattttatgctgccaaattgcagaagcaggcggccctcgcccattagaagcttgcgaatttgctatagggaaaacaagcaggaatattatttttctacacattgatatagatccaatctaccagacttatcgagatacatatggagaacatggttttgcaaaacatggaggacttattgtctcttttgactcaaaaacacacaacccaacatgtttccagagctcgttaagtttgggtgcagtgagatatcttttttgggttagatttgatgcacttgttggaattgagttacgtacatcccatcatgaattttggctcaaatgtgaggcagcgtatcaagaggctataaaaaatccactatcggatgaacagcgatatcgcttaggtatttaa

SEQ ID NO: 444861 - DNA, 1350 bp, Serratia marcescens
atggctaagtataaagcgtatccggagtataaggattctggggttcagtctgttggcatcattccacatcaatggtctgtactcaaacttaaatatatttttgagataaagaaaagaatcgcgggtgcgatagattatgatgttttgtctgtcacccaaaaagggataaagataaaggatattgagagcggtgaaggtcagctgtctatggattactcaaaatatcaaagagtatatcctggtgattttgccatgaatcatatggatttattaacaggttatgttgatatttctaactatgatggtgtgactagcccagactatcgtgttttctctgtacgagatatacgtgagttttacagccgttattatctttatttactgcaagatggttataagcaacgccgtttctttcacctcggacaaggaagtgctcatttaggtcgctggcgtttacctactgaagcatttaatgaaattcaatacccttgtccttctttggaagaacaactacaaatagcgactttcctcgatcacgaaaccgcaaaaatcgataagctgatcgagaagcaacagcaactgattgaactgctgaaagaaaaacgtcaggcagtgattagccatgccgtcaccaaagggctaaatcctgatgtgccgatgaaagattctggtgttgagtggttgggggaaatacctagccattgggaaatgaaacgattagcttatcttggtagtgcaagaaatggactaacttattctccagagagcataactgaccaagagtcaggtactttggtgttaaggtcatcaaatattcaaaactcgagtctttgctttgatgataatgtttatgttaatagtagcatccctgaacaatttttagtaaaagaaaatgatttgcttatctgctcgagaaatggcagtcgcaatttaataggtaaaaatgctcttattagcaaagatgccgcaggaatggcatttggtgctttcatggcgatatttagaagccaaattaacacctacattttttgggttttaaattccccactgtttgattatcagtctggatcttttttgacttcaactattaaccagttaactataggtaatcttaatagtatgaaggttcctgttcccacattcaaagagcaaaaagagatagtgcgttatctctctaaaaaaaataatgattttatcgaattgattagtaaggtaaataatagcattgccttactccaagagcgccgtaccgcccttatctccgccgccgtcaccggtaaaatcgacgtacgcgactgggttgcacctgatatgcaagacgctgaggagccacaggagaccaccacatga

SEQ ID NO: 444862 - DNA, 819 bp, Serratia marcescens
atggggtacaaatacaaagcgacgatgtactactctgatgaggatacagagcactttcttgcggaaaaatccactaagccaaatggcaagaaaagtgcctcgcactatctttatgctttagtgagcagagaaagggcaagatcaggtaacgcagatatcgctaaaggtgaatccgaagtcatcaaactgtatcccgagtttatggacgggaagcgaattgacattagtggcggggttgctttttcttctctaatgaccgccagacttggcggccctaaaaaagctgaacaacgactaaaaacaaagatgctcatgaaggagattgacaaggttattattgtacaatttatttctggaagttttctgcaaccaaagattgtaggtaatgaaatagatcataatggctttacgatcatcctgaaaactgaagtgacctgctattatcatgaagaggaagattcaggtgattattgccaggggctctttacagctaaatgcttaatccttcacatcactaaatcagcatgggaacggcgaggtggcaagtatgactttgaaaatataaagtactttaaatatgaagatctcgcaaaagttgataaaaagatgcctagggggctctgtaaaatcgctgagctgtctcccaaagataagactggggcgttctttattcctgtgcgcacaacgtcaaaagcctttccatcagatagcgcactaattaattccctctctattcgtggggtggatatttccttcaataaggacagagtgaaactgaaagccatgaatgcaacgcagaggaaaaggcattttggatga

SEQ ID NO: 444863 - DNA, 621 bp, Serratia marcescens
atgacaaaaaacacctctgagacccataacctccattacctttttcgattccgtagcacgctgaacaatgccctgataacacacccgagaacctttgccgtccgtgtagacctgcgttttccggatggttattgcgttgatgccaacaaagccattgaagcctttacaccggccatcaggtctcgcctcaccgcggtgttcaaacggagaaagaaaaagaaccctggtaagcaagtccatagttcagatctgcatttcatttgggtgagagagaacaatcagtgcggggcaaagatccactatcacgcgctgctgatgtttaaccgagatgccttctggcagctaggggagtatcagaaaaaggggaacctggcagacctgattactcaggcatggttaagtgcgctgaagctgaaaggtgatgaataccgtactctggcctcgtttccggaaaacccgtgttatcacttgttcagagcaaagctgggagccacggatgactgtcaggcggttcttcatcgcattgattacatggccaaacaccgaaccaagcagtacagcagcaagatacgtacgttgggatgttcagtctctgcacaagggattttagatgaggactaa

SEQ ID NO: 444864 - DNA, 3519 bp, Serratia marcescens
atgccaacaacgtctgaagacataatcgcagatattaatgaggcgtcaacagcgggatttcgcggacgtcttatcgctcgtgggcaggccagagcaattatttggcgtgatggcacattgccgcctgatgcccctgaattctcaactcagctcagccacgaactgcattcctatgcttatgtgttgatcgggctcggccttcggcttcgtgaactgggcggtgatgcttcaaaggcgcgtatcgcctttgaacaggcagctacagctcttgaggctgtcattgctaagggcaatagagaggatgttgatcgtgacttccactttgtcatggcagctgcgagttatcatctcgcacacctatctgctcgtgcttattcactgctaactattgtcgaaaacgatgataatttctcgccgatagagcgggtcattgctcgattgatacggagagattttggtacgcttcgtgccagtgtacttagttatcgtgccaacgatgaaggtagcgatgagtacattaccgcttctattcaagccagcctcgacgagattgatagtggagatgattttgctgggtctggaaacgactttctttttggtggtcttgatacggcactgactgatgcctttatggcggcaacatctctttttcttctggcagtggaacgcggtgagaggccattgctcgctcaggcaattacgcgactcagggagagtctcacaatttgtggtgaattgaacatgttgccgcaatggtgggtgcatattatcgcaatccacctcatgtcggacctctggtcgactactttccatgagaggctaccacttctgtcggaggggggagaggcacctgagtggcccaagcttcgagaattgttcattgcattgctccagagtcgccacaaagctgagattgacctttggccgtcgcagatagaagctgcggcccgtgctgttaaccaatctgatgatttggtcgtgtccctgcctacaagtgctggcaaaacacgcatcgctgaactgtgcatattgcggtgtctagcaggtggtaagcgggttgtattcatcacacctctacgtgctctatcagcgcaaaccgagaccacgttattgaggtcattcggcccgcttggtaaaacgatctcagcactttacggcagtatcggcgttagcggcttcgacgaggacgcgctcagggagagggatatcgtggtggcaacaccagagaaactcgacttcgcgttgcgcaatgatccaacactgcttaatgacgttggtctacttatctttgatgaaggacacatgatcggacttaatgagcgtgaggttcgatacgaggtccagattcagcgcctcctccgacgaccagacgcagatgaacgacggattgtgtgcctttcggccatcttacctgatggcgagcagcttgacgattttgcagcatggctacgtcgtgaccaacctggtggcgtggtcaaaaaggattggcgtcctacacgtttgcggtttggggaagtagtttggacttctcctactgcgcggctaaatctccgtgttggagatgaacgtccttgggtacagcggtttctcacgggtacagcaccgccaagctgggttcctccaaagaggcgtcggacgcgtgtttttcccgataatcaacgtgaactctgtttggcgactgcgtggaggttgattgaggatgggcaaactgtcctgattttctgcccacaacgtcgaagtgtcgaaccttacgctgaggtaatcgttgatcttcatgagcggggggccctacgttctctgttagatgttgatcctatcgtcctgaatacagccatcacgcttggtgaggaatggctgggagcgaatagcacgatcctcaaatgccttcgtttgggggtagccttacatcatggagccctccctacagcctaccgtaaagaggttgagcgactcttacgcgataatgtacttaaagtgacgatttcgtcaccaacgctggcacagggacttaacttatcagctaccgctattgtcatgcattctcttcatcgccatggtgaagttatcgaagtctccgagtttaagaatgttattgggcgagctggccgggcttatgtcgatgttgaaggcatcgttctttttcctatattcgacaagatcgcgtggcggcaaagtcagtgggaagctctcatcaccgatcttggcgcgcggcaaatggagagtggattgatacagttagtttcgacacttttgttgcgtatgcatgcccgtataggtggtgatatcaatgagctcactgaatatgtaatcaacaatgcggcagcttggatattcccagaggtcgaaaacgaaaaacctgaagaacaagagcgtgctcgtactgattgggagcaacatgttgcaacgcttgatacggcgatccttagtcttcttggagaaaatgatgtccccgatgaggctattgaggatgccctggacggtattctccaatcctcactttggcagcgccgtctactgcgtcataacgaacaggagcagcaagtcctcaaagcggggttagtctctcgaagtcggtttatatggagtaactcaacagcgatacttcgacgtggttactttctggctggggtggggcttgcaaccggtcatgcgttagacgctattgcggtgaacgttaacctgcttttactcgaagctaataacgcgatcctccatgatgatgttgaggaggcgatcaccactataacggccctagccgaacaggtttttgctttccatccctttaagccagacattcttcccgatagctggcgagacatcttgcgagcttggctcctcgggcaacctttggccggtatagccgccggacaggaatcggagatgttgcggtttatcgaggggggactggtttatcgtttaccttgggctatggaagccatccgagttcgcgccgcggctaacggcgatgtggttggagagttaggtttgcaactagatgactatgaactcggtcaagcggtgctctccgtcgaaactggcacgcttaatcgttcggcctcgatactcattcaagcgggtttcaattcaaggctagccgcgatcaaggctgtaaccgataccggtgccacttttcataacggtcgcgagcttcgacaatggctcaattctgcaattgttgcaggatggagtgtacagccgaattggccaacggctgaaaccaaaacaatatggactgattttgtgcaaagttttaccccaacagaaaaccgtacttgggaagagcgtagatactgggcaaacgtagcttggctcgatgttccaccgccgccggggacgccactgcaaatttatcatggtgtgggacagccacgtgttttggctgctgatggcaagcctcttggttctataccggcagcactcaatcccgcgagaagcgggttgttgcgtgcccaagtggctcaagacgtcacacggatcgaccttacttacttaggacctacagatttattgcagatataa

SEQ ID NO: 444865 - DNA, 780 bp, Serratia marcescens
gtggtgcaattcaatgattggtgcgactcggctgataatcctgttggacaacactttctccgtgtgatgacaggccgtgcggcaaacctcgctgttggtgttcaggcaacagctgcagctattccggtacactacgcatctgaagaacacgtggctcgagcacttcgacgcttgggaaagctagctgctgcaacattgatagagaacaagcttcctacaacaaagaatattcgttcgggagatcttggtgaaatctttgctacggaatggatcgatgcccaaagcggtggctatcatgcaccgatcaaacggttacgctggaaagatcatcgcaacatggcgatgcgtggtgaagatgtgattggcatttttcaagatccgcaaacacatcggttaaaatttttaaaaactgaggccaaaagccgagcgactttgacggcacaggttgtaacagaagcccgagcgaatttagacaaagatggtggacttccctctgggcacgcgctctcattcatttctgcacgtctgcttgagctaggcaatgtccctctagctgatgcaattgatgacgctttgcttaaatacggcattcctgcagctagtgtccagcaccttcttttcacgttctctggtaattcaccagtgactatgctgacagcctcgcttcaagcttatcctggtgcatttaatcaatacggtattggcctgcgggttgaaggtcatgctgattttatcggcgctatctatgagcaggtgattacaaatgccaacaacgtctga

SEQ ID NO: 444866 - DNA, 1362 bp, Serratia marcescens
atgaatattttggctttgaaagagctgctacggcctgtggtgggaagtttgaaggatcactgtgtaaacaccaaaatccctgagttctgttgtagtcttggcctacctatacctgaggaaggtggctccaagcgtgaaagaatgcttgcagctttcgatgcgctgaatgactccgatattccgaagtttgcgcagacgcttttggagcgacgaattctcaatattgtggtgcgtaaccagacccaagatctgctatgggacgacgagcccgagatcgaaataccaaagcggtatcgtcgagagttagcaagggctctgcagccatttgagctctttcaccactgggatcacttcaagttcttgctacaagaaatctttatcatccccgatgatttaagtgcgcttttattgggaagcgatacgggcattttggcagagatccaccggcattttgtacgaaatcctgaggatgccgacgtcgagtggttatttgagaaactacaggtattcgatctctccgaaccgcgttttcgccggtggcttgagggattggtctcatctgatgtacagatagatgttgaggcgcagtctgtcttggttacggctatgaatgtggtgttgagaacatgtggtgctgaaatgcgtcatgtgtccgatctaggaggttatccagtctttgctcttgtactcttacgggcagcccgtggccgtcctaagaacattatttttgcatctatcaccaagcctgacattcggcttagtaactcgatggagaatgatattgagatactttctagtccggatgatgtgctggtttacgacaagcccctgggtagtgatgggttgcgctggcgtgaactccaatcgtggtgggcagagctaaaacaggaggaggatctcttatgtgccaaaaggactctctaccgacgtttgcaacagagtttacctctttcatcaccgcctcagcagatgttattcgaatcatactttcgtagttttggtccggcaattcacgacttaccagcgctgttaccggaggtttggttacattgggatccgaagactgtttccgaacgaggagcccaggcgttgcttaatcatcggatggactttctcatgctattgcctgctggcggtcgggcggtaatagaagtcgatgggattcaacattactcggatgatatgcagcgggcgaacacgcgtaagtatgctcaattggtcgcgggtgatcgtgagttgaaactagcaggatacgacgtctatcgctttggtggtgccgagcttcagggagaagatgccccatccaaaataaaagctttttttgttgcgttgttgatgcgtcatgggatcaaagttaattga

SEQ ID NO: 444867 - DNA, 282 bp, Serratia marcescens
atgactaacacatatcatcgcgtgggtaacggaccccaccccgttctcgttcttcacggttggttcggtgacgcgcactcgttcgaagagatcgaaccctggttgaatgtccacgtgttcaactatgtgttcatggattatcgcggctacggaggtatgcaggaagcgcgcggcgcatacacgattgatgagattacctccgatgcgctggcgcttatcgacgctctcggctttcacgacttcagcctgataggtcattcgatggggggggatggtgattga

SEQ ID NO: 444868 - DNA, 279 bp, Serratia marcescens
atgttggatttttcttatttatctgatactgatggcagtaaaccatcagtaatactcaacgataaaaaagttcagttaatagaaagttccttgttgtacctaaaaggaaaaacgggtgtatacgtagatccatatgggaaaacaagaatctatccggatcatcaaaaaatattaatcagtcatttgttggataataaagatgaagatataaagaagttagtgagtctttttatcgaggcagtctctttggacgaagtcataatcgctgatggtgactaa

SEQ ID NO: 444869 - DNA, 1902 bp, Serratia marcescens
atggccatattatcaacattaattactgagtcgttactatctggtatttttaaaacgatcggtagtactatagctgattccggggttaggttaactaagttaaagggaaataagataattgaagcttttagtaataaaaaaatcgctgatgactatctaaaaagcgcagttcataaaatattcgtttttaggactataactaaaggtgatagggatgtgtatcttgatgaaatatactatccacttagattacgtaaagggcttggtaaggatagaaagaaagttgctaaaattagtattggtgataatgctaaaatagatagtgatggatgtagtgttatcgcagggttggcggggcagggaaaaacaactatcatgagaaagttgtttttagaagagttagtaagaaaagaaaggcttcctttctttataacccttagacaatatgactatcagaagaatggctgtgaggatatacttcttgaacacttgatttcaaatggagtcgattgtgatcgtagtgatgtggtggggattttaaagacaaaaagagtcattctattttgggatggttttgatgagattgtttctactcaaagaaataaagcacttagtatgattagttctgtttatgaccgatatggctgttcttctgtcgtaacaacaagacctgatactgagataactagacaacctggaataaatatttataccgttgattatttaacaccggaagatgttagtagaatggtgatcaaaattgttaataataaagacgctagtgactctattttatcagttcttaaaaataaaagattcttgcgacacacaattaagacgccgatacttgttgatgttttgatagtgacatcgtcctctctgggggataatccaaactcaataggtgactattataatcacttattttctgcgctaatgttcaggcatgatttaaataaaaactacaatagagagaaaaagtcacttctcagtaataaaactctagaagagtgctttagtttttttagtttctttagtttgattgagtcaaatagtgatttcacactagatactatgcagttttattttaaaagagctaaagatgcaaaaaaaataaaaacaaacgaagaatgtatatgcacagacatagttgacgggactaatttaatagttagagatgggtacgataattatgtgtatatacatcgttctattcaggagtattttgcagctaaatgtatatcacaattcaatcctgagcaaaaaaaattgtttcttgataagtatgcgaaattggatattagacgcaagcaaaccaatatgctgattatgttgagctatatcgaaccggtgtgtttctataagttatacttaattcctcttttggaaaggaataatgtcatactggaaaacaagctggtctataagagcaaagaggaaatcgagcaattaattgatgagtggatgattggatttaatgaagatataacggatattgatgcgtttagttcattcaatgacggtaatgatagcgtatcgtccttttttagaggtttttttcaagctgcacaactaaaaggtattgaagtagatgatgaacttccaagtttttatattatgagtaattctgcagagctgatagttaaatatgttaaagaaaatggttcaaagctttttttaagaggtgtaaataaaagaataataattgacgaaatgaaatgggtgaaggtctctgatataaagcatattattcaagggtttgatgagaatgtagtaactccatattatgagtcatatttagaagcagccggcaaattgcaaggaattataaatgaagagtacataaaagagatcgaaagtgattcggttttaaaggggatgctaagtgatatgggatattga

SEQ ID NO: 444870 - DNA, 699 bp, Serratia marcescens
atgtgcgccctcaaggaagagaagggaagcgtgttcgcaaaaaaatttaagacgaaatctgaagcgcagcagttcgagcgttggattatcgcgacgcagaacaacaaagagtggcttgataagcctgctgatcatcgaccattaaccgacctgatcgacctgtggtggagccatcatggccagcacctgaaagacggagtgaagagagcgcagaaattgcgcgtcatggcggagaaaatggggctacccggtgatcacctgaaagctgtccgtctttgcctggcgacgggcgcccgctgtggtgaagtggcgaagctgcgaaaggaagaggtgatcggtaacaaggtcacctacctgaacaccaaaaacaacaagaaccggacggtgccgatctcgcccgaactctgcaaagagatcaccagcggcgtgaagtcggggccgctgtttaacgatctgaactacccctatgtgcggctgcgcgtgaaggaagtcgctcccggcctgccggcaggacaagcggtgcatgtgctgcggcatacgttcgccagccatttcatgatgaacggaggaaacattctggcgctgcagcgaattttagggcattcaagtattttacaaacgatggtttatgcgcattttgcgtcggactatttggaagatgccgtaaggtttaatcctctaataaaatttaatatctag

SEQ ID NO: 444871 - DNA, 510 bp, Serratia marcescens; identical to SEQ ID NO: 289459

SEQ ID NO: 444872 - DNA, 279 bp, Serratia marcescens; identical to SEQ ID NO: 332577

SEQ ID NO: 444873 - DNA, 2067 bp, Serratia marcescens; identical to SEQ ID NO: 291767

SEQ ID NO: 444874 - DNA, 210 bp, Serratia marcescens; identical to SEQ ID NO: 291768

SEQ ID NO: 444875 - DNA, 297 bp, Serratia marcescens; identical to SEQ ID NO: 291771

SEQ ID NO: 444876 - DNA, 576 bp, Serratia marcescens
atgaccgccgtttccactggcgccaacaccactggaaaggcaccgcgtcctcgctcgcgcctgcgcgctcgcatcgtgctcgcgggcttcgccgcctgcggcctcgctgcgctcgcctgggcgtccttcgtgcatccgatgccgcgcctgatctacaacccgtccgacagcgttccggtgggctggtatcgcatcgcaccacccgatgcgccgcgcgtcggctccatcgtgctgaccacgctgccgccagacgccgccgcgctggccgcgcagcgcggctacctgccggcgcgcgtgccgttgctcaagcgcgtgggtgccgtcgcgccgcaggaggtgtgcatcgctggcggcatcgtccgcatcgacggcgtgcctttggccgccgcgctgctcgccgaccgctggggccgcccgctgccatcctggcagcagtgccgccgccttgaacccggcgagcttttcctgttgagcgtgaccaacacgtcgtcgttcgacagccggtatttcgggccggttgccgcatccgccgtgatcggcgtcgcgcacccggtctggctggagaagcgcccatga

SEQ ID NO: 444877 - DNA, 2433 bp, Serratia marcescens
atgtcggtacctaaccagaccccatacaacatttacacggccaacggcctgacaactgttttcccctatgagttttacctgctgaatgccggtgatttggctgtgtcgcttaacggttcagtgatcacctccggctatacgatctccggcgttggtaacgttgatggcggtgaggttctattccttcccccgccggtgaacggcgttaccgttatgcttgagcgcgtgatccctacctaccgcctgaccgactatcaggacaacggcgatctgctggcagataccgtaaacaaggatttcgatcggctgtggatggccattcagcaggcgtttatctatctcggcctggcgctgacgcgcccgctgctcggtggcccattcaatgcaaaggggtaccggattgagaacctcggagagcccttaaacaagggagacgcagcgacaaagcgctatgttgacaacagcaaggcggagggtaatcagtacgccgatagcttattcaggcgcgcgctgcgggtgcctgaaacgcagataggacagctgccgacagttgctgggcgtcgaaacaaaatattggggtttaacaatgcaggtgaagctgcgctgcttcttcctgaaaatggctctgcgtctgacgtcatgctgcagctcgctgctactgatgggtttaaaaatatcggtcaggtgcagagtttttctgccctgcgggagctggctccaacctctgataaatgccgagttttgttatccagttggaacgacggttattcagtcggcggcggtgagtttgaagggcaccttgttccggccattgatgacggcggtgttattgccagctctgggaataattggcactggagacgagtaagaccaattgagggggatttgacaatcgagcatttcggcggcgttgctgatggcgtttttgataatcatgatgctattgttgctatgtatttgtacgctcgcgacagaaataataatgggtttttcaagccatggatcggggtaaacctcccagctggtaacgtatttactacgccggtagatttgacgggcatgcccgccgagcaatttattttacgcggtcctgaggtacaatttggttaccacccaacagccgcaattacgtctaatatggctaacggctctattgtgtttaaaacctcatcgaggtctattgagctggcaaatttgcagtttgatggcaggaataatgtgacacagaacactcaatcgtttattagaaatactataaccggtggtacgttcatccgggtttctcagcaacgatggttaaatgtgggtgggactgttttagattttactgatacgctcgacactaaaatagagcagtggtatgcgaacggatgcgtaggtgacgtaattaaattgtcgtgggataatgcccccacatgggaccacgtaaccgctgttgaactgtcaaacttcaatgcgcaaaattgcagaccggggatggtttttaatatgcctcgcgctctacagtccgtaatccataatgggtggattgagcgatcaaatccgggcgatttaagcaacgggcaatggataatcgatgcactgtcactagaagcatgccaaacctatggggatctcaacctgacaaattgtcgttatcagtcacggcagctaaatctggtaggctctcgtgttaaaagaacatatgaccagaatacggcctggacaacttctttccagcctgggagctcagtgattgagaattttggtgcgggtttttatggctcaatgcaattcggctatcaagattccgcatatatttacccgaacatgacgtcaaatgcagtatgggttaacttaggtaaaatgtatttgccgaatgactctgacgttttttatattactctcaacggtcagcaggggtttaacgcgcctaatccaaattctcacgacacgtattcaaatgctgcgtttgggcgatgcattatagctatacagcggggtgctagcggtgtaatgggcgggacatatcacagctacggccgaccccccgctcttgatgtgaaaatactccgcagcttcggcggcgcgacggtatgggctcttattgacacattcacgcgcgtcaatatgacatgtgaaaccaattccaactcatcgatcacgctaggttggggagagtcaggaaaatcttattcagtagcaaactggcaaccgagtatgaccgcatcatcacccagcgcgagtgctgtatcgataatttctcgatggggggtaaatgccggtacccctggaactcttggtgggttaggaatttctgcagatggtgccttagagattaggtcacccggcattccatcaggggcaacagttgaccctgatgtttctaaatacgctccggtgtggctgaacggggaattatattccattaaactattcaaggtacagatatga

SEQ ID NO: 444878 - DNA, 690 bp, Serratia marcescens
atgatgaatgaaccaaagtgcaagatcgcagtccaggacgattctgtagttcgactggcccagttgggcatcgagcaggaagatgttcataaggcaattacaagtgctctttatgagcgtcgtagaaccagcaagctgcaccccgtcattgacggcggctttaggttttggagtcagctggttgcggcattacgtggtgagttgattgcaaaagatcttggttggtcttcttctcgacaaaatcgcatggagctaatccataactcaaagcaaggcattaacctggtaatcactgcaggcgataaagatactggcaaagctgatgggtggccaaaaacaaaaaatgcgaaaggcgaagccactatgagcatcgttaatagcaactctgaaacccttgagttattccccgttgagtcatctattttttcaactgatgggcttcagcttgtagctgagcctgctgcagatacaacgcagaattatattgttctctattattatgatagtggaaataaagaagttcgttgtgaggtttccttaccgataggcatgtcggttgttaatgggtttgcgagagtaaatacctggggtgagcgaattattttggctccagtaccgttcgatggtggtgaaattattcttgatgaagatttcattgaagacatagatattgacgtagtaagaatatga

SEQ ID NO: 444879 - DNA, 225 bp, Serratia marcescens
atgctgagaacgacagaaagcatcacatggcgcaacggattccgcatcaacggtgcgccagcggcgattgaagaggtcgagccaattttcgaggggcgccgggaggcagcgctctcgctgtgggaacaatacgagcagggcaaggccgcgctgcgtgaagaaaacttatcgccggagcagtaccaggacgcgtgccgccagcttgcagactcgctggggatctga

SEQ ID NO: 444880 - DNA, 231 bp, Serratia marcescens
atgcgaccagaagaatttattcacaaacatgtcgttgctgagctgctgaaagatggctacagcgaagcggcggcgcaggggggggcaagcgaggccgtagaccactaccgccgagcctcaaaggcttcttcccgtcaggggatctttgccgactgcctgcaccacgccaaaacattcgtcaaatacggcaagcggaacaaaacccgctctgccaaaggccaacttttttga

SEQ ID NO: 444881 - DNA, 288 bp, Serratia marcescens
atggatattcagagacttttagaagcaattgcagacgttaccgaagggttagaccgtgctaagcgcatcgttgaaatctgcgatggcgatgttcacaaggtgatgatttttgctgatccagtctgtggcatggactgccgcttatcagttgggaaacacctcatccgcgaattggcgctgaatgaacagcagaggtatgaagcgcaactagcaaccctcaaagaggcaaaaattatcgccgagcgcgttattgccggcctgttgcctgataaccaaatcagcgcctga

SEQ ID NO: 444882 - DNA, 2220 bp, Serratia marcescens
atggaacgtagaaatttgttaaaaggattgctgtcattcttgactgggggcgttgtcacgtctgttgcatgggaaaagtatggtggtgctgcatctataatgacgcctaaggttgataatgactcagataagctgcttgaactccctcgtttctttagtgatacgccaaatgggaaagtttatattggaaaaaaatattccgaccctattattaaaaaaaaccagattaaagtgtatttaataaatgaaaaaggtgtaattactcctgtagtacaaccaatatcattaaattctgaagggtatacgatttataatggggagactgtaggtttagtaacagttgaaagatactcgatggcggtttacgatgctttaaatactcagaaattttactatccaaatgtacttaaatatgaatctgatatattacgcacaaaccttaacgatccacaaggattgagtgaaataggtcaggtaggcagttttgctgagttacgtactatgagaccgaaaaaagaaggggcaagagtgagcctcaaggggtggaatctaggaagtactataggttctggtgagtttatagggcgtctaactcctggtgtagatgatggtggagtaatagcaagttctgagcaaaactggcattgggaacgagtgagtcctgttgaggctgaattaaatatcgagcactttggcggtattgcggatggtgtttttaataatcacgatgctattgtttcgatgtatttatatgcacgtgacagaaataataatggtttttttaaaccctggattggtattaatcttccggcaggggttatttatacaacacctgttgatcttgtagggatggcagcggagcagttcatcctgcgaggtcctgaggtacaatttgggtatcatcctacagccacgataaagtccaatatggatgacgggtctgttatttttaaaacctcatcgagatcaattgaactagctaatcttcaaatagatggacagaatgataaaaatcagaatacgcaagcttttataaggaatactatcaccggagggacatttattagggtgtcccagcagcgttggttaaatataggtgggactgtcctcgattttactgatactctggatacaaaaatagaacagtggtatgcaagcgggtgtactggtggtgttattagattatcctgggacggtgcaccaacctgggatcatataacagctgtcgagttgtcaaactttaatgctcaaaactgtaggccgggtatggttttgaatatgccgcgtgcgcttcagtctataattcataacggctggattgagagatctaatccagggaatttgagtgatggacagtggataatcgatgcgttgtcactggaagaatgccaaaagtacggtgatcttgacctgacaaattgtcgctatcagtctcgacagttaaatttggtaggttcgcgagttaagagagtatatgaccagaatacggcatgggtaacttcttttcagcctggaagttcaataattgaaaactttggtgcgagtttttacggctcaatgcaatttggttatcaagattccgcttacatatattctaatgtgacaaaggattcagtttggctaaatttaggtaaaatgtatttacccaatgactctgatgttttttatatcacacttaacgggcagcagggcaatgggacgccttcttctaacgcccatgatacttattctaatgctgcgttcgggcggtgtattattgctatccaacgcggtgctaaaggtgttatggggggaagctatcataactatggtcgcccgcctatcttggaggttaaagtattaaaaagctttggtagtgtgaatgtatgggtaagggtggatgcttttactcgtattaatatgacatgcgagacaaactcaaattcatcaataactacgggctggggagaagcaggaagaagatactcagtaattaactggcaaccatgcatgcttgtttccaatccagatgtaaatgctgtgtccctaatttctcgttggggagttaacgctggaaaccctgatacactgggaggaattggcatctcaagtgatggtgctttagagattcacacccccggagtgcccataggctcaatcgttagttctgaaatttcagaatatgtaccagtttggctgaatggaaaactatatgctttgaaagttttcaaggtcgattaa

SEQ ID NO: 444883 - DNA, 1188 bp, Serratia marcescens
atgccttggcctggggtgacgacgcttgtaccagtggttgctaccgcattgattatatatattaatggtgatagcaatattgcattaaataactttgtcgctcagagagtaggaaggtggtcctattccatatatttatatcattggcctctgttggtattttttggattgcttggctatgagttgtcactgttttggaaaattgtactgcttatagtttcagtgttccttggggcgctttcctataagtatatagagtctggctccatttcaaagtcattatccatcaagtgggtgttgacttccactgtggtgatttccgcagtagggctttccttgtctaaggtaacggttcctgatcgagagacacaatatgtggttgggctagagaaagtaaaaacagattacaatatggatgccaataaatgccttgtaatggacggtgcgatcttccctaagtgcatattggggagtggaaatgaaaatgtagatctgatcgtaattggtgatagccatgctttcgcaacagtgtctgctgtgcttgatgggagaggcaagggaaaatcagtgtttttcatcgcagagtccgggtgtccaactgtacttggtatttcaacaaaagatcgtcgtcaatgcggggaattcgttaaaaatgcttttgatttcatcaataaagaatatccaacggttcctgttttagtgataaatagaacgtcattttatctgcacggggatacaatgaacccatcaaaaggagactttagtttccaagatggaaatgaaacaatcacagaatacggtgaaaggtttaattcatcagtcaaagccatttcaaataaccggtttgtttttatagcaacacctatacctgaatttaactacgatgtccttttcagaatgacaagagatgcaatgattggtattaaccgggatattagaataaccaaggctgactatgaaaaaagaaactcggatgcaaatgatatcatagatattgtttctgaaagaaataagaatgtagtagtgcttgatacaagcaagtatctctgtgataacaattattgctatggagtatccggtaacgttccgctttatcgtgatagtaaccatttatctgaggtaggaaataaaaaactaacgcccatgtttgatgagatgtggggaatggtttttgacagaaatttatag

SEQ ID NO: 444884 - DNA, 714 bp, Serratia marcescens
atggattttagaagagatatcaacgggttaagagcttacgctgttattgttgttttgctttttcacttcaaggtattcccgttttctggcggatttttaggtgttgatgtattttttgtcatatctggatttttaatgactggaattataacatctaaaatggaaaaaggttctttttctattttaggattttattcatcacgctgtagaagaataattccccctttagttgtattgtgtgggttgttactggtattgggcttctttctagtgcccaacgatgagtatatgatgttaagcaaacatgtagcatctagcttattgtttgtatcaaacgttgtatattatttggagtcaggctatttcgatgcggaatcgtcatataagtggcttttacacacttggtcgttgtctgtagaatggcagttctatattatattgccaatagtattaactgcgctccacaaatatctaagaaaatactttaatatcgtaatggtttgtgcggccatagtatcttttgctatcgcgttgtggctatctaaaaatcacgcatcattctcttactttaatcttccttcaagggcgtgggagatgctttctggtggtcttgtatatttatatggaagcaaaaaacatcctgttaaacatagtaaattaataaccaccattcttttgtttgtgatagttattggctcgatgtgctttaattag

SEQ ID NO: 444885 - DNA, 735 bp, Serratia marcescens
atgcgaaacctgttggttacatctgcgcatgtcttcgcaaacaacaaatacggtatctattttaccgaaagcatgaacatgcatcaggcgataatcggtaatatgatgatgatgcacaactggaagaatatctacggcaaaaacactacaatgtacaacgttgcaatttgcaatgctgacattgaaaacgggtattggtatttcggtggtgaagacttttacaatgactgcaatattcacttcgagaaaacaacaaacaaaatacaagatttgcgttttatcaaccttactttagaggatcactggagaactcaaaaatcagtgcagcttgacggagcgcaaaacgattcattttatgcgattgcttttgacggcctgcgggcaagcaatactctgaaaaacgtactactgttaggcgggataactggatgcacaatctctggcgcgaacattggcacgtcatacgacgcaaatataaaactcactggctttattaatggcctgaatattaacggatgcaacttcgacgtagatagaggctctgcgttagaggcagtgggcaatttcgatatttggaatatgtcattatgtgataatacaacaatgaataattgccggaaaaatcctgtagttattaaggccaacaatatccgcaatgcttcgttcagcaataatctgttcagcatcgcgggcgacacgtattacgacaaaacgaagggggcagttgatatttaa

SEQ ID NO: 444886 - DNA, 2064 bp, Serratia marcescens
atggcaacacctgcgtactacaaagatggaataccctatagtgccgatgggcaggtcattatcaccatcactaacggccccccaggtacaacaggaagcataggaaccaaccccaataacccgttccctgtttttgtaccatgggggccaacacatggtggtgggagcatagcgtacgacccaaataaggtgcgcctttttgggttatacgacctgcgccagagccaggctgcaatcaatcagctactggataaggccagaaacgcgtatccacaaaatgcagtgcaagtcagagacgaagctaacgcattacttgctacacttaggaattctggactcatcaataactcagaaattaactcggcggcaaatgcattgcaggatgcggttaattccttgcagatgaatatagatttaaaaaacctggaagaacaaattgttcaacaaaaagaacgggaagcgagtgatgcctttataggttttatgtatgacagtaattcatcgaattttatcaacaaatctgctgcaacaattgattttgtaatatcattaggcggaccaggaaatatcgacgcatggaataaagctgtcccgcctaaaatcaacgcggaaattgagggaaaaaacaagctcgtcacgtaccttgaccgggtaaaaaccattacagaagacgtgacggccaaaagaaatgccctggtggtgataaaagacaggcttgaagctgaagcccgtcgagccgaagaggcccgcaaagcagaggaggcccgtcgagctgaagaggctcgcaaagccgaggaagcccgcaaggctgaagaggctcgcaaagctgaggaagctcgcaaggctgaagcagcacggaaagcgctgttcgccaaagccggcgtactggacgccccggtctatacacccgacaggataaaggcggccaatgccgcgttggccaccgccggggtcatggtactcaaccgtgcgggcggtatggtacaattatcgacatgggtcaacggcgtgatgaccaccgccagtgagctggccggttgggtatccagtgcagtgtggcgcggcgcggtggaagtttcccggattgccacggtcagtgtggtaggcccggcagtcggcgccttcgttgtcggattctggccggggaaagccggtgaggggagcgaccgggttcctgggcgcgacattgagatgtttgctgcgcaggctcaactgtttgcggcaggaaatgtcagcattgcccctgaaatgaccacggtcgatttgccggtgcgcgggtttattcgccgggggaatagcggtcagcaagaggtaatactggtcaaaacaggaacgggcggggtctccgctaccgtgccggtgtatcgaccggttcgcgatgaaaaaaccggcctggaccggataaccttgccggcggttgccggtgcgccggggcgaaccattttgataaacccgggcaccgccccgtcgggtccgtggcataccggcaatcctgcgcctgcagcgccggtaacgccggtgcataccggtacggagataaagcaggccgacagtatcgtcacgacgacgttccctgcagatgacatgccactgcaggattttatctactggcagccggacgcgaccgggacgggtgtagaagcaatttatgtcatgctgagcagtccgcgtgacatgccgggtaaagtgagtggtaagggacagcaagtgggtgagggctggttgaacaaagcggggcaggaacttggcgcgccagtccccagtcagattgcggatacattgcgcggtcgtgaatttgcgaactttgattcgttccgcaaggcattctggcaggaagtgagtaaagatcctgcattaagcaagcaattcattgttcctaatcgtagccgtatggctgtaggtaaggcaccgaaagcacgtaaattggatgccgccggtaagcgaacctcttttgaaattcatcatgtaaatgagatatccaaaggtggtgatgtttacaatatagacaatttgcgaattatgacaccgaaacggcatgttgatattcataaaggaggtaaatga

SEQ ID NO: 444887 - DNA, 1686 bp, Serratia marcescens
atgtcattgaaatcgaccaaggaacagctgaagcggttactcacagaaaaggacaacaaagttatagcgttgtctggtaaatggggcactggcaaaagctacatgtggcagcaggtaaaaaactcgtccgccgatgaaaccgttaagggggcgctctatgcttcactctttggcttatccgggattgaacaagtaaagactaagctaattcaaagtatggtgcctgctattaaggccaatccgaaattatgggagggtgccaagcaaactgttaagtcgggcgtgaaggttttggagggattccacaagggatttggtgctcttaatgaccttaatctagtatttgctcctgcaattcttcggcaaaaactgatcgtccttgacgatatagagcgcaaacatgaacagcttgatatagacgaggtattaggttttatcgatgagtttactcagcaacacggatgtcggtttgtgcttattctcaacagtgatcaactagccaaacgggatgtgtgggacttacttcgtgagaaagttgtagatcaggagcttaggctgacaacatcctcatccgaggcttttgatattgctatcggatttacagcctcagaatatggagggcaaattcgaacctcggttgtatcttgtggggtaacaaatattcgtatcattagtaagatcattaaagtagttaatcgcatcttaggagaacgacaagaactcactgacgcagtgctctggcgcgttatcccctcaactgttcttctggctgctatccattataaggggattgaagacggtccagatttcgactttgtgcttacacaagattctgaaaattttgctagtttttttgattctaaagaagaagtggcgacagcagaaagtaagcagcatgcaagatggcgaaaacttattagcgagcttaaaatctcggaatgtaacgattacgaactattagtggtcgaattcttgcagtctggtttattcgatgtttctcagcttacggaaataatcgaccgatacgtcgcgaaaactgacgtgataaatgcccaacacgcggtctatgagctttatgagcagtttttctgggatcatacattgacagaagagcagcgtcttgccaaagcattggaggtgtcacaacaggcacacttattggatgcacaaacggccagctcactttgcgaaatcgtttctgaactccccgatagtcaaaaaatcgtagacaacattttgtctaaatggattgctgcctttcattctaagaataaggaaggtgcacagctttacaatttagtgagttgcaagcttcatccccggatttcagcagagttcaacacagaagaaatcaaagtgcagtctgagacatctgtctatgacgcttgccgatatgtagctgaacacaatggatggggctcccgtcaagaaattgcattcaagtcagcaaccgttaaagacatggagagcataatcagaaacagtaagattccagatatgcgttttttcatggcaaaaatgctagatctctgtatccataaagaacgttatgaacaatatttcgggagcgctatggataacttcattcaagcttgccgaaacataactcaggatcccctgtcagctcgtctaggaaatcttatcaataaactgtttaccgaacctgaactcaaaaaattgctttag

SEQ ID NO: 444888 - DNA, 561 bp, Serratia marcescens
atggcgattttcggctacgggcgtgtctctaccgctcagcaagatacggagaaccagaggttggagcttgagcaagctggttggacgtttgacttttggttttcggatgtcgttagcgggaaaacctctgctatgcagcgcaaagcattctcagaattgctgggcaagatcagggacgatgaaacgctggttgtagcaaaactcgaccgtttggggcgtgatgctattgatgtgctccagacagtccgggtgctatctgatcgcggcatcaaggtgatagtccaccagcttggcaatactgatctcacctcaactgctggtaagctgctactgtctatgctggccgcagttgcggagatggagcgtgacttactgatcgaacgcacccaggcggggttgtcgcgagcaaaagccgaaggcaagaaattgggcagaccttctaaaatcgctccagaagcccgtagagcgattatagagaaaaagaatagcggcgtgagtgtcagcgcgttagcgcgtgaatatggcgtttccagagcgactgtagcagctattatcgattga

SEQ ID NO: 444889 - DNA, 837 bp, Serratia marcescens
atggcttacacagcaacagttatacctgtcatgattgcatcccctggtgatgttgccgatgagagacaagtcattcgtgacgtgattcatgagtggaacgatataaattcagctcgttcgaaagtaatgcttacacctgtcgggtgggagacacacacatcgcctgaacttggagttcggcctcaggagctaattaaccagcgattacttgtagagtgtgatttattaattggcgttttttggacccggttgggttcaccgactggaaacgagtccagtggaacagttgaagaaatatatcggcacttggatgcaaataaaccagcaatgatttatttctctgccaaaccagtagcgccggataccatagatgtaaatcaacataaagcgctcactgaattcaaagcagaatgtatgagcaaagggttgatcgaacattttgacaatctgaaagattttaaacatcaattatataaacagttatcattaactcttgccggtaacgaatatttacaggaactgattaatgagaagggcaataccggttcatcgattgcggaaaaggtatccgagcctgcgatatctgatgatgctctgcatgtcttacgagtcgcttgtgaaacaggtgatggttcaattctgatgttgaatgttttagctggcacaattattcaagttggctcgcaagttattaatgcagagagtgccagagagctggcaagatggaaaagtgcgattaaagagctgcaatttaatgggttgattattgctcaaggttataaaggtgaagtattcgaagtaacacataaaggatggagtatttttgaatcgcaatga

SEQ ID NO: 444890 - DNA, 498 bp, Serratia marcescens
atggcgggatcaggttttttattaccaatggtggcgggtgtcgcgcttagctgggccacttacaacgtggtcgctcacgttacatcaaaacggcagatcagcagtctacaagcaatctcatggggtgttctgggaacgctctcattggtgctaggcgtatgcgcattttccgctgtaagcgaagaacaccaggcagcgaaacacaagaccttgtgcttaggtagcgtcccggaatgctatgcaaaagcgcaccataacccggtcagggagtgcaagcaggtaatggacaagaaagcgacgtttcgccatgtgtggcaggaaagtgaagcgcagccggtattcaacacctacctctggcacgatgagaaaaaacgaactatacaaatgtttggacaacaggctaaagcgattaacagtctggggatgcatacaccactgcaatacttttgtattttcaacgccaacaccggggaagtcatcgcggcttcatttgaataa

SEQ ID NO: 444891 - DNA, 1320 bp, Serratia marcescens
atggcactttttcaaaatccatttttcaaaagcgatagtgattttactgaaaggcagtatgaaatcggtgtcagatttttagctgaaaaagattatggtcaagctaatcaatatcttaaaaaggccgctgaggatggtcatatctcagcattatacaatcttgccatattacatggatcgggtgtgttagaaccgatagatgtggattttgctgctgaatgtttctacaaagctgcgcatgcaggacatccaagtgctcaacaaaatctgtttatgcttgaggctgcggatagagctgggatgggaacaacgcatttagccaaccttgcacttaattctccgcctgtcgatggaatgcttccatacttggttatgattacagggtgccgtttctatgcagcggtgtgcaaagcaacagatgcaacccagcaggtcatcaattatgaattggacgcagccagttctagtgaacatgcgtatatccaaagcttcattaggcgttgcggcgttccagaattagagttttcaggtggtttacacagattaaaagagggggatgcggcagatcaaataactgatggtctgaatcaattatttatgagcatgaagcaggtgggttatgcagatgaaatttgtctgatggcaagatgcaccattgtttcatatattatttctcgatcaaaatatgcggcctcagcccctcagttacacagtgttaatgtctttttgaatcctccgcatgatggagttttgaccaataaatcgcaaaggctagatagtatgggattaagtagtttatttgggcttaaaaaagatatttttattattggtggcgtcaaaactaaattgccagaaactgatgaacaaacaatgaggctagtatctgagattactcagcagctggctcagaaattgccaacggaacaagatatctattggtttgtgatcgagttttttgatagggctaatgggttcagtagtgcagcacgagaaatactaaaaaacttaccgatgaatttattggagatggaatatgcaggccgtcgttcagaaaattcatatgtcggcaagaaaaatccgggggtagcttatcttttagaagatgttgcaccttcttttcaaaaggctgtttcgcatcttggagctggccctgagcaagtaatcgtagcccttgtttacctcattttttgtaatgagtatagagagataataaaaaacttaagaattaaatatgccgttcactatcataataattgtatatcgagcggtagttttaataatgctgataaatggggtgaggtaatcggtagtttagaataa

SEQ ID NO: 444892 - DNA, 2610 bp, Serratia marcescens
atggctatgaaagacctgcctctatggttattaaagaatgaagggtttgtcaatagattaaaaatgctaaccatagattcggtaatctcacagtttgatgctgttgtaagtacgtaccaaggttctatggatgaagttaatgttagctatatgcttacatgcgcgagcttactggctcactcagataaaagccaatgtcaagaagcagccttaagaatagctcagtattgccttcagagtaatgaaccaaaaaatagaaaggatggtgcagcattagttttagatgctttagcaaatgatgcaactattagattggcagagaaaagggatatgattgatggaggatacgaaagtaggcttccattaagtgctcagctagagtcaaccaaacgaagaattttacatacaattaatttagctgatgaaactaaaattgtcgggaatagatttcagtcgaatttttgggatagcgcggtagagaattcttggatcagtgtttctgctccaacatcagttgggaaatcttttgtcttggagttatggatacaaaactatttgatgataaatagacaaggtcttgtcatatatttagttccaactagagctttaatatcggaggttgagagtgatcttgtcagccgcttagatcctgatggtaccgggtatgttaatgtctcatccatgccacttaagtcttcttatattgaaggtaaagctaatgctttagtctttactcaggagagactgcatatattccttaattcattctcttcaccgccgaatatagatgtattaattgttgatgaagctcacaaaattggcgatggttaccgaggggtattcttgcagcaagtaatcgaagctgtttctgaagtaaatgctgatttacaagttatatttgccagtccattcacggcaaatccagaattactcttagaagatgcaccatcaaataaaaaaagtgaatctctaaaaagttctgatgtgaccgttaatcaaaatctcatctgggtaactcaagaacccagaaagcctaaggagtggaatatgaacttatgttttcaagatgaggttgtaagcataggtaaattctctttagataataatccttcagctgatagtaaaagacttccatttgttacaatggcattgtcgcaaggtgctccgggaaatatagtttatgttaatggtgcagcagatgctgagacaaatgcacttcaaatatataatatgcttagtgactatgatgagattgatattgaattattgaaattaattgagctatgtgagaagacaatacataagaatttcaaactaaacaaaacactggagcgcggggtagcattccattatggtaatatgcctttgttagtgaagtctgagattgaaaggttgtttagtattaataaaataaggtatttggtttgcacttcaactttagttgaaggtgtaaatatgtcatgtaaaaatattttcataaggggtccaaagaaaggaagaaaaaaccttatgaatgctgaggatttttggaacttggcaggtagggcaggtcgatggggaaaagagttccaaggtaatgttatttgtgtggactcaaatgttgaaagactttggaaggggggggagccgccacgtaataagagtgggataaggataggtcggactactgataaaatagcaaatgatgtttcatcaataattgagtatattaatgctgatgaccatctgttacgttctatgaatgaaccagaaatggaacatatgtttagttatctggtcatgtcacaaataaaatacggttctctggcatcaagctcgtacctcaaaagaattccatggatggatttacgcgatctagaggaagctattacagatgttgtcgatttacttacatatccacatgaattaataattcgtaatccgggcgtaagccctttactaatgcaagagttatataatagattttcttccaataaagataaatcaccagaaaggtttattttgtctgaacctagcagtgatgatgctttatcttcatatgtggcagcatttactagaatatcagatcacttaagcactaaacttggttttacttccaaacaagcatacgttcgggcattattagttgtgagatggataagaggatttcagcttgcgcgtcttattactgatagaattggctatgaaaagaaaaaaggcaaggacgtaaatgagtcttccttaatccgagaagtgatgaaggatgttgaggagatagctagatatcaggctccccgtcttttatcttgttataatgatttgttaatttcatattttgagagtatcggccgcgatgatttagctgatgaagtgactgatatcagtgtatacctagaacttggtgttaaccagaaaacgcaaatatccctaatgggattaggtatgtctcgcacggctgccgttatgttatcggagctgattcctgatgaaaatctcgaaactgcagattgcatagattggttgcaaaaaaacttttggcaaaaagatgacctacctacattggtcagacacgaaattgaaattgttatcgaaaagtactgtaggaaaaatggccaaatgaatgcgatctag

SEQ ID NO: 444893 - DNA, 156 bp, Serratia marcescens
atggagccacaacaggaagggatcacgcgggcgttaacgccgggcgaagtcaatctggcgcgttcagcgtttggctgcactattttctatcggagcgttgtggttcacttggacagctacctgcctttgggccgcagaatccgtacacggcgatga

SEQ ID NO: 444894 - DNA, 126 bp, Serratia marcescens
atggacattctatggaaagtccggcatttcgtagaaaagtgtcgtgaaattattttttactctattgaaatcaatgagttaagttgggcgttttatgttctggcacgcatgcgctttttgtattga

SEQ ID NO: 444895 - DNA, 1275 bp, Serratia marcescens
gtgaatatcaatgtattgaaaaacttctcctggatgatggttgaaaaattcgtatcagtttttggactgatatttttaacgtcttacgtggcaaagtatatcgggccatcggctttcggtacaatcgctttcgccgcttcaatattcgctattgttcaagcaattgccttatttggctctgagacaatattgttcaagcgcaccagtcaaaatgagcgctctggcatcaagttaatgttgtcgataaagaaactgcggacctatgttttttccgtaatggcgatagtcttaatttcatacttctatgtcactgccgataatttgacatttgttttctgtttggcgacctgcatagccacctattttgttacgcaagatgtcatcgctatttataatgacgcaacgttaaattctaagttcaacgcgttcgccaatgtgattggcttgggtgtcagcttgttgttgcgatttgtcattgcacacctcaatcttgacgtaaagtttttggccataccgatcgtcaccaccgcagcgattcctttttacatcaggctgtttttcttcaaggcacggcataagaaaacgaaaaaaacggtaaaaaataccagacgttatgtcatgtatatggtttatgccggtttacctttggcgatctcaggtatatcgatctccatctatacccgcttatcacagattttgctggtaaaatacggctcaacggctgagttggggctctttgccgcagccagtacattggcgtcgccttggacatttatcaccacggcgttcattacttctacatttgccgtcatttataagcagagcaatcgagaaaaagccatcgatgaaacggcaagattgaatggcatcattttcttgttttgtattataacggtcgcttttatcgccatcttcggtaaacttgctatcggattactttatggtgaggaatacaaagacgcctatccaataatgattatactggctatagccaccgcactttccgctatggggcctgtggcttatcgctatataattaaggagtctggctataagttcctgtcatataagatgctttttgtttttatcgttaactgcccattaagtatgttcctcatttctcgataccatacttttggtgctgcatattgtatgttaataacggagtttctctccctaactctgtttaattacgcattcaataaaggcgtggttgcaaggatacatcttaaaatgtttaatccactcttgtatataaagcctagaaataaatag

SEQ ID NO: 444896 - DNA, 891 bp, Serratia marcescens
atgaaaagacatattaggaagtttatctcaaatcaactgtctgtgtacttacctacattcaaaacaaaattgctttataaacgacgcttcggaaagtcattagatctttcaaccccagtcaccttgaatgaaaaaatacaatacctaaaattcaaaagctacaataacaatgcgttaatcacgcagtgtgcggacaaatatgcagtcagagagtatgtgaaatcgaaaggttgtgaagagatactcaatgaactgtatttcgtttgcgactctgtagatgatatcccatgggattcgttgccgaataagtttgtgattaaaggaaaccatggcgcgggatataatctcatttgccaggataaaaaatcgttagataaaaacctcgcgggaaagacaattgatggctggatgcgtgaggatttctggaagagagatgtcgagtttaattataaaaatataaagaaaaaaataattggtgagaaatatattgacacccctgatggacgtgggcctgatgattataaggtctactgcttccacggcgtgccgcactgcatgatgctgtgcatcggtcgtgacaaaggcgtgccgaaatttgtttacttcgacagagattttaaagttctaccctatagccaagactctttagaacttaccacggaagagattaactcctttgtaaaaccggaaggttatgacgaaatatttgagtacgcggaaaaactggccgtgccttttgattttgtcagggctgatttctacctgtccgatggaaaggtaatctttggcgaattgacatttacgccttccgcaggcttagatagcgaccgattagtttcaaccgacattttgtttggcaatttgctaaagttggacaacgtaaaggcgtaa

SEQ ID NO: 444897 - DNA, 1128 bp, Serratia marcescens
atgagtaataaaattggaatattcggaacatcgaaaaagaaatttgaaaaccgcatacctttccatcctgccttattcaacctgattccagattcaataaagggtaatttatatttcgagtctggctacggtgagcgctttggcattgacgaccaaactatttcgaatgaatttggcggtgttttaaaccgagatgaaatattccatcacaccgatgtatgggttttgcccaagccggaagttgatgatttcaaacatttttctcctggaaagatattgtggggttggcctcattgcgtgcaagggtttgaaatagcttctgcggcaattaatgcaaagatgacaatcgttgcgtgggaggctatgtacagcggcaatgacaatacccatatattttacagaaataacgaattggctggttacgccgccattcagcatatgatgatgctgacagggaagaatggctattttggtcgcaaccttaaggctgccgtattggggtttggcgctacaggacgaggtgcagttaactccttgaagagcctcggagtaaaagatattaccatttatagtcgccgcccctcttatcttatcaatgcgccgatagaaagcgttgactataagcaaatgctcgtcaaagatgacggcgaaatcttacttcaaaaagaagcggatttcttgcctccgcaagatattcttgctcaatgcgacatcattgttaactgtgtgctgcaggatccgaactcgccattgatgtttatcaccgaaagtaatatcaatgcgtttaagaagatcgtggatatcattgatatcagttgtgacaaaggcatgggcttccattttgccaaaccaacgacttttgataacccgatgtttcatgtatcagggcatgacaacattcgttattattgtgttgatcatacacctactatatattgggattctgcttcatacgaaataacaaagtccttgttgtcatatctgccattattcactgacaattcatggcgtgagaataaagtcttggctaaagccgttgaaataaacaacggtgatatcgtcaatgaaaaaatcaagaccttccagaacaggaaggatgtataccctcatgagattattgaaagataa

SEQ ID NO: 444898 - DNA, 225 bp, Serratia marcescens
atgctgactatcgtccttaaggacgagacgctgaggggtagcaaacgcaaatatgttgcagtgggcagaggacaacgtggaaggcacagagagggaagcgagccgcatttgttgttgagcgcctcccggaacgagaagaacggcacgagagacttaaaaatacacgccatagagaagaggaataataacgcttttgatagaggctggaagaatgcgaatcagtaa

SEQ ID NO: 444899 - DNA, 738 bp, Serratia marcescens
atgctgagaggtaagagagctgtgattaccggtggcggcggtggatttggtcaggcgctgtgcgtgtggttggcgcgagaaggcgtcgaggtggatttttgcgcgaggcgtgccgatgatattaaaaaaacctgtaacatcatcacggctgatggcgggatagcaaaagggtatgtctgtgatttaacccagcctgatgccatttctcagttttcttcacagttattaacttcagacaaatccatagacattttgattctcaatgctgctcagtggctatcaggatcgttagacgatcaaccagacacagaaatcatcagtactataagttcaggactgacaggttcgattttactgactcaagcattactgcctgggttaaggcgttcagaaagcgcggatattgtctcaattatatcttcctgcgggattccaaattttacggattcaattgcgcatcccgctttttttgcaagcaagcacgggcttagcgggtttacaaataaactttctcacctgctgtcagaagagaatatacgtgtgaccgggttgtaccccccggatttcgaactgacagggttagatatgtttatcgatagccaatccaaaatgggggaacgtttaatgaatgggcgctcgatctgggaaaccattcgttttgtgttaggtcaaccgcgtagttgccatataagtagcatctactttgaaggtcccactcgcgaaaaactgggagattaa

SEQ ID NO: 444900 - DNA, 1479 bp, Serratia marcescens
atgatttgcttctctcaaatgaatgccttctgcaatcggttaccacacaagatcgctccaggtgatttggcaaatgataagtgggttgttgaaaactatttgtacggcatcgacttttattcttctggcagcgaagttttagtttttgttggtgcgcgttttggtttggaagcgattgttgcatactataatttcaaaccgcgtgaaattattgttatcgaagaagatgaatataagctggccatttttgacagcctgttgaacaaaaacccggaaatgaaaagccgtgtttccgtctttaccgatatcaaatctcctgagattatcgcaaaactcgaagggaaatgcgccagtgcgcgtgtatcacttgacagtttcgacttcaacgagctcgattatgctctcacgcattggcagttggatcacgtctgtggcgaattcaatgaatatgatgttgatgcaatgatggtttatcgtctttgtgcaaaaaatgccaatagtttctactggcatttatacggcaagcataaaccattagttggcaatcgtaatcagtatgagtatgaagtttcggtagttgttcccgtctataatatcagcgactatgttgatcagtgcatagagtcgcttgttaagcagactcttggtagcttggaggtcttagttgttgatgatggaacgccagatgattctggagataaggccgatatttgggcagaaaagtatcccggtcgtgtgaaagttatccataaacctaacggtggttgtgcttctgcgcgaaatgccggattgcagcaggctaaaggacaatatattggttttgtcgacggcgatgactgggttgagccgcatatgtatgaagagctgtatcgctcagctattctctctacctcagatattgcgcagagcggctatcaggaggtttacgagacaggtgaggtgattaagttcccgcttagtgtgcatatgacgcgtatggatttgttgcgtgaacggcctacaatgtggcgtagaatatattcttcccagatgttgcgcagcaagaatattactttccctgaacacatccgtcgtttcgacgatctgccgttccaatttgaaactttcttcaacgcaaaatcgattagtaacataccatactgttattacaattatcgccaaggtcgtttggggcaagatatctcggttcgcgatgatcgcttgaatgttcacttcccaattttcgattggatatatgaacgtaattctgaactgctgaactatgacgaagagaagaaactgtttgaactggagcttgatgtccattattgggcctacagtgtgatcaatcaggagctgaaatctgagtatcttgtgaaaactgcagcacaaattttcaaagccaaaaaaatactcagtacagtcgatatgctgaagattgccaagtcgaaagggcgaggcgtgttcatgttcttcatcgccttgtggcgtaaaaaataa

SEQ ID NO: 444901 - DNA, 1173 bp, Serratia marcescens
atgaacgaaactgttattttagatacgagaaatctcgagactaagccaacattgtccgttattatacctgtgtataataccagtctttttgtgactcgtactttaagttcctttgatgccgtcggcaacaaagatattgaaattattattgtcaacgatggcagcactgataatagtattaatgttgtcagtgaatggattaaaaattatcacggtaatgtggttctgatcagccaggaaaataaagggttgtcggaagcgcgtaacactgctctgcgatatgcacgtggcgaatatatttcattttgcgacagtgatgactggctgaatcagaaaacagtccttgatgctgtgaaattggctaaagctaatggtactgatgttgttttctatcgttcatttgttttcgacgatcagaataaaaccgcgtacccgttttatgattccgcattatgggatatggcaatgaatggtgtttattcaaaaattgtcgatattaattcctatccatatcttttcagtcttgaacccaacaccaataatcgcattatcagtagatctttttttgaacggcacattggggagttcccctccggcattcattttgaagatgtaaaacctcatgtggtcacactggctaatgcagggaaaattgggttattgaactcgattggttatttctatcgtgtaaaccgcgatggaaaaattactgaacaaaaaagtgaaaagcgatttgatatcctgaaaacagctaaagaagtaatgcaacaggatgaagttattaagctaaatgattatcaaatctattgcatcatgtcactgttggtgaaaatgatttattggtgtggttgcaatacactactcaaagatcgctatcgcttctttaaagaggccacggagttattctctaaaaaacaccctcagagtcgtgctatgctgagcaagtcattaaggttcgctcatcgtaatcgtgagtttattctgatgctgtccttgctcaatggtgctgctagttttattcgcgactacagcacgggcgacaaagcattgcttactaaagtgaaacttttgtccagtatggccaaaagcgatatttctgcaaacaaacttatctttaagaaagccgcgcagtttgccaaacacaatgtattaaaacgaatcaggaaccgctaa

SEQ ID NO: 444902 - DNA, 141 bp, Serratia marcescens
atgaaattagtcagtcgttttggtcgggtgaatcagatatgccgcgaccgccctttaacacatgaagagccgatgaaccacgttcccaatgtgttcagcgaagaaaagcatgaatcccgcagtgagcgatattcgttgtag

SEQ ID NO: 444903 - DNA, 1089 bp, Serratia marcescens
atgagccaaacgatgaaattaggtctggcgctttccggtggtggggcgataggtgcttatgaagtaggcgtcgtcaaagcgcttgcggagtcgggaacccacgtccatatggtttccggcgccagtattggcgcgttgaacggcgcgattatcgcctcttcttcagggctgtcgcaggcggcggaacgcatggcggaaatctgggaccatctgggtaatagcaccgttttgtcggttaacaaatcagcctatttttcgctgctgttgcagtttgggatcggaatggggctctccccgatgctcagcaagacgggaagtatgctcagtacgatccttaatcgtgcggcgctgatcaccggtgcgaaaggctttgaaaatcagcctttgctctcggatcaacccttgattgccctgatggatcgttatctggacatggacgcccttgcgatcggtttaccccttttcgtctcgttgtaccccactgaaggcggagtgcaggatattatcaactgtattgccgccgaactgggtctgggttcaacgcgcgattccgaattttatcatgtgcaaaacctccccccagaacagcaaaaagaggcgctaatggcctcggcggcactgccgttgctgttcaaaccccgtgaagtcaacggtacccattatagcgatggcggaatgggcggctgggcgagtttgcagggcaatacgccggtcacgcccctcgtggaagccggttgcaacatggtgatcgtcacccatttgagtgatggatcgctgtgggatcgtcaggcatttcctgataccacggtgctggaaattcgaccgcagcgttcattacgccgcaacgatggggcgctgggaggtgcaaaagatctgctgggctttacggcgatgcatattgattcgtggattgaacagggttatcacgacaccatgagcgccctagacagcgtccgtaaaccgcttcaggcccgacgcactctacaagtttccagtaccgcgcttgaaagcagtctggcagagaataccaccgcggattcggtcttaaaaaacgcaatatcccgacttaaaggtggcatacaacgctga

SEQ ID NO: 444904 - DNA, 906 bp, Serratia marcescens
gtgatcacctcctttcaggaagcacttccagacaatgaggcatgccagatcctggcatgcctgccggaaaagttcattgttgatttcgccaacggtatcgatatcacacaagatcaccttcgggtacagaaaaaccgcagcttctttacgcgagtgaaagaggggctcagcggtcagtcttccgcccgccagcacgcaattaatagcgcgctggcagatagtgttgagacctcactgacgtggctcaccgaactcacctcctctttggccaccaccaactatgccctgacgcaggtgaatgatagagtgacgtctctggttagcgataccgctacgctcgcacactattctgccgacacccgtgagcagcttaacgcactgtctttgcaggtgagccaaaagctgagccaccttgagcagcatctttatcgcgtcgatatgctgcagcggggccaactgcatcttgaccagatattttccagctggagcgccgggcggtactctgccctgcctttggccggacgttgctatgtcgcacttgaggaactgcgctggggagcattcggcgatgtgatacgccacggcgatacgcatcaggcaaaccagatgatcgatatattaaaaaacaaggccttagcccaactcgccgcagaccacggtagcctggcgagcgcacgccacgatacccacagctggctgtcatggcatgcaggccagatacagcaaaatgactggccagagacgctcaactggatggctgactggtgtactaaagatgcacatcctgttatctggtctgcaacccagaaatacgacgatttaccattacgtatgccgcgtctgtgttcagcggaacgcattgctaccagcatggtcgatgaaatattcagccgggaggccgcatga

SEQ ID NO: 444905 - DNA, 2385 bp, Serratia marcescens
atgcacgagaacaatatcacattactgtgtaatgaagcagagcgattattgcagcttaatattaatttgctgcaaaaaatggttgatgagccgaatgtccttgtcgaaaacaaacaaaacaacaacgaacaactctttaataaaagtaaagccttaaaaagaattgaagaattacagggtgaacgaaccaaaattatccgtaaagagatggtgctggcagtcgttgggaccatgaaagccggaaaatcaacgaccatcaacgcgattgtgggaaaagagattctgccaaaccgcaatcggccaatgacctcaatcccgacactcattcgccacgtgccgggtaaacatactccagaccttcagctaaataatatcgaccctatccatcagttgctgagcgcgctcaagaaaaagattacaactgacgaaggcaaaaagcgcgtacttgaactcgataaggatcaagagaaaagtaagttattgcgaattgccatggatgataattggttaaaaaatagctacgccggtgaaactgaaattttcacctgcctcgcctcgctcaatgacctggtgcgtctggcaaccgcgctgaatgtcgaatttccgttcgaagcctatgaagaggtgcatgaacttccggtgattgaagtcgagtttagccacctgacgggaatggatgatagccatggaacattgaccctgctggacaccccaggtcccaatgaagccggacaaccccaactccaggcaatgatgcgcgatcagttgcaaaaagcgtctgcggttctggcggtgctggattacacccaattaaattccgaagccgatcagcaggttcgcgcagaattgaacgatattgcaaacgtggcggcaggccgtttgtttgtcctggtcaataaattcgaccagcaagatcgtaacagcgataactctgagacggtcaagcagagcgtgcccgccatgcttgaacatggcgtcctgaatagcgagcgcgtttaccctggctcctctcgccatgcatatctggctaaccgcgcccgcagtgtgataagccaggctggaacgctttctggtcaggaagactgggtggaggattttgcgcaactggcctttggtttatcctgggaagaagaggatcttacgagtccggatgatgtcaggagaaacgccgataaaatctggcgtcgttcactttttgataagctcattaccgaagtgattcaggctgcgcatactaaagcggcagcactggccgtcgattctgccgcagccaagctggttcagaacgcagaaaacgccaatgaatatctctcggtgcgtcatcagggcctgttgaccagcattcagaccttacaaaatcaaatcaacggcttgctgagcgatatcgataatatcgccacctgccagaaagaggtcgacgccgaggtgaaacgggccatgaaaggcatcacgcgtgaaacggacgcgttgcttgaacaggccgagaaaacgctgagcaaagacctgaatgaatacttcaaaaatggaaaacgtcaggagaaagaagcatttgggatcgatcaaccgaaggaatcaacaagtctcacgatctttggaacgttctttaagacgctgaccggtactacccagccacgagagcgtgatttcgatccgaacaatccggaaatgaagtttagcgcgcgttctgatgccgaaagattcatccagcaaatcgaagactccgtcaccagtttgctggcagagaccgaagaaaaaattaaaccgacgctgacagagatcgttgtcggcatcgaaaaaagcttccatggcaacgcgatcaaggctgtggaaaaaatcgcccatcaaatcaatactcgtcttgaagacgatggctttgcggtcaatgttcgcttccctaaagtaagccagctacagaccaatctgtctatcagaactcgtatgaccagtcttctggaggaaaaaaccttcagtgaaaccagacgtcgccgttcgagtggagcatggggaacggtgtgtgggtggtttaaaaccgatgactggggctgggaagattacagcgttgatgtcacccgtagtgtggtagatattcgcaagattaaaactgccgtgaaaaaacagactaaagagcattttgcagagttaaacgagaccatcgaggcgagtatcaatcagcctatactggtcgaaattgaatcattctttggagcctttaaaagtaaagtggagcagttgcgtaatacgcttatccagagcaccgaagatcataaaaatagccagaatgagcaggaacagctgacactgcgcctgtgtgagctaaaaaaactcacaccggagatgatccgtgacggcaaagcgctcaaagaagaactggagccgatgctgtga

SEQ ID NO: 444906 - DNA, 525 bp, Serratia marcescens
atgacagacaagcacttaacccaatcaccggcaggtgagtttgttatgtttgccagcgatgatggcgaagtgcgtgttgaatgtcgttttgagcaagaaacgctgtggttgccccaggcgaccatcgcgaatctttatcaagtgactccccaagcgattacgcaacacatcaaagcgatctacgaagaagcggaacttgaacaaaacgcaacctgtaagtcttacttacaggttcagcaggaaggggcccgtcaggtaagtcgcaatatcctgcactatagcctgcccgttattcttgccgtcggttatcgtgttcgttcaccccgaggaactcagttccggcagtgggcaacccaaacgcttcaggaatacctgatcaaaggcttcgtgatggatgacgagcggcttaaaaatccgcccgtgggttcatccgctgtacctgattactttgatgagatgctggagcgcatccgtgatatcgccggtttactgcagtggaaaacagacaccaagaagcagccataa

SEQ ID NO: 444907 - DNA, 654 bp, Serratia marcescens
atgcgacaagatttccgctgcggttgctggctgatggaaaaagcagaaacggccatgccagtgatcacccgcaatcttgatcgcagtgtttggcgtgacctgatgctgaaatccggaatgatttctcttatggacgcgcaggcccgtgatgagtggcataagaatctggatgagggggagctgccggaaatcagtgaggaaaacattctggcgacctttgagcaattacaccacaacaagggggaagtgttcgagcgtggggtgatcaatgtcttcaaaggactctcatgggattacaaaactaataacccacgcagttttggcaaaaagatcatcattaacaacctggtcacttacaatcgttggggttttagcctgaactggggctggcgtcgtgaccaactgacagatttggaacggatgctctttctgctggatggccaacccattcctgacaatcatggtgatatctgtacccggttaatggcgcacattcgggacaacccggcaaaagacgtttacgaagatgagttctttagcattcgttactttcagaagggaaccgcacatctgatgttcaaacggttagatctggtggagaagatgaacgacattatcgctaagcattatccaggcatgttgcctgcaaaataa

SEQ ID NO: 444908 - DNA, 204 bp, Serratia marcescens
atggccagccgctttcaagtgctcccacagtaccttggattggtcaatccccaagggaacggtctgcccattgggatcaaccacggcgatgacagcaaactggtgctgctcgacaatgccaaaacgtatgcctgtttctgcctctatttctttctgcaagttctcagcaaactgctcgtagttttcagtggccaccacggttaa

SEQ ID NO: 444909 - DNA, 1950 bp, Serratia marcescens
atgactatgaagaaaatcgacatcaacaatccggaggctcagtctgctgatttggtggctggcaatattgcacagcttaaggttctgttccctgaactgattaccgaagggcctgatggtgttgctgtcaatgtcgatgtgctgaaagcattagtgggtgacaaaagtgtcaatgacgccgatgaaaaatatggcctcaactggcatggcaaacgccgtgcacgacagctggcgttgacgcccagcacaggaaccctgcgtccatgccccgaagagagcgtggattgggctactactcagaatctgatgatcgagggggataaccttgaggtccttaagctcatgcaaaagagctatgccgggaaggtgaagctgatctacatcgacccaccttataacactggtaaggattttgtgtacccggataactttcaggacaatatcaaaaactatctggaattaaccgggcagatagatggtgggcagaagatcagtagcaatactgaagctagcgggaggtatcatactgattggttaaatatgatgtatccgagattaaaactagctaatagcatgctaagaaaagacggtgtgatttttatcagcattgatgatgccgaagtaacaagagtacgctgtatttgtgacgagttatttggtgaagagaattttctagcaacaatttgttgggaacgtgctgatagtccacggatggatgcagattacttctcgaccaaacatgattacatagttgcatatgccaagagtctagagaattttcaagttaatagaagagcatatgaaggtgataatctaccagaccatttcaacaagaaggaccaggacgggcgtatatattacttgaagccgttgcgtgctatgggggggcaaggagaaacacgtgctgcgcgcccacaccttttttatccgatcatagctccagatggaagtgaggtctatccgaagctccagggagggggagatggtgcatggagatggagtcgcaataagcttaatgaaaatttaggaaaaattgaatggacaaattctagcggtggttgggccccaagctaccgaatttatgctgatgaaagttctggtaaaccaccggaaactattttttacaacgaggatgtgggtagtaatcgaacttcgacagcagaagtgaaagatctttttgataatgtaaaagtatttgatacaccaaaacctatcaatttgattaggcgtcttctcgagcttggctcatcaaataatgacattattatggacttttttgctggttctggaacaacagggcatgctgttctggctcagaatgcttccgataatggctctaggcgctatgtacttgtgcaactgccagaatctcttgattcagctagaaaagaacaaaaaactgccgcagacttctgccaaaaacttggcaaacttcgcacaatagcggaactcaccaaagagcgtctgcgtcgtgctgccatcaaaaccagagttgacaatcctggatggcaaggtgatctaggcttccgtgcattcaagctcgatcaatctaatattcgtgcctggaatcccaaaccggaaaacctggaagctacactgctcgattatgaggatcatctactggaagggcgtagcgaagccgatgttctatacgagttattgctcaagctcggcctggatctttgtgtgcctattgaacaacgtattattgccgagcgagaggtgtacgccgttgggggcggtgtactcatggcctgcctggcagagcaaatcagccacaagcaagtggaagttcttgctcaaggtatcatcggttggtatcaggagttggcacctgctggtgataccacgtgcgtattccgcgacagcgcttttgctgatgacgtagtgaaaactaatctcgccgccattctggaacagcatggcatccagaacgtgcgcagtttgtga

SEQ ID NO: 444910 - DNA, 1215 bp, Serratia marcescens
atgaagctaacagcacgacaagtagacaccgccaagccaaaagagaagccttacaagctctcagatggcgctggtctgtatctggaagttgctcccaatggctctcgctattggcgtatgaaataccgtatcaacggtaaagaaaaacgcctttcctttggtgtttaccctattgtttcgctggcggttgcacgagacgaaagagaaaaggcaaagagggtactcgctgccggtggtgatcctggcgaagtaaagaaagcagggaagttggctcagaaactctctatagagaataccttcgaggcgattgccagagagtggcataaatccaaggctgaccgttggtcactgcgctaccgtgatgaaatcattgataccttcgagaaggatattttcccctttatcgggaagcggcctatagctgaaataaagccgatggagctactggaaacgctgaagcgtatggaaaagcgcggtgcgttggagaagatgcgcaaagtacgccagcgctgtggtgaggtgttccgttatgccattatcaccggacgggccgagtataaccctgcacccgatctggcctcagccctaaccccaccgaagaaacaacatttccctttcctgacgactcaggagttgccttattttctcaacgacttagcgggctataccggcagcgtcatcaccaaaacggctacccgcattatcatgctgacgggcgtcagaactcaggaactgaggtttgcgcgctggcaggatatcgatctcgataaaggcatgtggaacataccgccagaagtgatgaaaatgaagcgaccacacgtcgttcccctatcaacacaagttgtcgatctattcgattctcttagaccaattacgggtgcttatcccttggtattcattgggagaaacgatcaccgtaagccaatcagtaaagaaagcgtgaatcaggttatcgaactgctgggttacaaggggcggctgacggggcacggtttccgccacacgatgagcaccatcttgcatgagcagggctataactcggcctggattgagacgcagcttgcccacgtggataagaacagtatccgtggcacgtacaaccacgctaagtacctggatggacgacgtgagatgttgcagtggtatgccgactatatggacaacttagagcgcggtgggaatgtagtgcatggggagtttgggtgtagggcttaa

SEQ ID NO: 444911 - DNA, 141 bp, Serratia marcescens
atgaaaaccctatccgtaattttggccgctcttgtttctcgattgggggctgcgattgccttatcgggcgctgtcatgctggcacttaatggagtgtccggctggggctggttcctgtttatcgggctgctgctgtcatga

SEQ ID NO: 444912 - DNA, 570 bp, Serratia marcescens
atggtgattaaggaatatctgatgaataaaaaaatcaaacaaatagtccagggcttgtcattcggcctgattggcttggcctgtgcggcacagggcgtagacggcaccatcaacacccgagtgaagtttattcagttcacctgcaatctgacggccgccagcaagaatatgagcgtgccgttgggggatatcaaccgcagtcagctggctaaagccgggaacctgagttcgccggtgttgtttgaattaaaagcgaccggttgcccgacaacagcccagactagcgttggcgtgcgtttttcaggcaaggcagcgtcggaggattatgaagcttttattttggatcaagacagtgtggcgtcgggtgttgcagtgaagatagcgagtgaggggtataacgacgcttatgattatttcgttagccccaatagcaattgggggagggactatcgaccaaacttcaacggtgagataaccatgaagtacgcggcgcagtatgttgccctgaatgatcatattacgcccggcacagccaatctcaccacccaaattgacttgtattactattga

SEQ ID NO: 444913 - DNA, 561 bp, Serratia marcescens
atgataacgaaagtaaaaagaaagatagcgctgctggcattattcagtgcagcaatgttatccccgccgctttacgcagcggatggcaatattaacgtgaccgggagagtggtggagaatgcctgtgtggtggctgccggctcgaagaatatcatggtggattttggcgagcaggcagggaattcagtgttgggcggcaatggttattcgcgagctataagacttctggattgcccttcgggggctaagcaggtgaagattaggtttgaaggtactgctgttagcgatggtgggcagtatgacaaagattatattttcgcccccgataatcaggggcagccgggggctgcgcagaacgtagggttcggggtatacaatattgatgatacttctaatattaaagttaacggtgagtcgaaaccttttgagctgaaaaacagcggttctggaagcgagaatattcttaattttggtgtgtggctgcgttggcttgacaagagcaagcccatcccacttggtgaggcgacgggcaccattcagttcagcattttgtataactag

SEQ ID NO: 444914 - DNA, 531 bp, Serratia marcescens
atgatgagaaaaatagcactgcccctgacgctgctcggtactgccatgctggcgcagccgctatacgcggcggacgggaatattaatgtgacaggtcaggtacgggaaggaacatgccgggttgatgatgagtccaagaatatcatcgtagattttggtacgcggctgggtaattctgtaaagcatgaatctggcgcatctgaaaagagggcgattacattattggactgccctgtggattttgtacgtattaaatttgaaggtaatgtttcatcttacgatggacgatcttttgtgccggataatcatgatcagccaggtgcggcgagtaatgtgtcattttatatatatgatgagaattataaatatatcgcacctaatgactatttagacgcaggcgggctaaacacaggagcgggaagtagaaatgttattccatttacttttggtgtttctcgtctggataaaaataaatttattacagttggaaaggctaatgtcaatgtccaaatttctgttgcatataactaa

SEQ ID NO: 444915 - DNA, 516 bp, Serratia marcescens
atggatcttttaggatatagcatggaagctgatatgtttaacatcaagttagagcattttatcccacctaagctaaatgatttactgccaagtacgcgtgaaaaattacgtgcgcccgagagctcattcttttcctatcatgcagatatagataaatcatatgcagtaaaaaatgctttggcaaatatccccagcgagtgcttggtgaagctgaagtatcgactaagcgaaaattatatggctcgtcagattgataggaaaattccgaaaagaacaagcgatgaggtgaagttaatatcgaatttctccatgagttataaggaaataataatacatggagacttcaatgcatttttggcatttttaataaattggtctggggtgataaataatcgaaacataggtatcagaaatgtacccatgaaatcatcacctgatagcgaagggtgttacgttaaatacattgaacatgaacaccttgctgatggcatgagaaaagtgtggggattatggtga

SEQ ID NO: 444916 - DNA, 1137 bp, Serratia marcescens
atggcaaaaagacaatggaaactgataccacttctggtatctatcagcgtgatcagtggatgtacgattgtacccgggactcatctgtctactacgggaaaagacgttgtcaagcaagaagatagcgactttaatctggatgaattggttaatatttatccggttacgccaggtttgatctctaagatgcggccgaaaccggtagtggcgcaggccaatgttgcgcttgagcgtgagttgcaaaactacgagtatcgggtcggtgtcggtgacgtgattatggtcacagtctgggatcatcctgaactaaccactccagcgggtacttaccgaagtgcaagtgacacgggtaactgggttaactctgatgggaccattttctacccgtatatcggaaaagtgaaggttgcaggcaaaaccattggtcagattcgtagtgagatatcaaaccgtcttacgcaatttatagaatcacctcaagttgatgtaagcattgctgctttccgttcacaaaaagcttatgtgactggcgaagtagctaaatcgggccagcaaccaattaccaatatcccattaaccgtgatggatgccattaatgccgcaggtggactgacagataatgcggattggcgaaatgtggtattgactcataatggcaaggaaaagatcatatcacttcatggattaatgcagaaaggggacctgagacagaaccaactgctttatcctggcgatatattatatatacctcgcaatgatgacttaaaaatctttgtcatgggggaggttaagaaacaaactaccctcaaaatggatcgaagtggcatgacattgacagaggcattaggcaatgccgaaggaatggatcaggctatgtctgacgctaccggtgtgttcgttattcgaccacttcgtggggctgaaggcaaaaaaatcgccaatatctatcaattagatgcttcagatgcatctgcacttgtcatgggaacagaattccagctacaaccttatgatattgtttatgtaaccacagtgccactggtgcgttggaaccgtgtgattagtcaactggtgccgacgattactggggtacatgactctattgaaagtgttcgttatattagaacgtggccgtaa

SEQ ID NO: 444917 - DNA, 561 bp, Serratia marcescens
atgtcatcaaaactatttaccttccctgacaaatattcagatagaccacactcatttttatttcccagtattttatgcgtatatcctcgtctcatatcacaatctatgaataacactttcacttctgattgtgcgatcacagatgccaagttaagactaacgaaagtttttcctacaccgggacttggtccagaaatcatcagcacattatttctggcatctatcatcgcgaagtgtaaactggttcttaaatttctaattgcttcgattgagatatccgcaggatttttcattgctaataaagaacaagaagaactctttaatttcgttcggctatcgttccccctctccttatcaactctctgctgccagtctgaaacaggaacactagcgtacacatttactcccatatcatctaattgtgttgaagactcgattccgatgaaaaatattttttttgtcaaaacatatgtaatagaaataattaatccgataaaagtgctgatgaaaattattattttacctcgagatgacacaggagaatcttgcagtgtcgcgtag

SEQ ID NO: 444918 - DNA, 612 bp, Serratia marcescens
atgctcagtatcggtatcgtatctgaaaacatctttttcagagaggcgataaaaagaatattgatgccaaggatttttcataaagatcacgttattgcctactatgacgatctgcctttggcgatggggcgtaattgccacgatattctgatcgttgatgatgcggtaaaaagcatgctgcgcttcagcatggcgatgacattattgtctgctattcatggcataaaggtttttctgacgacggaagaaaaacgccgtctgttatttcgctctgtctcgcgtgatgtggttgtgctcgataaaaaaatcagcatccccggtatgagtaaagagttttcttttctggtggataaggtcacgcagcgctctgcattaaatggaggcgctgagggcggagcggttcgcaatacgaaaaaccgcctgacggaaagtgaggtggaaacgctccatttgctttccttcggctatacggtgactcaggtttcccgaattcttgataaaagcgtaaagacggtcagcacgcagaaatgcagtgcactacgaaaaatgggattgaagaatcgggtgcacaacttattggagatttcatccggtttctcggaggttctctag

SEQ ID NO: 444919 - DNA, 768 bp, Serratia marcescens
atgaagtatagtttagggtatttatgggatttggctacggtcataactcaaaaagagttaaaagtaagatataaaagcagtttttttggttatttatggtctattgcaaacccgcttctatttgcaatgatttattactttattttcaaactggtcatgcgggttcaaattcctaactacaccgtgtttttgattactgggctatttccgtggcagtggtttgctaattcagctaataattctctgttttcatttatttctaattcacagattatcaaaaaaaccgttttccctcgctctgtaattccttttagcaatgtattgatggagtgtttgcattttttatgcactattcctgttattatcgtttttctatatgtatacgatatgagtccatcaatagattggttgtggggagtgccattaattggtttagctcagatgctaataacctttggtgtttccttgttcctatcgacgttaaatctttttttccgtgatcttgagcgttttattggcttagggattatgctaatgttctactgtactcctattctatattcaattgacatgatacctgatgagtaccgttggatggtgaactataatccattggctaccatggtactttgctggcgtgatttatttatgaatggtcatgtcaattacgacagtttggttgttttatatgggtacggtgcagcatttattttgattggcgcaagtgtgttcaataaactcaaattcagatttgcagagattttataa

SEQ ID NO: 444920 - DNA, 744 bp, Serratia marcescens
atgagcactgtaattgaattttcaaacgtcactaagcgctaccctctttatcatcacattgggtcgggaattaaagagctgctatttaatccacgccgtgcgttgagcttattaatggggcgtagctatctggcaattgaagatatttccttcagtattcagaaaggcgagagtgtagcattgataggccgtaatggtgcaggaaagagtacgtcccttggattagttgccggagtaatgaaaccaacgacaggaaaagtgaccgttaaaggacgtgttgcgtctatgctcgagctggggggcggtttccatcctgaattgactgggcgcgagaatattcgcttaaacgctatcttattaggattgcggaaaaaagagctcgatagacgtatcgataagatcatcgaattttcagagttgggcgattttattgatgaaccaattagggtctactcgagcggaatgttggcgaagttaggtttttcagtcatcactcaagttgatcctgatgtattgatcatcgacgaagttcttgctgttggcgacctggcattccagaacaaatgcattaacaccattaatgaatttaaagcgcgtggcgcaacaatcctctttgttagccacagcatggcagacgtcaaaaaagtgtgtgacaaggttatttggattgaaaatcatcgagttaaaatggtcggcgaagctggtcttgtcacgagtgcttttaaagcaagtatggacgtctga

SEQ ID NO: 444921 - DNA, 1086 bp, Serratia marcescens
atgattaacatcactaaagatatgtttgttgaagtgatgaatgatgcgttacagggaaagcgcgataacctagaaatgcgtctacgcatcatgataaaaaagcttaaaaaagactcgccggagctggcatctgagttaagtgatgcgcttatgagaagtactgattatgtcagtgttgttaggggtattcccaacgacaggcagcccgctcctgttgacactgatacaagacaaaaactgctagtagagacttatcctgttcagctcacagttacccctctttggcctgagtctatctctacatctctaaaacgatttgcggccgaatgggataaaagagagcaattaatcgataatggcttattcccgtctaaatcacttttaatggatggcccacctggggtgggtaaaacacttgccgctaaatggcttgctgaaaaaatgaatttaccgcttttaacattagatttagctagtgttatgagtagttttcttgggaaaactggtaataatattcgtgctgttttagattatgcacgctcgtttccttgcgttctcttattagatgagtttgactctattgcaaaaaaacgggatgactcttctgatgtcggagaacttaaaagacttgtaactgtattattacaagcgattgatgagtggccgaatacatcaattttggtggctgctactaaccatggtgagttgcttgatcctgctgtttggcgacggtttgatcgtgttataagttttgattacccttcccaagacctcattaaagagttcttgcttagaagtgatgttccattgggtatcgccattaacgttagtgatagacttgttggtaagtcatttgctgttattgaacgctcaattaaacaagcaaaaagaaactctgttttggaaggtatacccgttaacaaagctattctagaagagttgtttgaggggcaatctattgctgacttaatcaaatttatgagtgaaaaaggaatgtctcaaaggcaaatttcctctgagctttcagtatctagagcgctagttaaaaaaatagttactgccgatggggtaaatcatgaacaataa

SEQ ID NO: 444922 - DNA, 2199 bp, Serratia marcescens
atgaacaataaaaacttacttttaggttatggtgagactttaactggacaggtcaaagttgataaagggaatggccctaaaaacaaaccatatacatatgaagagaatgcccctatcatcatgcgcgagttgcagggggtgcttaggaattttcaggagcttcctgatgtagttaagcctaatggagaagctattgctaaaattactctccatccagcattcttagcaaaatcatattttccgactttgatttttaagaaattttctttgcaaagcgttggtagcaaagctgttaaagttcggccaagaaaagtagttggtggtcgaggcaaacccaaagatgaatttactagtgcatgcatctatgtatctggtaggttagatggtttctcacgcttatttaatgcaatgaacaacgatcgtctaaataagggtgagaaaaaagaaataatcacactagagtccgtttcattttttgaacctagtgagaaaataaagtctattgattcctcagagaaaattaggaagctagaggttgctcttcatacgccaagcaataatgatagcgtgcttcggagctttattgagtacgccacatcatgcggggctgttattaatgaaaataaaatcattaatatgaatggcctaacctttatgcctatttctgcaaatgcggatgatgctgtgcgtgtggctgagttctccttccttagggcaattcgcgacttaccaagcttaagaattaacaatccagtttttacacgaacattcactgaacgtaatgagttgcaattacctaaagaaaaagccatcaatgaaaatattaaggttgctatttttgatggtggaatagggaatgcggattttgaaccatgggtgaaggaatatacattcaatgagggctctaaaaccagtggaaaattgctttctcacggtcaggatgtaacctctactgtattgtttggcgctctttctgatgatcaaatggagttgccaagaccttactcaaaaatagatcattaccgtgtgcttgataactcaatcgatggtgaggatgatgatctatttgatgtgttgttaaggattaaatcagtacttgacaatattgattatgattatatcaatttgagccttggtccaagatttccggtggatgatgatgatgtacacgtttggacatcaactttagagcaatacctgtcttcaggtaagacactatgtactgttgcggtaggaaatgatggatgtttgggggatggtttgaatcgtattcagccaccttcagatttagtgaatgcgcttgctgttggtgctgccagttcgttatcaaatgtatgggaaaaaagcgattatagctgtgttggccctggccggagtcccggctttgttaaacctgatggtgtcgcattcggtggttccaaagaagaaccgtttaaactatatagcccattcttaggtggtatggtgcaaactgcgggaacaagtttctcttccccattggttttacgtcaggcaattggtttggctgcaagtctgcagtatgatatcaccccattaacggctaaggcgctactaattcatcatgcagagaataatggctctgagcgcagtcatgttggttgggggcgattccctcatgatatatccgatgtgatttattgtgatgatgacgaggttaaacttatatatcaaggtgagctaaaaccttctcagcatcttcgtgcttctattccatacccagatattcccgttaatggccctgtgaatttaaaagccactttctgttttactacccctgttgatatagaacatccggtaaactatacaaaaagtgggctagttgtaacaatgagaaaaactcctaaagataaaattggagcgactttcccattgtttaatagtaagaatatttatgcaacggaagaggagttacgtgaggattctcatcgttgggaaacaacactacgaagcgaacataccttcaataaaggaacccttaaagacccatgttttgatgttatatactatgggcgcaactgcggcatgcctgctgaaatcgaggatttgccaaacttatcctatgtccttatcgtatcgctaaaagcgaaggatactcctgaactgtacaataatatccgtcagagatatcaaacgttgcaaccgattcaagtcaaacaacagattagattgcagtcttga

SEQ ID NO: 444923 - DNA, 660 bp, Serratia marcescens
gtgcaggccgctttcgtcgtcctgatattgcccggaccagcacaggttgcccgccgcgtcggtcacttccagcggcgcgctgttcagatcggtgtgataccagtaagtatctgccgagcggctgtcgcccgcctgctccagcgccgccagcgggctccacgggctggccggatcgtagctccagctgcggcggctgccgtcgtcgcgctgctcctgcagcaaccggtagccctgccacaggaaacgggtcgtctgttcggttttgcccttgtagcgcaccgccttgcggctgcggcggcccagcgcatcgtaatgatactgcgcctcgaattcgccctgcgggccgcggccgtgcgcctgcaccagccggttgtcggcgtcgtagcggtagtgctgttcgtacaggccgttgcgccggctgatcagattgccccaggcgtcgtaacggtaaaacagtttttgccagtgcgtcagccggttgccggcgatcggcgccagcggcaggtgcgcgtcgatgtcgctctgagggctgcgttcgcccagcaggttatccgccagatcgtacaccagccgcacgcccggtttgccctgattgggttcgcggtgttacaacagattgcatgctctacaataaacacttggaatattaattttctatga

SEQ ID NO: 444924 - DNA, 732 bp, Serratia marcescens
ttgcgggtcatccgtacagaacgcaacctgggaggggctgggggatttaaaaaagggtctgagtatatatcatcttttttgcaaccagattgggtgttcttatttgatgatgatgcataccctgcatcagatatcttggaaaattttacctgcttagacaaagatgggtataaattgctgtgttgtaaggtcatgacgccggcaggagttgtctgcaaaatgaatttaccttacaaaaaaattcctcatacatttatagaaaatctgcagtatagctgtcattcagaagactttttaccagatccagacagtgtgtgtgaagtcgcaacattctcttttgtaggcgcaattattcactgggaggtgttagtcaatcattatgatgaaatacacgaagagctttttatttattttgatgacgtattcttctcatgtcgattaactcagcttggggagcggatactctattgtccaaagcttgtttttactcatgacgtcatcctgaatgccaatatttattcaacctggaagctatattatcttgttcgcaatctgatcttgtcacgaaagatttttgttaataaggcaccttttacatccgcagctgtctttgctagagtgttgaagattgtgctgtcttgcgtagttcaggggcggagtttaaaatccatcctctacctggttcgcggaataaaagatggccttctcggtcgagcagaaaagcgacactaa

SEQ ID NO: 444925 - DNA, 882 bp, Serratia marcescens
atgaataaaaaacagaaaagttatgagcctctgtcttctttgttacagactcttccccgagaaatatctcaaagagtgtttcatcgactcgatgaagtgatcgcctatgaaccgacaatcggactgattggcaaaactggcgcagggaaatccagcctgtgcaatacgctttttacatctcctcctgccaacgtggacgcggtgaaggggtgtacccgttttgctcaacagtacaaaacctctgatggtctgaatgctctcaacattattgatttcccagggatcggtgaaacaccctcgcttgataagatgtatgcccatttgtaccaacactggctgaataaacttgacctgattgtttgggtactaaaagccgacgaccgtgcctggaatgacgatattcgttgttataggcagctggtgtcgcacggtgccgacccgacccggtttatcttcgtccttaaccaggcggataaaattgagccttgtcgggaatgggatgtcatcaatcaccaaccttcgttacatcaacaaaagaacctgcaggaaaaaatggctcaggtgaatgctgtgttttcgcctgttcatcctgttttagcggtatccgctccagaggggttcaatatcggcctgtgggttgaagccctgattaccgcattgcccgataaagccagtagtgcagttacccgtcagcttgagcctgtgtatcggacggagaaggtgaccaccacggcacaggagggctttgcccgtgttgtgggtgaaatctttgacaacagcgtggaggccctgctggagtctcatacactcagagcctggttaacacggatccgttatcgattgatctctctggccaaattgctctggcatcgtttcttttaa

SEQ ID NO: 444926 - DNA, 150 bp, Serratia marcescens
atggtggttagatatggattaaccaatgataaagaagtttatgcaagtttgaaacgttttgagctcaataatgttgagattaaaggggtggtattaaatgcggcaagaaagaattcgcatgacacgtataatagctatgtatatgaataa

SEQ ID NO: 444927 - DNA, 2232 bp, Serratia marcescens
atgactagttggagtaatttggagaaaaatgtccgtgaatattctcagtatatttggaatatgccagcaaatccagaaagaattaatggtgtgaatttcgattgtgttcttaaaatctccgaaattgagcatgttattatagaggttacagaaaacaaaagcttggataaaattagatctgacatcgctaagattcaagctgtaagaatgagcatgatgattaaaaatataatggtaagaccatatataatctgtggctttatcccgacgcaaggtatgagagacgcgggtaatgagtactttataaatgttataagcttcatggattttcaacgtatgttttttgatttttcagcttataacacagtgcgttctagtaaacaattcggtagtgcgattgatccattaacagggaaagatgatacatcagcatatactcccgttggctatttgcatcaaaagaaaggcgaaattgatgcagttgaaatcgctgagagaattctcaaaggcgagaaaataatcctcctaggagactatggatcagggaaaagtagatgtttcaaagaagtgtttaaaatattatcaaaaaaaagcaatgaaacgctcttatatcccatagccattgatttaaaagaagtctggggattggttagcgccgttgaaataataagaagacattttataaatttgggtatgagcgagagccaaaccagcagtgttataaaagcatataacggtgaaagattgtgtttcctattagatggttttgatgaaataggatctcggccatggagtgaaaacaaaagtacccttattgagctaaggaagcatgccttacagggggtcaaggatctattgagtaaaactggcgcaggctgtttaatttctggaagggatcactactttaatagtgaagctgaaatgttttcagcattgggtatggacgctaaaaattccacaatagcaaaatgcaagaatgaatttagtgtagaagagtttgacaaatatctacaactaaaccatatcgctgttgaattacctgagtggttacccaaaaagccgcttgttttgaaaacaatagcctcactaaaggttgataaggtctcagaactttttgagtcatctaaaaataatgaaataggattttggtttgattttattgacgcaatgtgtaaaagagactcattaatacatccaatacttgatgagcaaacggtgaaaaatgtattaatacggctagcaagtttgactagaaacaagcctcagaattacggacctctaacagaagttgaagtggttaatgtatttcatgaagttacaggtacttacccgaatgagcaatctactgtgatgttgcagcgcttgcctgggttggggcgcgtaagttcagaaactagtgatagaaattttattgatacattcattcttgatggattaagggcgctagatctttctgaaaaaattcagtccggggaccaaaggttatctgatctaaaatggataaatccactttattctctcggaacatctgttttggtgaaggagatagaagagaaaaatttaaaaacagcattcgttaattatattaaaaatgctctacacagagataaggtaaatagagtttctatttctgatgctatatcagcaatttcctcagaaggggatcaggaattaaatatgaacaacttgatgtttgatgaacctcattttggatttatcgattttgataatagtaaaattagtaatgtaaattttagaaatggaattttcgaatatgtcaagttaggtaagatagaccctcctggcgtaatcatgcaatcatgccatatcgtaagtttgtatggtgtttcttcggcaacagggttgccggattggattgaaaattgcactattgaaaattatgaatcggtagacaccttaacgtcaataaaaaactctgggctgaataaaacgcaggagattcttgtttccattttaataaaagtatacaaacaggatggtaatggcaggttagagcatactttaactaaaggtcttgctcatgtaaataaaaaaaacatgaatcaagtgttaagataccttattagcaacgggtttcttgagacgagcaaggacaagggggaaatgatatataaaccagtaagaaaattccaaggtagaattgaaaaaataataacagagcttaatagatcagaagactcaatttggaaatatgtaactagtttagaataa

SEQ ID NO: 444928 - DNA, 351 bp, Serratia marcescens
atgaactattgtgaacagtcggtaccatatacccgtatcaccgaacataagtacttctccccgtgggagcaacacgaagggtcggtttgttataaagagtacagtcgcgcctgtgaagaaaacgatattccttattacccgattcgccaggtcggcgaaatggcgttgttggagaagtatgtcgatttggctgaaaaagagcatgacattactttcatcggccgcttaggaacgtatcgctacctggatatggatgtgaccatcgccgaagcgctgaaaacggctgaaacctacctggcaggcctggaacaagaaaacgccatgccggtatttacggtcagcatcagatga

SEQ ID NO: 444929 - DNA, 672 bp, Serratia marcescens
atgataaaagatgagctttatgagttagtcttaactgatgatccgaaaggaaaattatatgtgagggattcagagaaaattgaagaaggggtcagtacaacggagtttgttgtgggatatggtgctatttcgatggtaaaaaaatcggaatcgatggcagctaaaggattggttggactggaacgtgtagatcttatccgagaagttgtatttgaaaatggacattatgattgggaatgtgttgttaatgatgttctgccaaatatatgtaaaggcaatgcacgaatacctgtttttcatttcttaaatcacgctaatttaattaatcccgatgggagtataattaatgaaacgggactctcaggtggcgttttaacccgattacatatcactcctgtaagttttcagtctcaaggctgggataaacgacgctctgaaactgttcctgaagttagaattggtgtcaatgagttatatcttgctcatgacttcggcttttttttaagaatgatgccatatatggaaccgggtttaatcaagcgtgatatggacgaattgcttaagatactgaaaaaacatattgatgaagcgatgagtattcaagcgttatcaagtaatttttgcaaattagtgtgtatttatgattatattaaaaatagttacaggtattga

SEQ ID NO: 444930 - DNA, 618 bp, Serratia marcescens
atgagccagcggaagtatttgacgcagtccgaagtggagcgtctgttgcaacaggccttggcagggggaaatgccgagcgtgactattgcctgatttacatgagttttatccacggctttcgcgtcagcgaagtgtgccatttgcggttgtccgatttggatttgcgggggcacagtttgtatatccggcgaataaagagcgggttttcgaccagccaccccttgctgaaggatgaattgcgggccatcagggcctggctggcggtgcgggcgggactgccgggggcggacagcgactgggtgtttttgtcgcgccaggggaacgcgttgacgcgtcagcgggtgtaccaaatcatcagccagttgggtcaggcggcagacatttccgtcgtgccgcatccgcatatgctgcgtcatgcctgtggatttgcgctggcggaccggggaattgatacgcggctgatacaagattacctggggcataaaaacatccgtcataccgtgcggtatacggcgagtaatgcagaacggtttgaaggggtctggcatcgcccaaaaaacaagcgaaagagtagacagttaggaccaaactgtaaagtagtatacgcaacgcgttga

SEQ ID NO: 444931 - DNA, 525 bp, Serratia marcescens
gtgattaatgctattttcgttggaaggtttgattatcagaaggggttcgatattttgcttgacgccatgaccagagttaagggggaagcaatttttttgactgccatcggtagtgctgttcatggcaaggataatccaagagaaatgatgcaaacatcatatacgggatggctcagcagtgatgagttagcaccgtatcttattaatgcagatgtattagtaatgcctagtcgctgggagggcttcgctatggtagcgttagaagcaatgagctatggcttgcctgtgttggcgagcaattgtagttcatttcctgaaatgattgaagatggccatactggaattctattcgaggctgaaaactcaaaagatttggctaattatcttaggaatacatctaaagatcagtgggctaaaatgggagagaatgctagaaaggtttttctcaaaaactatacctcagtgaaaatgtgtagaaatacgctatctatctacaactctttggctgctgagacgcagcgataa

SEQ ID NO: 444932 - DNA, 261 bp, Serratia marcescens; identical to SEQ ID NO: 439530

SEQ ID NO: 444933 - DNA, 192 bp, Serratia marcescens; identical to SEQ ID NO: 430676

SEQ ID NO: 444934 - DNA, 1188 bp, Serratia marcescens
  misc_feature (1127)..(1136): n is a, c, g, or t
ttgccacaaacggtagctgataagttccaaaataagaatacgttgagcagttacattcccattcgtacgcaaggcaatgattttgactggtcatcagtcgtgggcttagtcctgcgtggattactttgtaaaaaaatagaaaagtacaattaccaagattttactgcggattgcaaaaacaacttacaaaacaaattgggtgaagaggcattttggagtgtacttgaagatatgtatttcactaatgaaaatatattctcggtaacccctgagtttctgttgtttaagagccagaagagtcaagataacaagtacacgcgcgacatgcgaatggcatccttgtttattaacttacttcaaggacagcaaattgaacgatttgaatctaacttgaacttcctcgaagaggagtttcttaaaacgcttttagacaaaacaaagtcagatcgtgacaaggacttccaagtgaccgagtcaccatatttgccctatatagcagaggcgtttaaacgtgacctcgagtttttaactggttatccgaaatacctgttggatgagttcgagcgtttcttggcattctatggctttgcttacacggctcaattaagcctatcgttgtcggattggaaaacaggtgaagccccaaccgcgaaaccgctgtatttcatcatggatcatgagcgcgccagcagtgaacgtatccatatcaaaaagcacggttacaagctttttagcgaatcgtctttcaagctgtttcccttcctctctatgctggaaaatcttcaaccaaacccagaaaaattaaaaaaacctttgtggcaattggcaaaggatattaagagttcagagcggagtgatctagctgggtatattgaaaattacgcaaaaatgtttcgccacaacagaaaacttgaaacagcaatacctgaaaaagcagaaaccgcaattgattggttggaatatgctttgaagcttgctgaagaacagttcagagaccctaaaaccgaccgtccggggactatcaaaaaatatattaaagcggttgaagaaaacatggctactggcttcgtgcaagctcgtggtcgctctggtcgggtgttagtactcactcaagaccacattatttnnnnnnnnnncttactaacctggtggtgggtaaggaagaaaagcttcgcttccatgagctga

SEQ ID NO: 444935 - DNA, 507 bp, Serratia marcescens
atgtgcgcaaaacaatttgaatcgtttctggttgagcagtttttactgcacgcgaaaggaaacatccgcgcaggctatcgctaccagtttaactctcctgaccatgctaatagtcagcgacttttcgatgcgctattagcgcgaaaaggaggagagagcgaagatcgcaatggtgtagcgctgagctatttagacctagaagactgcaaagtggtgccagtgcttcatagcgaagatgcgtgtgaaacgggctttaccgaaaactacatctctaatttgcgtgacgaaatagcaagccaggaaggtccgttgaagggctgtgcactggtggtgattcacaatagtcgcctagatactctcatcaactcggcggaagatcttggccagtctggccatgccttttggacgaccaatttgacgcgattttggaagatggtgcgaccatgttcggtttcgagtctttatacaaggcagttgaggatggcgagctgtgtttcagcgagctag

SEQ ID NO: 444936 - DNA, 366 bp, Serratia marcescens
atgaaaaaaactctgatggcattgacctcggtagcaaccctgctgtgcgccaacggcgcggctaacgcagcaggcaccattcaaggcacgttaggcgtgacgctgaccatcggcgccggttgcgtcgtggggggcggcagcagcagcggttccgtcaacgacttcggctccatcagcttcggcacttactcttcactggccaacatcatcgacgccagcgccaccggcgcaggggggggccggtacgctgtcattgacctgcacgaccggcacagactacacggtggcgctggacaacgggctccacgtcacttcaggcacccaacgccgcatggccagcacggcaggcgcattcatcagctataa

SEQ ID NO: 444937 - DNA, 189 bp, Serratia marcescens
atgattcattgtggtcaaaaagtaaggtttattttcaaagagcatttaatgatgacagagattcagagatttttgggctatggtgcgcaatggggcttgagttactttcacggtcaactatctcacactttagtccgtgcttacttgctgagcctgataaagatcaaaaaaatctccttgcagctttag

SEQ ID NO: 444938 - DNA, 663 bp, Serratia marcescens
gtgacggtgccgagcctgtgcctgtcggcgcaccggcgcgatccgttcggcagccatgacgccgccacccgcgaacgggcgcgggtgctgatgagcaaggcgctggaactggcgacggatcttggcatccgcaacatccaactggcaggctacgacgtctattacgaacccgccgatcgccacagccgcgaacgctttatcgagggcatgcagtgggcggcggaacaggccgccagggcgcaggtgatgctgtcggtggaggtgatggacacgccgttcatcaacagcatcagcaaatggcgcgacatcgcccgccacgtcaacagcccgtggttcacggtgtatcccgatctcggcaacctcagcgcctggggcaacgacgtcgccgccgagctggcgctgggcatcggcagcatcaccgccatacacctcaaagacaccgtggcggtggggccgggcagcgccgggcagttccgcgacgtgccgttcggcgaaggctgcgtggatttcgcccacgcctttgccgtgctcaacgcgctcggctatcgcggtccctacctgctggagatgtgggcgcgtgaagacgggcaggataagcaacgcatcgcccaggccaaggcctggatcgaacaacagatgatcgagggaggcatcgcatgctga

SEQ ID NO: 444939 - DNA, 594 bp, Serratia marcescens
atgccgccgccgaattccggctgcgcgctgacgtacagcaacagcccggcggccaacaggatcagaccgccggccagcgccagcgcccccccaggccaccgcgctccaggcagcgggcgcgcgcgaacggctgaggcgcaccgccagccggcggctgtaatgcaccagcagcgccagcatggagatggtcaacgaggtgccgaacgccatcgccagcgcggagatcactccccagccgaacacgccgatcaccttggaaaacagcaacaccaaaatcgctcccgaacagggacgcatgcccatcgccagcacgatggcggcctgagtgcgccaatcgcttcccgcctgcagctcgctgtcgctcggcagatgccggtggccgcagccgcaattggcgctgtgcacatgatccgccgccagcggcgtcaggctgttgatgcgcagcgccggcgccgggcgcatcgccttgatcgccgcaaacaggcgtttcagcgcgcgccaactcagcagcacgccaagcagcatcaccaggataaaactgcccttctccagccagaaactgctttgatgcagttggcgcgaagagagctgtaa

SEQ ID NO: 444940 - DNA, 306 bp, Serratia marcescens
atgctgggccatgcttacctttgcccggttgctaaccttacacagctaaaaacggtcttcctgaatcagtttattccgcttttgcaggaatacttttatgaggactggcacaaaatccaactggtgttccgcgatatcgatgctaccggcaagctggtggaggctccactgattggccatcttaagttgactagtaaagatgttttcggctttacccatgatgactttgaagaggtcgttgaataccgtgtttcaactgcccaggaaattacgcccgactcgattcgcaaaatctacgaggattaa

SEQ ID NO: 444941 - DNA, 1209 bp, Serratia marcescens
gtgccagaaatattggcggttattgaacatagctcgctaccgattattgcagaaagagcctttgctcagcacgctttgggcattcatcatgcccgcttgctggaaaagctggcaccaaaacttcctgccggcacctttagctggggccatcaatcggttcgttttgcacaattttgtggcgtaatacagcttgatgatttaacactagaaatcctgcctaagatacatggtaaagaagaaaggtctgaatcatgccgtacagcattagtgcagatgctatattccgcccgaatcatgcgtacacataaaggggcgcaggcgggtatcaatactcagaaacatagcctactggatatttttattcagcacttttgccatgatttgcatacgcagatcctccagggcaagttacgcaattatatagaacaggaagaaaacctgtcattaatgcgcggccgcctggtgatcccacaacatatccggcacaacttagtacataaagagcgtctttattgtcgcttcgacgaattcagcgaagatatgctgctgaatcagatactccgctttaccctgcgtctgctgcttccctggacacactccggcaaaaccaaaaagctgttatccggactgttaatgcattttgacgacattagcgatgcgcccatcaccttgcaatcattcaatttaattaaaagcgatcgcattacccaacgatttcagcctgtacttgaacagtgtcgattgtttattgctgcagttaagccggatgtattagcgggcagcacgccgctgttctcattgctgtttgatatgaatcgcctgtttgaagcatgggtagcagaaaagttgaagccctgggcccaccagcaaggctggcatcttcgtacacagggtccacgaaaatatctggccatgcgtgatggcgattccccacagtttcaattacgaccggatattgcacttgttgatgataacggcgttccacaactgatcgcggatacaaagtggaaattactgaatgaagcagatcgcaaactcggtgtttcaagcagcgatatgtatcagctgtatgcctacgcagggcgctatgtggtaccccacttgcagctgatttatccagcacaagcgggcttacttgctcactacggctttacattacagggaatgaatgaatcaatgctggcagtgaaaacaatagcgattgaataa

SEQ ID NO: 444942 - DNA, 546 bp, Serratia marcescens
atgggtacatatatctcagataaaacagaaacatgttttgatgaatattctttaatcgaaaaagtcgaggatggctatgagattagtgtgtactcatttaaacttcatgcaggaaacccttaccagccacatatatcagaaagttatagcggtgatatttatattagctacttatattatgggaataattcttactacgaccgcaggcgtcaggaatacagaaaatatttatcattaaaagaaatacaccttgctattctaaggatatttccagatgaaagcaggattgcagtaggaataaaaaaagaaaattatagcaccgttaaaatatcttatgcgacagcggatgaagtatattccattgatattaaaaataaagaaatgttattactagataatatatcatgtctttatgatattattcttaagcatgagaacaccattaataagttggaaaatgaattagcaagtggtaaaaaagaattccaaaatatgaaattagatataaaagaaaaatgtaaatccattcttgatattattgattag

SEQ ID NO: 444943 - DNA, 165 bp, Serratia marcescens
atgcatcgcctgaaggctcactcgatcaaggtttttacccccaatgacgctatgcgttatataaagaaaaggcctgaaggccttgaggggcaagggctggaaggaaaaatgcgcaacttaatttatgcaacgttgattttgttattgttttttactaacttataa

SEQ ID NO: 444944 - DNA, 1047 bp, Serratia marcescens
atgagtcaggtaaaaaagaacagaagcaggcatgagcgcgtaattcacaaactaccaatcagtgtgggatcggatggctatgataaacaaaatagctatgtaatgaaaaactatataacagaaaattctttatgtagtatttacgggcctagtggatcttataaaagcttccttgctatatcttgggcgtgtcatattgcaactggtattgaatggtctggtaatagagttaatcctggcgtagtgatttatatcgtcggtgaaggcgggatcggtgtcagccgaagagtaaaagcatgggaaaacatatacaatagaaaagtcagtaacctcatattagtcaatcggccggtgtttcctgccgatctctcagagcggcgtgatttacttaatggaataaaatacgttgaaggtaaatgccgattacctgtcagattgattatttttgatacgctagcacgttgctatggcaatttggatgaaaataactcgcaagatatgggacgattgattgttggatgtgatgctataaaaaatgaaacatcagccagtgtccttcttgtgcatcattcgggtaaagatgaaacgaaaggcgccagaggttcaagttcattaaaagcagcactggatgctgaatttaatgttaaaaaaggcaaagaaaatcaatcgctaattttgtcctgtaccaaaatgaaagattctgaagaaccaaaatgccatgcttataaactgcatgaatcagagttatttatagataatgatggtgaaaggatttcttctctggcggtcattgatcatgctcgaaaagaaataaacctataccctgaattatcacatgtttcaaacctgactgataatcataaagctgtttgggaaacgattcataaaaatttttcagacggtgggagatgtactaaaaaaatgcttcgtgatgagttgaaacaacgggggattgaggttaagcactttcaccgatggatgaaaaaatttattgatgatggaatattgatagaaaatggtgaagaactactactcgtaaaacagtga

SEQ ID NO: 444945 - DNA, 780 bp, Serratia marcescens
  misc_feature (759)..(768): n is a, c, g, or t
atgagccgctataccggtaaagaacaagcagaccaaattttagaagcagccagtgaatggcggcaacgttgcctgattaatggcggttcacttttcagcaataaaaacctgtggggcagtcagcatctggccgaaattgagcgcgatgtggtcaacagccagctagagcttgaaggcaactttatgcatcgcctcaaagaacaactagccggcgtctctccagaggcgaaacagctcactgcagaaatgctttggctactgtttctttgtgccagcaatatcagcgtcagaaccaagcgtgaacagataagcaccatctgggggcttgctaatgaaccgctaaatagtgacaacccattgctaaaagatacagtgctttcaggcgtaggcagtgctgggactggatttaacaccttccgggcacgtgagtttgcctaccttaccaacgttattaaagctctattagcacagccattagctgaacgagaaatgcgcctgagtgacggcttctcctttgcagagtggctaagcgtaattcccgagaatgccagccgtcagttccgccatatgttgatgtttatgctgtttccggatgattttgaacgcatctttagcagcaacgatcgccgtactatcatccgcgccttcaagccgcagcagaaagaagagttgtcagctgtggcgatggacagaacgctgcttgagatccgtcgtgaacaggaagaaaaacagaatagtaagcagctcgacttctacgtnnnnnnnnnncgcgcccattga

SEQ ID NO: 444946 - DNA, 1026 bp, Serratia marcescens
gtgaataatatcatatcaataaacagcatcgactcgcttgaaagcgtatttaaccgcctgcaatcaggcgaggaaatattaattgagcagctaaaggtcgagttatttgactctgtaaaaatcaagatttttggtgatcccgcgcgttataatgggacgctgccagcatcgctcgcgcaagggctttgcgagtttcaaacagagatgtataaagtctatactctaatcaggtataaaactgacaaccttcagagactaggcagtgaagatagagaagatgctgaaataatcttctccataaacccaggatgcacagagattataactgcgcttactgatctagctaaggcttgtggcaatgcatttgacaaggtgacacaagggatgagcccaacccagaagacaacatgctttctctttgccatagctctatttggcggagcatgggttggcacgtcatatctaaactcagagactgaaatcgctgtaaaaaaagaagagacaaaacaacaagaagccaagattaaatccgagaatgagagactaaccatccttaaagacgggatgcttcagtccatgcgcgaaaatgctggcgtagataccattgagagagctgagggcattcaagagcacgtgaccaaagcctatactggcgtgctaaaatcagctagcgatgctgatagaatcgaaattgaaggtgcgaccaaggttaacctttctcaaaagcatgtccatgagcttatcaaaaaccccatcgaaaaagccaagaaggaagagcggaatctcgaagtggttattgacagcatcaagaggacatcagaaaaattaactcttagctgtcgacagccatcaagcgatgagagcttccctgtctccgtcgacacatcgtttatcgatgacaaagatgaaatttcgttgctgttcgatgccatgaaagaaaacaaatccgtgaggatattgggcagctatacaattcgcgctggcgtcatagagaaaggtaacgcctcgacaatatcgaaggattaa

SEQ ID NO: 444947 - DNA, 933 bp, Serratia marcescens
atggttactaatataccaagcgctgatgagttttacttggcaggtgaagagcttttaaattttgcatgggatgcagttgcgagattaattaagaatttggatgaggcatactattatggtgtcgataaggatgaagttagtgaacagtattgggaaggtgcgaacaggactctctctacatctttaacagttatccaacaaggagtggagttctttcttaaggggaaaatatcttccatttcaccataccttctaatagctgattcattatcaaaactacctaatgtttcgtctgtgcctgctattgtggacttttctaaattccgcacacttgattcacaagatttaattaaagtttataacaccttttctgacgtgcccttggaacaaggcattgaagagcgttttcacaatatgcgagagcgacgaaattctattatgcattctgtgaccgacacaacagacatacaagtaaaggaggttgttgagtatttgctatttatgtataaatcatttttcccatataaaacgtgggctgaaaggcgagtattctttttgaggcagtcacctgattccgaattagcggctgaagattttgctatcgtagcaacttgcatcgagttttctgaggtaataaaaatgctatctcagacagaagttttaaaatatcttggggtagaaaaaaaacaaaggacctatttttgtccaaaatgtctagatgaaagtcataaaaataataaattagaattaaaacttgcgagacttcgttccaaaaaacctgatgaaacacttctatattgccccatatgcaacttggaacatagagtgaaaagagatgtttgctatattaacaatcaaacatcaactagtgatgcatgccccggggatgttatttcagttgaatataataactgtctaacttgtggttattaa

SEQ ID NO: 444948 - DNA, 423 bp, Serratia marcescens
atgagttacggattcagtgcgtcaaccggcgcattctatgtttatgaggatcgcgccagctatgaagaaaatggcaattggccggctgacgtaaagcctgtttcagacgaagtatggcaggcttattgcggtcaggggccagaaggaaaagtacggggtgcagaccgtaaagggctgccttgttgggtagatgctccgccgccaacaaagtcaacgctggttgccgctgccgagcgaaagaaagcggagctgctcgacgttgccggtaaagccattgcccctctgcaagatgccgatgatttggcgattgcgaccgaagaggaggcggcgcagctcaggctctggaaaacttaccgggtgcagctcaaccgcatcaatccgcaggaagcgccagatacagattggcccctgccgcctgcataa

SEQ ID NO: 444949 - DNA, 402 bp, Serratia marcescens
atgctgaagacacctgtagctactgccattgcggccctcaatccccatcacaatcacattcaagattttcatgtgctggcgcatctcaatcgactgcgcgccttcacctggggtggccgtcgttgcgggaaaacctacgcagctcgccaacaggagctgatccgcgcagcgttcaagctttccgcaggcgcaacgctgcgacttcttcatgccagaagaaagcagcaaatggggcaaatatccagctacgactcagccggcggcgaagacaagtctgttgagtgcgtatataagcgcaactacgccactggcggtttaacattggtatcggtcaatatttcgtcgggtaagtggccagactcgccgtggttttacttagacgagtggccgtggcgtgagtaa

SEQ ID NO: 444950 - DNA, 822 bp, Serratia marcescens
atgaacaagcccgcccttaagtggctcggaagcaaggcccgcatcatcgatacactgtgccagcacctgccggaaggtaggcgtctggttgagccgttcgtcggctccggtgcggtgttcctcaataccgactatgacagttatctgctgtgcgacatcaatgccgacctgatcaacttccacaacgtcgcaaaaaatcagcctgaagtgctaattcgtgaagcgcgccacctgttcaacgaacacccggatcaggcgggctattacgccgtacgtgctgacttcaatctgtgctgcgacagcaatttcatctaccgggctgcgcagttcctctacctgaaccgccacgggttcaatggcgtttgccgctacaacctgcgcggcgagtttaatgtgccgttcggtcatcgaaaagcgccttatttccccgaggcggagatccgggcatttgccgagaaggcgcaggccaaaaaagcggttttcctgtgctgcaccttccaggaggcgattcgaatggcgcaggccggcgacgtgatttattgcgacccgccctatatccctgccagcaccaccgccaacttcaccagctaccacaccgacggattcaccagcgcgcagcaggaaaagctggcgcgcatgctgcgcatcgcggcaaaacgcgggagccacgtcgtagcctcgaatagcgaaaccgcagccgcgcgggagttgtattccgatttcaccatcacaaccgccaccgcacgccgttctgtcagcgcaaaagctgcaagtcgtgcaacagctggcgagatcatcgcaacaatgagggcttctgcatga

SEQ ID NO: 444951 - DNA, 870 bp, Serratia marcescens
atgacaccacaacagcaagcgcagaaatggttgcacgaaaactgcctgattctggataccgagaccaccgggcttggcgaggacgccgagatcgtggaaatcgccatcatcgataccgccggtaagacgctgatcgacacgctggttaaaccatcaaaaccaatcccagctgaggcggcagcgattcatggcatcaccgacgcgatggtgatgaattccccgaactggagggatatttgtcacgagatagatgtgctcacgtcgggccggacagttgttacgtataacgccagttatgacgccaggctgctcgatcagacagattatatttggggaattaccccagagttaaaaaacggcctatctgattttcaatgcgcgatgcgagcctatgccgaattctacggccagatcagcgagcgcggcgggtacaagtggcaaaagctgaccaccgccgcagagcagcaaggcgtcattatcgaaggaacgccgcatcgcgccctttctgactgtctgaccactctcggagtaatcaaggccatggccgccggtggctctcgttacgcaccgcaggggctgagtgcacaagcggccgtcgacatccttcaccggctgtttgttgctgatcctgatgcgatcactgcattggtggatcatcgcgtcgagtgtactgaatattttgctgggatgacggttgcgactgtaggacggcgtgccgacgatgtttatatcgtaggtatgattgggattatcaacgcactgatttttcccgaagtaattgcagctatttacgatggtaatgagctgacgggatttgctgttgctgacatttccgcagaaggggcgctgtatgaacaagcccgcccttaa

SEQ ID NO: 444952 - DNA, 141 bp, Serratia marcescens
atgacaaccattttatctatcgcggcagcggggctaatggtttttattggtctgtatgtttggttgctacttagcttttataaatcttgtcgtttttttaatgagcaagatttgccgtatgaacttcgtaattatgactaa

SEQ ID NO: 444953 - DNA, 198 bp, Serratia marcescens
atgactcacatagccgagaataaagagttggtaaaaatgctgaccgatgcccgtcgctctgagaggttacagctgcttgaggtattggatagcaagttggatagattaaaagctgatggtgccaacgctgatctaattatttccacactcaaacggtgggcctctatccgtcagtcagttagtgaggaggcgaaatga

SEQ ID NO: 444954 - DNA, 606 bp, Serratia marcescens
atgagtgataagtttgttaagaaggttattcaggggaaaataaaaacaccaatgcgtgctgattttaatcttgaaaaatggagtcaagagtggtctaaagttgaggaaaactcttctgagagagataaaaaaatctttacgatgggtataatcatggatggagtgctgagggatattagagaaaaactcactgaattatatgggcgagcaccgaaaacaaactatgaaaaactgatgatatcatatattgcaagctctaataggacatcagccgttgcgcttaagctagcaaaaggaacatcagcaaaaaatgtacatgacataatgctaaaaggaaatagtttaggaagcaaacaaagtttaggagagattgtccatggtgctgtcgatggttttcaactcgcgataagagaatgcataaaaggcattgaagataataatcaaatagtacgttctgctgacccaataaatgaaatggagtttatccaacaagaaagctggttatctcagttatataatacttatatccatctctggcagtgtgttttatggggtgactataatttaatagaggctgataatgaaaaaaaaaatattcagcattga

SEQ ID NO: 444955 - DNA, 1449 bp, Serratia marcescens
atgaaaaaaaaaatattcagcattgagcaaccaaaaacaccatttgaaattgcatttaatatcagcagccagagaaaagaaaaactatcatcccaaaaggcacttatcgctattcaacctgatatagcctcggttttcaatggtgataaatttgtttttattattcgagataataaaaaaagagtagcgaaggttgccccgattagtaatgcaacaaaggaattgataacactaaacgcactttggagaatggaggagcttgatcttgaaagtcatttccctacagagtggttaaatcatgactttggtaaaggattttgcttgtcagaaacattgagtgtaatgagagtattgatgctaatcgctaactctgaaactgagaaatatccagaagatgacagtatattcaatgtgaataaattaagggagttttgcccaaccgttcaagccagctcattagagctagccttgtgtgaagctacagacattacagtggttaaggtaagtaagatacttgattttctaacatttagctcttctccaactggagatctatggtgtcagccactggtaaggttaaagaaaaataagtatgcgttattgactagcgcgttaaattcaccagtgctattcaggcttttcgagcgttgggcaaatacttttgaaattgatctcagccaaaaaggagtgatttacgaaacaaaagttgtggatgaactaaatagcgccatcagaaaaaatgaatttataactgactatgatagcgcaatatccaaaagaattaaggtaaaaacaggtgaggaggagattgatttattagcaagaattgatgacttgattttgattggtgaagcaaaatcaatagttactactgattcggaaatatctaagtttcgaacgtctgaagtgcttcaacatgcgggagaacaggttgtaaggaaaactgcgtttttaaaagacaacttgcagtctgtgttcgaacgattaaattggaattatgatgaaaataaagattataaatttgcaggattcataattaatagcagccgtatttttgtcggtcatgcatttaattccgtaccggtaattgatgaaaaaatacttcaggcttattttacatcaaatcaaataaatctgttaactgtagcttcacaagataagttgaaaactatagcttggtataggctttacaataatatcaatgaattaaaggataatttcataaggtatattgaatttccgccacaattaaatgatgacacgaaaaattatgagtacaatgaaattggctttccgtatatgaaagaaaattcttataagatttcaaaaaaatatcttttatttaaatctggcagtctgttagcgcccatggaaaaggaaggtgctttcccggtgataaaatcagatgattatgagttagagatcaacaatattgatgtgagcatttga

SEQ ID NO: 444956 - DNA, 489 bp, Serratia marcescens
atgaagaaatgtattttgccacttttagtggtatttccagcaacagtcttggcatgggtaccgacagaccctttcaagtatcctgacgagtacacaaccccgtataaccagagtgattggaacaaagctaccccatatgaaatggttctcttctacaacaacaatacagatcagttctcaatggcattccgcgctcttcgaaacgatagactgatcagattttcgagtggggatacgccgaacaacgtggagatttctggttgcaagcaagaaatgaaaggttccttagaatatggaacagggttaccaagactcacgctgaaaactgcaggaaaccgtgagctgaaaacccttttccttgaatgtgcagatgtcttcttccgtgtgtccgatgagaacagtcaacaaacctacaagcccgtcgctggaagcataactcggatgcaatggagagccttagttaaagacggcactatttctattaaatga

SEQ ID NO: 444957 - DNA, 336 bp, Serratia marcescens
atgaaaaaacgcattgcaattattgccggcgccgtgagcctcacgctcgcgctgtcggcctgtaccaccaacccttacaccggcgaatccgaagccggtaaatccggcatcggcgcgggcctcggggccgcactgggcgccggcgtcggcgtgctgtcctcttccaagaaagatcgcggcaagggcgcgctgatcggcgcagcggccggtgcagccctcggcggcggcgctggctattacatggacgtgcaggaagccaaactgcgcgacaagatgaaaggcaccggcgtcagcgtcacccgccagtgtggggtggcaatcatttccggactatga

SEQ ID NO: 444958 - DNA, 612 bp, Serratia marcescens
ttgaattcaaatagttatgatgataaatccgcagatggcccaaaaatccaagaacggatttttgtcgagtcgggaatagtccatttcggacagcgcctaaagctggctatggaaaaggctggtgggttaacaaacgttgctctagcagagcgaacagggatgtcagaggctgttatacgtagctacctcaaaggtaagacatatccaacggttgatagattggcgcttctggcttacgcctgcgattgctctctggagtggcttttggtagggcatggagaagataagtttgtttcgcacaaatcagcgaccatcgccgataaacacgattgggagtcgctagcaggaaaccttggcgaactgttgatattaatgaaacgcatgacggaacaagaaagagaagctcttttgaacattgtctttaggaaggggataggtcttgttttaagccttgataatgaaagaaatgttagccttctacagctacctgactcagttaaagaaggtgtgttaaaactcgctagtgcaccagatactgccatcagagagagtttatcgtcactggctgaaaatgcccacacagcaagtgtagcaaataaaaaagccgtttga

SEQ ID NO: 444959 - DNA, 381 bp, Serratia marcescens
atgaatgaccatctttttcgaaccaaagcacctgaacttctggtcgacctggccgcgcatactgccagctctatacgtcaggtactggatgtttctcctgaagtcgcagagcaaattggccaggccgttgccaataatatgatgcgcgtctgggggggccagaacgtctatatgccgctggggatgtcctggaaacttagccagcgtgaccgcgatatcttcaatgaatgtaacgggcggaaccatcacgaactggcgcgtaaatatggggtatcgttacaatggatttatgccgttgtgaagcgcgttaaaaaggaagaactggaacgggttcaggggaatctttttgatgatgcgccagagcaatcaaacagacgttga

SEQ ID NO: 444960 - DNA, 540 bp, Serratia marcescens
atgatgctcgttattgctttatcctgggcgcactatgcggtgcgctttgccatctgtttttctaccgctggcatgaaaataacgcacctgaccggccggaggagcaacgttatgactaaggcaaaattacttcagcttattcatattgccagtaaccaattacggttggacgaagatacctaccggcaaatgctgtatgcttattcgggtaaacgttcaacgcgtgatatggatattatgcagctttcccgggttcttgatgccatgaagcaaagaggctggaaagtaaagccggctaaaagtgctaaagcgccaataataaaaacggatgaacttcctcaaattaagaaattgcgtgccctgtggttaacactcgctgataatggtgcagtgagagaccgttctgaaaaggctttattggcgtgggtaaagcgagagaccggcatagataacctgcagtggttgtcaaacgacgatgcgagccagtctattgagaagttaaagaaatggctcaatcgagtgacgaggaagaagccatga

SEQ ID NO: 444961 - DNA, 693 bp, Serratia marcescens
atgagtgatatccaggcgcgcatactcgacaagttaaagaaactactggcgctatcaaagtctgacaacccacacgaagcggccctggcactgcaacgtgcccagaagttgatgggcgcctatggcatcagccagtcagagctggaacttgccgactttggggaagaaatcagtgagttttggccggtgggtgggcagcgccctcctgcctacatgatggggcttcttggcatcattcgcaccgctttcggcgttgagtccattattctttcgggcgtaaaaacccgcatcacattttgcgggccgcagacacgtgccgccctggcggcttacacattcgaagtattggctcgccagcttatcagggcgcgtcggacctatctctccactcaaaataaacgcttaaaaaccaccaccaaaaccagccgtggggacaagtttgcagaagggtggatcattgctgtcttgaatgaggtcgagaagctggcgatgacggctcgggaagaggagctgacgcgcctgtggctgaccaaacgctatggcgccactgagtccgtcaatggtcgtgaagcccgtaatgccaggggcacgcttgaagcccgtcgtgatggttatcgtgaggggagcaaagttcgcctccaccagccggttgacggccatgagcaagcaaaacttggtgaggtcggatcatga

SEQ ID NO: 444962 - DNA, 282 bp, Serratia marcescens
atgccgaaaaataacgcccccgtccgccttgaactggccgatcacggccaggattttctctggttcattgttcacaacggtgttattgccaaggccgggccttttcagaaccgtatctggagcggtaaagcggtactgaatgccgagttcattgtcgggcagcaggttaaattattgataggaggcgaacgacgattcatcaactacccgattgaaagcgtaaccgtgttggatgggcttgaaccaaagtcaaacgccatacaagggggttcccatgagtga

SEQ ID NO: 444963 - DNA, 279 bp, Serratia marcescens
atgactgaaaccgaactctacgcggaagccatgcgccagtatggctacgaagcgcaactttgcaagttggccgaagaggccagcgagctgtcggcagaagcgtgtcgcacactgaaccacagcacgctggaacgtcgactggccggcgagatcgccgatgttgaaattcttatcgcgcagttccggcagactggcatggtcacacttattgatgcccgcaaatcagagaaactgcaacgcctggctaaccgtctgggggtgacttatgccgaaaaataa

SEQ ID NO: 444964 - DNA, 204 bp, Serratia marcescens
atgacgattaactgccgcaatccccgctgcaactcgccggtcgaaagactggcgctggttcaggccaatgtgacccagacgccggagttcggcgactggatcgttgacctggtgctggcctgcccagcatgtggccaacaatacgccaccgccctggcgaatagcgacctgcaacccatccatagcgaggcttatgatgactga

SEQ ID NO: 444965 - DNA, 189 bp, Serratia marcescens
atgatttacccccaaattcagcgccagcgccgcaaggtggaaaaacgcatcaaccgcgccatgcgcctggcagaagaaggccgcctgggtactgctcgcagcgagttcaacagcgcagctgtagagctggcagccattaccgcacttattgacgcgcgcctggctggtgaggtgccccatgacgattaa

SEQ ID NO: 444966 - DNA, 525 bp, Serratia marcescens
atggcaaaaggcaaaaagtcgcttaaagcggcggcggcttcgtatgcgccgcaatcccgggatgaggttatttccggcatcaaacagattggcgatatccagcgcgaaataacgcgtatcgaaaccgaaatgaatgacagcatcggccggatcaccaatcagcatgctcccgtcattgaagcgctgagcgctcaactgtcaacgctgcaggctggcgttcaagcctggtgcgaggtcaaccgcgacacgttgacacagggaggcaagaccaagaccgccaaccttatcaccggcgaggtgagctggcgcaaaggcaacccgtcagtcaccatcaagggtgcagaggtagtaatggaaacactaaaacgcctcaaattatcccgatttattttgaccaaggaatccattaataaaaacgccattctctcggataaaaacgccgtcaaagatattaaaggcatcgttattaatgacggcaaggaggtctttaatatcgcaccgtttgagcaggaggtatcgaaatga

SEQ ID NO: 444967 - DNA, 288 bp, Serratia marcescens
atgagaaatcgactgattattccctgtgatgcgatgcctattcaaattcagttggcagcgaccgggcaggcaatcaccaaactcaataccctggggttcaccgtcgaccgtatcgagcttgacggctacacgcggccgaccattacggtgcaatatgatgggcattgccgtcgtaagcaggataacggtgaagccgttcgctacgcccagggcgtcgatgaatgtggtaaatatgagaaataccaaattcaaatcgataattgtcgcgtgagctgggaggtcaggtaa

SEQ ID NO: 444968 - DNA, 546 bp, Serratia marcescens
atgaccagtgagagcaagtacagcgaactgaaagcggcggcgctggccgccaccgccgggccgtgggccgcagaacttaatgaagtctgggttattagtgatgggactgcggatttcatgctgactgatattttcggtgacaacgaactatcagcccaacaggattgcgcaaacgcgcgtttcatcgcagccgctaaccctgcggccgttcttgaaatgctggcaggactagaagagaaagaccgggagataaatgaatggaaacaaaattgtaaaaatgcagagaaaggcagcaaccgcctcgactctatgctgactgaatcagttcaggcactgaaagcggcagagaagcgcaacgccgagctggaagccagcgagacgcagctgatccaggaacgtgataacgcagaacaagcgcttgctgacatgtacgaggctgcaattggcgaacgtcctgagtggagtaactggttcggattttctgatgcggtagaaaaagtttcgcagacagcttatgtttcaaaacaaaaaaaggatgaaaaatga

SEQ ID NO: 444969 - DNA, 189 bp, Serratia marcescens
atgaaaaacaacatcgtaattacgggctgtgcaaccgttgaattccgccgcgtaattcgtggcgttgataccgaagaaaccgccgagctggtgaatagccctgatttggcagcaaaccagattgacctggaacattgcttccagattattgaagtaactgatttagacatggaggtaaacccacaatga

SEQ ID NO: 444970 - DNA, 1197 bp, Serratia marcescens
atgctggtactcaaacagcgtttacaacagcacggtctgacccagagtgcgctggccaccgccgtcggtatcagcgaggctgcactggcgcaaattgtcaaccataaccagtggccgaaacaggaaagcgacgccgtcagggaacggatttgcacggtactggaaaaacagggcatgaccacggcggggtgttttgaggtggtacgggaaagcgagacgccttcccgtaccggtacgacaacaataccttcatccatcatccatgaggacgacgacatgatactcagaaaacaggtgctgacaccagcagcaaagaaacattttggcctggtgcgaaaccccttcgacgactacgcgctgcgctcatccgacgacgtgttcaagtcgccggatattcactacgtgcgcgaggcgatgtaccaaaccgcgcgtttcgggggctttcttgcggtggtcggcgaatccggctcgggcaagtctaccctgcgccgcgacctgattgaccgcatccgcaacagcggtgacgacattacggtgattgagccttacgtgctggccatggaagacaacgaccgcaccgggcagacgctgaaggccgccagcatcgccgaggccattattcgcgaagtagcgcccaccgagcggccgaaactgtcgcgtgaagcccgcttcagtcaggtacatcgggtgctcaaagagaatgcgcgcgccagcagtgccggtgggagagataacgcccacgtgctgattattgaggaagcgcattccctgccccaaccgacactcaaacacctgaagcgctttctggagctggaggacggccaccgcaagctgctgtccatcatcctgattggtcagcccgaacttgaactcagcttatccggccgcaacgccgccgtgcgagaggtggttcagcgctgcgaagtggtcaacctgccgcacctgggcgacaaccttgaggctttcctggcgttcaagttccagcgcgccggcggtgacgtcgctaaggtgctggacgccagcgccatcaacgaaatccgcaaccggttgtgcctgagccgcaatggcggacgggaaaccgtcagcctgctatacccgctggccatcgccaatctggtgaccgccgccatgaatatggccgccagagacgacatcccgcgtgtggatgccaacgttatcaaactgacaggtaaatag

SEQ ID NO: 444971 - DNA, 1806 bp, Serratia marcescens
atgaattctgtccttaacgaacgtctggtggccattggcaacgcggttcgccatgcgccgcacggccagaaagagtccatctaccgcactgcgtgtgaagagctgcagattagtcgcgccacgctgctgcgcaagctcaatgagacgacctggcgtgaacgccgtaaacagcgcagcgacgctggcagtacgtcattgtcacgcgaagaagcactggtgatatcggggacgctgatggaatccagacgtaacaacaacaagcaactctacagtctggggcgtgcggttaaggccctgcgagcgaacggcatgatacaggccgggcgcattgacgcccagaccggtgagttttacccgttgtcagacgatgccattcgccgggcgctgtacgcctttcgcctgcacccggaccagttgctgaaaccgacgccggcgctggagctcgcaagcaacgggcccaaccacgtgtgggagctggacgcctccatctgcgtcctttactacctgaagaaccccaacaaacatggccgccaggcgcgagataccggcctgcgcattatggagcgggacacgttttacaagaacaagcctaaaaacctggagcgtatcgtcaatgaccgcgtctggtcattcgagattgccgaccataccacccactggatttacgccgagtaccgttttggtggtgaaagtgcgcagaacttcctggaagtgatgatcaacgccatgcaagaccggcgcagcgagaacaacggtgacgtactctgcggcgtgcctgaaatcctgttcaccgaccccgggtcggcgctgggtgcggcgcccctcctgaacatgtgccatgcgctgggtatcaagtgtatccagcacaaagcccgcaacgcccgcgccaccggtgcggtcgaaaaggcccgcgatatcctggaacgagattttgaagccggcctgaaattcgtcagggtggatgatatcgacacccttaacgacctggttcgccagtggcgcatcgccttcaacggcaaggcgatacacagccgttatggcaccaaccggacggcgaaatggctggagattgtcacctccggaaaactggtgctgccgccgccggttgacgtgtgtcgcgagctggcgatttcagcgcccgagacgcgcacggtcaccaacaagctgcgtatcaagttccgcagtcaggaattcagcgtcagtacggtgcccggggccaatgtcggcgacgaactgctggtcgcgcgtaatccttggcacgagaacgaagcgcgggtcattgtcaccggcgaggatgggtttgagacctactacccggtgatggcaatagagaaagaccagtggggctatgcggtcgacgcgccggttatcggcgaacgctaccagacactacagcagagcgatgccgagattaaccgccaggaagtcgagcaagccgtctacggcacacagacgaaggaagagaccgagcaggcacgtaaagcgcgcgaactgccgttcggtggacggttcaatccgtatatcgaacaggaaaacccggcgttgccggcctatctgccgcatcgggggcgcgcttcggatgtccgtacgccgttacctgaagagcggcgcaatccgctggaggtggtacgcatgctgcgcgagtccttcaaggcccagggcaagacttggcgcggcgagtattacatccagttgtcgcagcgctacccggagggggtgccggtgtccgagattgatgccatcaccgctgaatacctggcgctggcgggcgacgtagtcgtgagactggcccagggccagtcctga

SEQ ID NO: 444972 - DNA, 918 bp, Serratia marcescens
atggcaagacctaaaaacaacctgcaggtgattgattccatcgaaggcgcgttgccccaggggctggaaggtgatctcaacgcaatcaacgagcaccgccacctgattatggaacagtttggcgagggactgccttatgatcgcagccgtatcgtgcacgagacgaagttctatatggcacaaagcgcagaagcgatgttggaagcaggtaaacgacttctcattctcaaagaaaatgaaccacatggtgatttcaccagaatcgtcgtcgatgaactcaatctttcagacaggacggcacaggtcatgatgaaagcatcgattaaatatctttcaccgcagttgggttcaaaagcgcagacgtttgcggttttgggtaaagccaagctgttcgaactgatgaccgaagacgacgaagagctcgccgaactggccgagggcggcaccattgccggtctgacgctggatgatgttgatcgcatgtccgtacgcgaactgcgcaaggccctgcgcgaaaaacgcgacgaatatgacgtcaaatgccgcgtggtggcacagaaagatgccgaactcaatgaaatgaaagaacaaaagtttcgcaatatccccgccgacgaggaaatcagccagctgcgcacctccctgcagctgatggctgacagcctggtgcgcgaaacgatgggggcaataacctccggctttgagcgcctcgaccgcgattacgacgaacgcggcgtcccccatgccggcttcatggccgggctgctgctggacttcgagcgcgaaattcaatgcctgcgcacccgctttgacctgccggagacccgcgaacccgaggtgccggagtgggtcaagcccttcaccgacgacgcgcagcagactctgcctgtcgatgatgacgcagacaacaaacagtaa

SEQ ID NO: 444973 - DNA, 318 bp, Serratia marcescens
atgagttcaagcccatcaaccaacacctctcagaccatccgtcgggccattctgatcatgaaagcgctcaaggggcattcgctggatggcgtttccaataatgagctggccgttgccctgcaggagtcgcccgccaatatcagccgaacgttgaacacactggtaaatgagggcatggtgcaacgcctcccgaccgggcgttacgcccccggcatgcaccttctttatatcgcccagtctttctccaacgagatggcatctggccaggcccgtatcgcggaactcaaccagcgcgtgatggccggcagcaacaactaa

SEQ ID NO: 444974 - DNA, 186 bp, Serratia marcescens
atgaccccagaacaggtcaaaaatcgcttccgtagccagggccgaaccgttacggattgggctaacgagcatggctacagccgtaacctggtgtatcaggtactaaacggccagagcaaagccaactacggaaaagcccatgagatcgccgtaaaactcggtctcaaatcacaagccgctgcatga

SEQ ID NO: 444975 - DNA, 771 bp, Serratia marcescens
atgaaagaccaggcattacccatcgttccctggatcggcggcaaacgccgtctggccaaacatatcctgccacttttcccggcgcatacctgctacgtagagccgttctgcggtgctgctgctctgtatttcctgaaagcgccaagcaagaccgagatcatcaacgacatcaacggggaattggtgaatctctaccgcgtcgtcaagcaccatctggaagagtttgtgcggcaattcaaatgggcgctggttagtcggcagatattcaagtggctgcaggataccccagaggaaacgcttactgatattcagcgggccgcgcgtttttactacctgcaaaagcaggcgttcggcggcaaggtggccgatcacacgtttggtacctccaccaccagtgcgccccggtttaatttgttgcgcatcgaggaagagctgtcgatggcccacctgcgtttgtcgcgtacggtgattgagcacatggactggtcgacatgtatcgaacgctacgaccgaccgcatacgctgttttattgcgatccgccgtactggggcactgaaggttatggcgtggagtttggcctggataattatgatcgtatggcggcgctggcacgcagtatcaaagggaaaatgataatttcggtgaacgacatccccgaaatgagggctgcattccggggaatgactcggatgtgtgtagatataaagtacaatttaaccgttacgggacaggcgacaccgcgtaaggaattggtgatttgtaatttttga

SEQ ID NO: 444976 - DNA, 222 bp, Serratia marcescens
atgtcattcccttggtattcattgcagacccttgaggatgccgaacgtcttaatgccattaccgaagatgtgattggcatcgccacggagcgtatggatgctgcccgcgcactgcaccattttcatgagatcctactaaaccacgaacccgcaatttttgcggaaagcctcacctttgcacttcaccaactcaaaacgcagcacgaaatcatcaaagcttaa

SEQ ID NO: 444977 - DNA, 420 bp, Serratia marcescens
atgacctccaatagcaatgaatttaatgttctggttggcaaaatattctgtcgactacttgatatgcatccgcagccccagatgcttatcttcgacgccttcttcgacttccctgacgacctggagcgaaccttggacatgcctgaatgccgctcttttttcagttgcatcaaatggcttaaacagcacggctacgttgactactccggtcttatctcggtggcagccatgaatgtcaccatcactgagaaaaccctcatcatcctgaatgcgctacccaaatcgttgcagcagaaacaaaagcccctgaaggacgcactgctggatgctgccaaaacgggtaagaacgcggttattgctgaatgcgtatctcggattttcgcttattctatggatggaaacggcagcgactgtgaatga

SEQ ID NO: 444978 - DNA, 270 bp, Serratia marcescens
atgagtgccgcgaaagaaaaacaacttgctacggcgaaagaagaaacccccgcagcggttgagttgcgtgagcaggtgcgttttattgccgagcttcaactcactggtgtaacggactgggtcaccagccgggcgaactgggaaaccctcctcgcaagggctgacaagcaacttctgccacaggccctggcgctcggtttatgcaggatactaaaagacctgcagcaaggcgttcattcacagtcgctgccgtttccatccatagaataa

SEQ ID NO: 444979 - DNA, 354 bp, Serratia marcescens
atgcattcccgcaaaaaacgcacattaccccgccccaaaaaaccacgccttagcggctggctgctgacggccatcatcttgttcctggtcattgcgctggtgtcaccgcagcaagtgaccgtcgtggtctacaaattgtcgctaatcaccctggcggcggttaccggctactggctcgacaggtcactctttcccaaggctcgcccagggcagtacctgcgccatgaacagccactgatggaagacgggcgctacccggtgcagaccgggtgccatatggtctttgccatcgccatgctgcgccgcgccatcgtggtatcggcggtgtgcctggccgttgcgatgggactctga

SEQ ID NO: 444980 - DNA, 720 bp, Serratia marcescens
atgagctggcctcaagtcactctcatcatcctgttcgccttcggtctgggcgtaacagccattaagcacggcgagccacgcaacgataaatacagcttctggtggcaacttgtggccaatctgctgattgcctggttgctttggtgtggcggattcttttcccaggcacgggcggcccagccgccggccgccgctgagcactaccgggatgcgaccattcgtaatgctcgcctggtatgggggctgaatgccccggtcgcggatttcgccgcccaaatccatcaggaaagtcactggcagccagacgccgtgtcgccagtgggcgcagaggggctcgggcagtttatgccggccaccacacggtggttcggtgacctggtgccggaactggctgccaaggctccgttcaaccccgactggagcatccgcgcgctgatgcactatgaccgctggctgtggcaacgcctggatgccgtcaacggctgcgagcgcatggccatgacgttgtcggcctataacggcggactcggctgggtgcagcgggaccgccgcctggcggtatcccgggggctggaggggcgccgctggtttgggcatatcgagcaggttaacgccgggcgaagtccggcagcctggcgcgagaatcgtcattatccggcgcgtatcctgcgtgagctcgcgccgcgctatctgagctggggaggaagctgctgtgtttaa

SEQ ID NO: 444981 - DNA, 624 bp, Serratia marcescens
gtgtttaaaacgcagattctgggcgcgctggcggtactggcgctagtcgcggtgttgtccgccctctggtggcacggccacgcccgcggctttgcccaggcaaagctgctcggcgagcaacgcgtctcccagttgcaggaaggctacagtcgactggagaaacagcgcgccgaacgtgaactgcagaccttgcgtgaattacagcaacgtttcgagcgccagcttgccgccacgctgacgagcgaacgcaactacctggcgcacattgaacggcttgacgccgaaaacacccgacttaaaaggcagattgatgatgttacccggcaatggatggatgaaaaaggcaggctacatcctgtgtcctgcgtgtttactcgtggcttcgtgcagcactacaacaccgccctcggcgtgcccgacgccgaaggtgcaggcgctgccgccactgccaccggtgctggcaaaacgcccgggtcaactggcgccgctgacgcccggttacgccggtccgacatcagtcagcgcgatatcctcgccaacgtcaacgacaatggccggcagtgccgcatctggcgcgagcaagtgaacggcctgctggattacatcgaaggactacaacaatga

SEQ ID NO: 444982 - DNA, 324 bp, Serratia marcescens
atgacgttacagctggatttctgggtactggtgggctatttgctgggctttttgggctttatcggcgggctggccaagtggtttatcaatgagaccgaaaagcgccaggccgagcggttcaattcgctcgagcgcctgatgcgtgactcgtccgacaaatgggcgcggcttgagcgggaggtgctggagttcaaggtggaagtgccggaacgctatgtccggcgcgatgagttcattcattaccagcaggtggtcgagtcccgtctggacgccatctaccagaagctggaaaacatgcaactgcgacagttaacgggaggataa

SEQ ID NO: 444983 - DNA, 315 bp, Serratia marcescens
atgatgattgatacggctcaggcccggcgtgaagggctgcgctgggtgctgctgcaggtgattaacaaggcgcggccttacccggccaacgacccgctgctgtgggatgtcggccgctcgctctatcccgacctgagcatgctggagctgcaaaaagagctgctgtttctggatggtctcggcctgctggtgctgacccgcccaccggcgcgttcgtggacggcgacccttacgccggcgggcgtcaacctggtggaatatgtggccgacgacgtgcccggcattgcccggccggccaaatactggagggagtga

SEQ ID NO: 444984 - DNA, 552 bp, Serratia marcescens
atggcgccacgcagtcatatcgaagtgttgccccagccagtgcgtgaatggcttgaccgggcgctgaccgagcgcaacttcagcggctatcgcgagctggagaccctgctgcgggaaaagggttacagcatcgggcgggcgcaaatttcccgctacgggcaaaaggtgcagcgccgctttgccgctatccgggaggcgaccgaaatggccagggtgatcaccgaaggggctgaagatgatcaggacaaacgctctgaggccatcatcgccaccattcaggccgatattctgacggcgcttatcgacgtgcgcgaagcgagcgacgatgaaatggagccggcggaacgggcctctctgctggccaaggtggggaaaagcatcgccacgctgacccgctcgtccgtgaccctcaagcgcttccaagcagaagtacgagagaagattgccgccaaactggacgaactggagcaggaagtcaggaacaacgacgggcgtgtctcgcttgaaaccgtgcagcgcgtacgttcgcaaatctacgggatcatcaaatga

SEQ ID NO: 444985 - DNA, 1317 bp, Serratia marcescens
atgagcgccgcgctgcagctttacggctaccagcagcgctggttcctcgaccggtcacgcttcaagattggcaagttcgcgcgccagaccggcaaaacctttaccaccacgctggagctggtcgacgactgctttgagacggaagcaagcggcggtcgcacgcggtgggtgatcctttcacgcggtgagcgccaggccaaggaggcgatggaggaaggtgtccgcaaacactgccaggcgtacagcctggtagccagagaactcgaaggctatgtcaccggcgcatccggcgagcgctataccatgctggaggcggtgctgccgggtgggtcgcgcatcaccgcgctgccggccaaccccgatactgcccgtggctttgccgccaacgtattcctagacgaattcgcctttcatgccgacagccgcaaaatctggacggcgctgttcccggtcatttccaacggctacaagttgcgcgtcacctcgacaccgaatggcaagggcaacaagttctacgagctgatgaccgacgccgcgctcgacaatgtctggtcgcgtcacgtggtcgacatctaccaggcggtgcgtgaggggctgccgcgtgatatcgccgagatgcgcgctgcgctcaatgacgaggatgcctgggcgcaggagtttgagctcaagtggctggatgaggcgtcggcctggctctcctacgagctgattgacggcgtggagcacgaccttgccggtctgcctgagcactacgccgggggcccctgtttcgtcggcgtggatatcggcattcgtaatgacctgttcgttatctgggtgctggagcaggtcggcgacgtctactggacgcgggaaatcattacccgcaagcgtgccaccttcgccgagcaggatgcgttgctcgatgatgtgttctttcgctatcgggtgctgcgctgctgcatcgaccagaccggcatgggtgaaaagccagtggaagacgccaaacatcgccacggcagcagccgcgtcgagggggtgatattcaccagcaacaacaaactcaccctggccacgcgcggcaaggagatgttcgaagaccgtcggctgcgcattccgctcggcgacaaaaccctccgggcagacctgcacaaactgaccaaggtcaccggcccgaccggcgcgccccgctttgtggcggacagcgacgccgccggccacgctgaccgcacctgggcagcatttctggcgatcaatgcctccgacgggacgagcggtccggtacgggttcactcacggcgaccacgccagaccaaaagactactggagggatattga

SEQ ID NO: 444986 - DNA, 333 bp, Serratia marcescens
atgaccacaaatgtattgacagcggcacgtatggccgagattgctggtctggccctgcgtttgcaccagattggtcgctgcgcagccgtcacttcaaccggcgagaccgtgttgcaccacagtcaggtagaagctatctatcgcgcactcaccgatttggctaacgaagtcgagcggcgccaacttccggccgggtggcagtctgtgccgacgctgttgaccgacgagatggccaacgccttcgatccattgcgtaagctaagcctgagttatctgcgcaacggctggtgcatggccctggcggctgcaccgtgcatggaggaggacgtatga

SEQ ID NO: 444987 - DNA, 1488 bp, Serratia marcescens
atgacgcgcggactgtatgtttcacccactgaatttgtcgcctttgccgaccagcgtcgtccgctgatgcgtgccatcgccacccgcgaacgcagcccggctggcatcctcggttttacccagtggctgcccaacccggacgtgattctcaagtccctgggccgcgatatcagcgtctatcgcgagttgcgcgccgaaccgctggtcggtagcagcattcgtcgccgcaaatcggcggtcaaggcacttgagcgcggcatgacgccccgcaatgccgacaaggccgtggtggacttcctcaccagcgtgatggaagactgggatatcgaccgcatcatcggtgaactgctggatgcggccttctttggctaccagccggccgagctgacctgggcgcagcaggacggccgcctggtggtcaccgatgtggtcggcaagccccccgagtggttctgctttgacgacggtaatcagctgcgttttcgggcccggcatgccggccttgccggcgaattgctgccgccgcgcaagttcgtggtggccacgcaggatgcgaccttcgacaacccgtacggtttccccgacctgtcgatgtgtttctggccggtggccttcaagaaaggcggctggcgattctggatgagctttaccgagaagtacggcagtccctggctggtcggtaagcatccccgggggacggcggacgcggaaatcgatttgttgctggattcgctcgaccagatggtggaagacgccgtggcggtcatcccggatgatgcgtcggtcgaaattatcgaatccgccggcaaaggtgcatcgagtgacgtttatcgccatctgattgagctggcgcgttcggagatcactatcgccctgctggggcagaaccagactaccgaagcgtcagccaacaaggccagcgctgtcgccgggcttgaggtcaccgccgatatccgtgacggcgatgccaaactggtcatgagcgccatcaaccaggtgctgcgctatatggtcgagctgaacttcggcgacgtgccgatgccgcaatgggaactgtgggagcaggacgcggtggatgagacgcaggccaaacgtgatctgagcctgtcgcaggcgggcgccatcttcacgccccagtattttctgcgtgaatacaacctgcagcccggcgacctgcgtgagtcggctgtcatgaccccactgaccaatgccgcctttgccgagtcacaggccgatgaggccggcttgcctgaggaagcgctggacagcgcactggacgcgttgataaataccggccatctggacaaggtacttgcaccggtgttggccccgctgtttgacgccgtggataaaggccagtcgccgcataccctgatggggatgttggcggagatctatccgcgcatggatgccgatcggttgcaggagcgcctggcacgcattctctttgtggcgaaaatcgcggggaggctcagtgctcagcagtga

SEQ ID NO: 444988 - DNA, 828 bp, Serratia marcescens
gtgctcagcagtgacgacttgtccgtgtgcttcggcctgccgccggcgcgcgccattgcgtatctgaaggccaagggttaccgcatcacctgggactgggaggagatgtggcaggaggcgcacgccgaggcgtttaccgtggccaaggtcacccgcctcgatatcctggaagatatccgtcaggcgctggcaaaagccctttccgagggaaaaacagcgcgctggttcaaaaaagaactgaccccgatactgcaggcaaagggatggtgggggaaagcggacgccaccgacccgtcgaccggtgagccggtaaccatccagcaaggcagcccgtggcggttggatacgatttaccgcaccaacatgtcgacgctctacagcgccggacgctgggccgagcagcgcgccaatattgatgaccgaccctactggatgtacgtggccatccgcgacagccgcacgcgccaaagccatctggcgctgcatggcctggtgtttcgcgccgatgatccgttctggcagagtttctaccccccgaatggctggcgctgtcgctgcagcgtggtcgcactgagtgccgatgatgttcgccgccgggggctgtctgtcggttttgctgccagcaggctggatacttcgatgaggctggtctctgagaagaccggtgagctgaaggaagtggcgaccttccgcctgccctcgggcaagaccatcagccccgacgtcgggttctcgtataatcccgggcacggttatgcgcccgatctggcccgttacggcggctcgctggcaaatctggcgcataagcagctgggaggtaccccatga

SEQ ID NO: 444989 - DNA, 453 bp, Serratia marcescens
atgaacgacctgatgcacattgccattaatgccggtgaactggagctggccctgcgtaacctcagcaatgccgggcaggacatgacgccgctgatgcgcgccctggcggagaccctcaagaccgaaaccgacctcaacttcgaggacgaggggcacccggcctggcaaccgtcggtggccgcccaggcacgtgaagggatgacgctctccgcaaccgggcagctgcgcggcagcgtgaccacggattatgacagttatcaggctacggtcggcaccaatctggattacgcgcgcattcaccagctcggcggcaaggccggtcgtcatcgcagcgtctcgctgccagcgcgcccgtacctgccggtagacgccgagggcaccctgcaggccggcactgagcaaaaactgctggatacggtattgcgttacctggaacgcaatacacgcagctaa

SEQ ID NO: 444990 - DNA, 1110 bp, Serratia marcescens
atgaacgcactccatattttcaaggccggcacccacacggacatgcacggtcgcaagattaacttcagcgagaccatgatcggcgacatggtgcaggcgtacgatccgtcgctgcatgaagcccccattgtggtagggcatccccgcaccgatgacccggcttacggctggatcaaaagcctggcggctgacggttctgacgtactggctgagccgcatgaagttgatccggcgtttgccgagctggtcgccagcaagcgattcaaaaaaatttcggcgtccttctataccccggattcacccagcaacccgaagcctggcgtctattacctgcgccacgtgggatttctgggcgcgcagccgccagccatcaaaggtctcaaatccgcctcattcggtgaggctgaagacggtgtggtcgagtttgccgaatgggggtttaccaccagtgcgtcgatgtttgcccgtttgcgtgacttctttatcgagaaattcggccgtgaggccaccgacgaagtgatccccgcctggcagattgatgcactgcgcgaagccggccagcccgaatcgacgccgcgccccgcctttaccgaattgtcaaccgctgctccggcagcaccagaaccacccaccactgaggacaacaccgtggatgagaaagaaaaactgcgcctggagcaggagaacgccgacctgaaacgtcagcttgacgcccgtcgccaggccgacagcgaggcacgccagcaagaggtacacaacgccaacgcggcctttgccgacggactggtgactgacgggcgactggccccggcggccaaaaacgtcgtggtggccatgctggatgctgctgatgccggcgaagagccggtcagttataccgagggcagtaccacccagccgctcggtgaagcgctgcgagccctgtttaaaagtgcgaccccgctggtcgacttcagtgaaattgcgaccaaagagcgcggcaacgggggggtacagacgacggagttcgccgacgccgatccggcacagctggccctgcaccagaaagccctggccctgagccagtccgaaaacatcagctatgaagcggccgtcaaacgctgcctgtaa

SEQ ID NO: 444991 - DNA, 948 bp, Serratia marcescens
atgtccgattatctgaaggggaaacgcgtcgttgacccggtactgaccacggtggcgcgcggctacaagaacgccgctttcatcggtgaccagctgttcccggtggtgcagatggaaaaggaaggcgcgaaagtgccgaccttcggcaagggggtgtttgccgtttatgacaccaagcgcgccgtcggtgctgacagcaacatcatgatccgcgaaaagcaggacaccatggatatcctgctggatgagcacgacctggcagcgccggtggattatcgcgagcagcatgagtcgatgttcaacgaggaagccaaggccgcccggcgcgccaccaacggcatcgaactgcgccgcgagatctacgccgccgaaatggcgcagaacccgaaaatctacctgaccaacgcggtcaagaagctgagcaaggacgaggcctgggtgaaagacggcaaggccaatggcgatccgctgcgagttatcgaagacggcatggaagttgtgcgcaagaacatcggtctgcgtccgaacgtcatcaccttcggcgcgtcggtcatggcattgctgcggttccacccggcattgcagacggccattggcgccaacgagcgcaaacgcatcacggacgatatcctcaaggatctgttccaggtggataaagtgctgatcggggcgccgcgttcgctgtcaaccgacggtaaaaaagtgtccgacctgtgggccgataacgtgatgctgcactacattacgggcccgcaagccggcggcgacagcgccgacgagaacgagccgtcgttcggctataccttccgccgcaccggcatgcctgtggtcgacaagttcgacagcgccggcggcaaggtggtgaacgtccgctataccgacatctacaaggtggcagtggtcggttcggatgccggttacctcattaccaacgtgaaaggagcctga

SEQ ID NO: 444992 - DNA, 432 bp, Serratia marcescens
atggtcacacagcaggtagttctgaccaccaccgtggtggcgaccgacacactcacacagcagcgtctggtgagcgtcaccggcggtctttgtaaatccggtgatgttccgctgggcgtcgccgaggtcggcggcaaggccggcgatgcggtgccggtcaatgtgctgggcattatcgcggtggaagccggtggtgtgattgatgccggcacagcactggcggtcgatgaccagggccgcgtggtggccggtggtggcaagacacgagccaaacgtgcaaccgaggacggcaagcccgacacgccgcaacctgaaaaccccaaaccggcagagcccaccggcgatgagccggctagcgccaccaccgtgggcattgccctggatgcggcgagcggcgaaggccagtttattcgcgtgctctggagggcgtaa

SEQ ID NO: 444993 - DNA, 462 bp, Serratia marcescens
atggcctactgcacggtcgcagatgtgggcgcggtgatggccagccgcacgctgattgaactcaccaatgacgcggtgatgatgaatatcggcgaggcgctgccggccacggtcaacgaggcggtcatcattgaggccatccgctatgccgacgagctgattgatgcccacctgcgcgggcgttaccgcctgccgctgaccgccgtgcccacggtattgcgtgatctggccgtcaatctggtgtgtcactggctctatcgccggcgcccggagggtgacctgccggaggcggtcaaggagagctatcgcggcaccgagaaaaccctggtggccatccgtgacggcaagctcaccctcggcgtggaagcgacgcagcgggatatgccggagcccggcgagatgcgcgtgcgcagccccgggcgtcgcttcggcggccccggtggacttctggagcgttactga

SEQ ID NO: 444994 - DNA, 543 bp, Serratia marcescens
atgaacgtcagcgagctgttatccgccgtggtcctgcggctgcgcgcgaaattgccggcactgcatgtggactttttcccggagagcccggcggagtttcgtctcaaccacccggtgggagcggtgctggtgagttacggcaaatccaccttcggcaagacgcaggatgtgggcgtggttatccagccacagaccgtccggttcaacgccacggcggtgctgcgccagcttaacggcaaaggcggtgcggtcgacgtgcttgatctgctgcgtcagagccttggaggctggcggccgccggactgccagcgtgatatctggctggtcgaggatgtgtttcttggccagcgggagggactgtggcagtacgtgctgacgttcgagaccgtcacggtgtttgttcaggacagcgagtcggcggatctgccgctgctcacccaagttgaatatgaggatatcaatgaaatacatctacaacggcccggcgagcggggtgacgctgcgcttcggggaagtgctgcaggagatcctgctgttccctga

SEQ ID NO: 444995 - DNA, 273 bp, Serratia marcescens
gtgacgctgcgcttcggggaagtgctgcaggagatcctgctgttccctgaacaggaagtcgagatgcctgccgatcatgagtatacccagacactggagatgctcggctatctgacgccggtggaagacccgtccatctacgatgtgccggctgagccggtgcctgaacctgagccagcccctgagctgcaaacgcagcccgagcctgataacaagggcaaggcggctgacggcaaaggcagaaagtcccctgacgaaggagataaacaatga

SEQ ID NO: 444996 - DNA, 1434 bp, Serratia marcescens
atgagtgccaactatttacacgggccggaggttatcgagattgagcgcggctcgcgtccggtcaagggcgtcaagtcggcggttatcgccgtggtcggtaccgcgccggctggcccggtcaatatcccgacgctgtgcctgaccgagaaggatgcggcgcaattcggcgaggaagccgaagggttcaccctgccgcaggcgctgcgggccatttacgactttggcgccggcactgtggtggtggtcaacgtgtttgatccgaagcgtcacaaagtcacgcagagcgagcaggacgtgactttcgacaaggctactaaccaactgcagctgaagtttccggtagtcagcaaagtgacgctcaaaagccaggatgccaaaaccacctacgccgagggcaaggattttaccgtagaggtcgccacaggcatcgtcacccgtgtagccaatggcgcgattgcggtgggtgcccaggtcagagcaacctacgacaacgccgatgcatctaaagtgaccgccgccgatattattggcagcatcgatgccgccggcaggcgcacaggcctcaaggcccttgacgaaacctatacgctgtttggttttgatgtgaagatcctgatcgccccggtttactgcactcagaactcggtgacggttgaactgattgcctgcgccgagaagtacaaggcgctggcctacgtcgatgcgccggttggcaccacgttcgcccaggccatcgcagggcgcggaccggccggtaatatcaacttcaatacgtcttccgaccgtgtacggctctgttacccgcatgcgctggtctacgataaagcgaccaacaagaaccgcctggaaccgctgtcccagcgcgcagccgggctgcgtgccaaggtcgacaacgacaagggattctggtggtcgtcctccaaccaggaaattgcgggaattgtcggtatggagcgcgcgttatccgccaaaccgggtgacccgcaaagcgaggtcaatctgctcaacgaaaatggcatcaccacggtgttcaacagtttcggcagcggtctgcgcctgtggggcaaccgtacggcggcgtttccgagcgtgacgcacatgaaaaacttcgagaacgtgcggcgcaccgccgatatgctcaacgagtccctgcggttttacagtcagcaatatatcgaccagccgattgaccaggcgctgattgatgcgctgaccgagtcggtcaacgcctatgggcgcaagctgatcggcgatggcgcgttgctcgggttcctgtgctggtacgataaaaaccgtaacccgaatgaagaactggaagccggccacctgttgctgagctacaagttcacgccgaaaccgccgatggagcgtctgacgctggagtccgaaatcaccggcgaattcctggctaacctcaaaggagcgacaaactga

SEQ ID NO: 444997 - DNA, 525 bp, Serratia marcescens
atggccggtaaaatcgagatcaacgcgatcagcaacgccaacatctacgtcaacggcgcgaatctgttggggcgtgccgaagaggtcaaatgcccggatatccaggccattatgcaggagcgcaaagccctgggcatggtcggcaagctggagttgccttacggctttgacaagctggagggtgagatcaagtggaacagcttctatgccgacgtggcacgcctggtggccaacccgttcaacagccaccagttgcagtgccgctcgagcgtccagcgtttcggctctcaggggcgtattgatgaaatcccgctggtaacctacatgacggtgatgttcaaaaagaacccgctgggtaccttcaaacagcacgagagcccggacttcaccagcggcttcagctgcacctatatcaaacaggtgctggatggtgaagagttgctggagctggactacatggccaatatcttcaaggttggcggtgtcgatgttctggcggactaccgcagcaatatcggcggctga

SEQ ID NO: 444998 - DNA, 288 bp, Serratia marcescens
atgtctgaatcaaccgaaaaattcctgctccgctatccctacaccaccgctggcggccagcgcattgaagaacttcccctacgccgcctggcagtacgcgatatgaagcgtgtcatggccgccaacaaagacccggcaaaatgggatatgcctctcatcgccgcgatggtggatttaccggtggaggatttggacagcatggatctggcggattatatggtgctgacccagcgatttcaggccctgtctaagctggatgatgaacccgaaacaactgctgaaggctga

SEQ ID NO: 444999 - DNA, 306 bp, Serratia marcescens
atggaaacacgtctcaacatctactatgggctgatcgtggctgcggtgaccgcgtgctttggctacggccttcactgggctatctggcccctgataaccaaaggtgaatcctggacgttcattttcatgatgtctggtttcgtctttctggctatcagcctggccttagcaatcgttgcctactttgcaggaccttttctcgctttggccttttttgcaatcgaaggtctgctccgactgagcttgtgggtcattcgctggtctactcgccgtattcgtggcgtatctgctcacccgcttccctga

SEQ ID NO: 445000 - DNA, 2703 bp, Serratia marcescens
atgccgagttcattttcaattggtgtcgtcgtttctgccgcgctgcacggtacattccgcaccgtcatgggcaacgcgcagcgcacgctggacaagctgggctcggccactacgcagatgcaacagcgccaggaggcgctaacccgggctgcctctcgttacggcagtctcggcggtgaggccgcacgtcgtctcaacagcgagctgacccgcgtcgggcagacgatggaacgattacagcagcggcaagccagcctgtcgcgcaccaccatcgcggcgacagcactgcgcgataatcgaatgaaactctacgcccaggggctcgaggcctacggcatggggcgggcggtttatgcagcagtgaaaccttccgtccaaaaagcagcgaccttccaggacaacatgactgacatggccatcacggccaattacgacactaaaacccgcgatgcacttggtaaaaatatccgcgcctggagcctcaaatacaaccagacccaggatgacctgcaggccgccaccagttcgcttatcggcaacaatatcgacgacattgacgatatccgggcctatctgccgagcatcgcccgtggggctacagcgacccgcaccaccgccgagcagtgggctgaggcggcgtttaccaccaaacaatcgctcgggatcgccgccaaagactttgccgccgtgcaaaacatcatggcgtatggcggtaaggccggttcgtttgaaatccctgaccaggtcaaatggctgcccagccttgcaccgcaaatggcaggcatttctcagggcaaggaagcggtcgccgagatggccgccgcgctgcaggtggccaaaatcggtgcgggaacgtctgacgaggctgccaataacttcaaaaacttcctgaccaagctcttcgcaccggatacgcagaaacgcttcgccgatcaggggatcaacctcagcgaatcgctgatgcgccagaaagccgagggcatttcgcccattgaaggcatgatgaacgtcattcagtggtcgctcgaacaaaaaggcccggaggccgtcaagcagttcaaggcggcaatggcgctcaaggatgatgcggcgcgcgatcaggctttgcaggcgctgcagaaaaacttcggcctgggtgagttgttcgccgatatgcaggtgatggcctttgttcgaccgatgctggcgaacatggacaagtaccgctccattcgtgcagaggccctcaaatcggccaacaacgatgtgctgggcggtgactacgccaaacgcctcgagtcccccatcgagaaaatgaaacagctgatggttgcgaccagcgatctggggatcacgattggtgagcagttgatgccgcaagtcgttggctttaccgactttatcttgccgtacatcacacgtatgaatgaatgggcgcaggcgcatccgcaggtgatccaggggatcgccggcgttgttgccggcttattggtattcaaaggcggcttgttcgcgctacgaatgacgctaaacctgatcgccaccccgtttgtttcgatgatcaaaagccttaaagcggcgcgtggtgcctgggaattgctccgcgccggtttcggacgcggtggcggcattgctcgtgctgccggtgctatcagccgactgtcagggggcgttatgcgcctgggccgaacactggccggaggcgtgctgcgaggtatcgtacgtggcggtgcactgatggggcgtatgggtatggccggcctgcgtctcggtcgcattcttggtggcgtattacgtcaggggctgatgatcgccggccgcgccgtactgtttatcggccgggcgttgatgcttaatcctatcgggctgctcatcaccggcattgcggtgggggccttcctgatttaccgctattggggacccatcagtacctggttcaaggcgcgctgggaagatattaagcgcgccttctctggcggcattaccggcgtggcagcactcattatcaactggtcaccggtcgggctgttctacaaggcattcgccgctgtcatgcgctacttcaacattgagctgccggccaacttcaccgactttggcgccaacctgattgatgggctggtaagcggcatcaccagcaagctggcggcggcgaaagacaccatcgtcaactttggcagcagcgtcaaaggctggttcaccgagacgctgggtatcaacagcccctcccgcgtgttcatgggttttggggataacatcgtccagggcgcggtgattggcatcgaccgcaccaccccgcaggcaggcattgcggccacgcgtttggcgagcgccctgatgccctttggcgacagtacaccgcttgcggggtggtttgccgacctgcctgcacgaataacacgactagccggtcaggcgtctcaggggctgtcgacgctgctggtgccgtcagtctcccgtcggccgcccgcccccgaggtgcccacctggcccgaagccggcgaaagcaccgctgttcatggcggccttgcgcggcgcggccgtggtgttgcaggtacgtccgggccgggtatcactgtgcattttgcgccggtcatccatattgatggtaaacgccagaatgccggtccagagatacaaaacgcactgggtatgggggtgcgcgagctcgagcagatgcttgctcgcgtcctgcaacaacagcaacgcaggagttttgagtga

SEQ ID NO: 445001 - DNA, 894 bp, Serratia marcescens
atgtttgccgtccttggtgatatttcctttcagctggccaccagttttgatgcctttgatggcaccttcggcagtgattttgccgaacaggcgcgcatcagcaataaaccaggcctgcagttcgtcggcgccaagctcgatgaataccacataacggtgctgtttcatcagcagtattgctccccggatgcccagttcaagaaactgatggccgccaatcaggcacaccaggcgctggcgtttgtgctgggtaacggcgactacaagggctggttcgtcattaccgatatcgccggcagttatcagcttaatgggcaggacggcgcggcgcaggccatctcggtggacctgaccctgcgtgagtttgccggtgacccggcctcaccgatgacaccgccaggcgtcagaaccagtctcccgagtctgtcccagggcaaagccggtgcgctgccaggcgccgggattggcggcatggtgcgcagcgccgtggggtatgcccggcaggcgcagtcagcgttgcagaccgcctccaacgtcgtacgcgttgcccgccagatgaaaagcaacccggtcgccgcattcacccgcgtgcctggcgtactcgggagcctgggcaatgtggtggccccgctggcgcaatcggtgccgtggcttaatcaactgaccggccagctcccggagactatcccgttggtccgcgccgccggcgaggtcgcggtgatggtcaatggtgcccgggagacgctgggcggtgttcgtcccggtgataacaagaacctccccggcgctttagataccgtcgcgggggtggtcggcagtgccgtgaccacctggaacaatcagtccccgcagttaagccggcttgccagccgcattattacccggagcctgtga

SEQ ID NO: 445002 - DNA, 225 bp, Serratia marcescens
atgagtaatccgcacaccgacgtcatcatccatatcacgcgcgaaggcgaacgctgggaccagcttgccaacgattactacggcgatccgctgggttatgcccgcatcatcatggccaacccgcaggtcgctatcctgccggtgctgccggccggcatgtcgctcgccattccggtcatcccggcagacagcaaccaggagacgctgccaccatggctacgctaa

SEQ ID NO: 445003 - DNA, 1233 bp, Serratia marcescens
atggctacgctaaacgcacccaccacgcccgccgctggcggcaagtcttccggcgccgtcccgacgccggtgtttgagctggtctatggtcagaaggacatcacggtcgacgtcacaccttacgtgctgtcaatcagtttcaccgacaagctgtcgggagaatcggacgagatccaggtggagctggaggacagcgacggccgctggcgtgatgcctggtacccgggcaaaggggataccctgtcgctcaaactggggctcgaagggcaaaaactgctgaactgcggcacgttctcaatagatgaaatcgagctcggcggaccgccagatacggtgtcattacggggactgtcggcctcggtaacggcggcgatgcgcacccgctccaatcgggggttcgaaaacacgacattgctggccatcgccagccgcatcgccaaaaagcacgctctcaggctcgaaggcacgatagagccgctcaagcttgaccgcgtcacccaatacaatgagaccgacctggcgttcatgacccgcctggcgcgcgagtatggttacatcgtcaaagtgacacacgaggcgctcgtcttctcacaccgcgttaccctgcgcgaggccgaaccagttcacacactgacgcccgccatggttggacgctaccgactgcgcgataccatcaaccgcatctacaagcaggccaaggtcaaatatcaggacacccgaaccaagaagatggtcaccatcggcgtcaaagcggatggcagcatcgggccggtggcagaagaaacggtgagcgccaggggcaaagggcaaaagccctcctctcatgctaccagcgcggacacgctcaatatgcagagccgggcacgcacccaggatgaggcggtcagcaaggtctgcgccggtatcaaccgtcacaatgagtaccagcgcgaggccacgctcaacctggaaggcaatgtgggacttaaagccggcaataccttgtcgctcaccggcttcggacggctatcggggagctggctggtgacggcggtccgccatgatatcgaccggcaaggtggttacagctgcgaactcactctcggccaggggccgattgccaacccgcacaaaaaaggcaagaacggcaaggccggcacgtcccgcgagatggtggtcatcggcaaaaaggccgacggcagcattggcgtagtggataagaagacacaaagcgtcaaggggaaacgccgatga

SEQ ID NO: 445004 - DNA, 645 bp, Serratia marcescens
atgagcggtatcaagtttgccaccggcaccgtcagcgccgtggatgagaaaaccgtccgggtgcgcgtcaggctgccagagtacgacaatctgcgcacggcctggatcgaggtgctacagcgcaacacccagaacaacaaggattactggttgccggatatcggcgaacaggtcaaggtattgctcgatcctcagggggacgacggcctggtcctgggcgcggtgtattctgatgtggataaaccgaccatcgcttcccgggacaagcgccgggtagattttgccgatggcaccttcgtggaatacgaccgcaaggcgaacgccatggccatcggcggcgcaataaagaccctggatatcgccacccaggcgtcggtggtgatcaccacgcaaacggccacggtgaaagccagcacgtcggtgacgctggatacgccggaaaccatcgccaccggcaatctgaccgtgcagaagaagctgacttacctcggcggcatggcgggcagcgggggcagcggcgcggcggcgaccattaccggtgacgtcaaagccaccggcgacatcacctcggcgtcggtctccctggaaaaccaccgtcacggcaacgggcatgacggcaacccgaccgatcctcccatcaaatag

SEQ ID NO: 445005 - DNA, 360 bp, Serratia marcescens
atgaaaactgaaaacgcaacttccgtctactggcaaccggcactgtatcgcccgggcgagcgcgtcaccgggcttgccgatattcaccagtcaatacagataatcctcggcacgccctgcggggccgacccgcaccggccggattttggcagcaacatttaccgctatagcgaccagccggtagaccaggcgctgcctcatgtggtcagagagaccacggatgcgctcaggcgctatgagccgcgcgcggaagtggtctcggtctcgcatcgcgccgagggtgagcatgcctggttacaggtgcaatggcgtcccgtcggcgccgcgtggacagaaaccacggaggtcacatggcgttag

SEQ ID NO: 445006 - DNA, 1110 bp, Serratia marcescens
atggcgttagcgcttgataaacccgtcttcgtcagtaccgatccgcaggccctgactgcagagatgattgcctggtacgaaaaagccagcggcaaaacgctgtacccggcgcaggatgaacgcctgctgatcaacctgatcgcctaccgcgagaatctggtgcgcgtcgccattcaggacacggcagagcaaaacctggtggctctggcgcgagcgcccatgctggattatctcggtgaactggtgggcgtttatcgtctggccgcgcagccggcacgtaccacacttcggttcagcgtcgacgttgcgccgacaaccccggccctgataccggccggtacgcgtgtcagcgcaaccgacagcatcatttttaacaccgatgcggacgtcatcctcaatgccacgacgacggcggtcgaggtcaaggccacctgcagcgaaccgggcgttgccggcaacggctggcagccggcacaaatcagtacgctactcgatgagataggcaatctggatctgactgtgaccaataccgcacccagtagcggcggcgcagaccaggaagatgatgaccgcctgcgcgagcgcattaccctggccccggagtcgttcagcaatgccggctccaggcaggcgtaccgtttccacgccatgagcgcccaccagaatatcagcgacgtggcggttgtgcgtccggtacccggcacggtcaacctctatccgcttttgaccaccggtatgcccgatgaaacgctgctcgccctggtgaaaggtttttgttccgatgagaaggtgcgcccgctcactgatacggtgaacgtgctgatgcctggcaaggtggattaccgtatccgggccgatatctggctctatgccaatcaggactcaaaacaggtgatggcgcaggcaaacaaggcggcggaagactggacgacaaagctgtcgacgcggctgggtcgggatatcgtccccagtcaaatcagtgctgctctgtctgtacctggcgtgtaccaggtcaaccttgccgaaccgaccctgcgcgaagtcgccccgcatgaatggccgcattgcaccggcatcaacctgactctcaaggggatagtcaatgactga

SEQ ID NO: 445007 - DNA, 588 bp, Serratia marcescens
atgactgacagagaggccctcacgcagtcgccgccgctgttgatgacgccaccgctggcgcgcgacgaacggttccgcttgctggcccagctcaccggccgtctgcaggatttggatctgacgccgctgctggtgtacctgattgacctgacggaggtctcggcgctgccctggctggcagagcaactgtcgctgacgggcgataacggctggagcctcgccgagtcggacagcgcgcgccgcgccatgcttaaaaacgccatcgagctgcaccgctataagggcacgccctggtcggttcgcgaggttgttcgccgcctgggatttggcgaagttgagctgaaagaaggcggtgacggacttgacccgcatatcgcggcccaattcccgaaagaaacgctctgggcagtctaccgggtgatgctgcgtcagcccattaccaacgaccaggccaagctgctgcgtcgtacgctggatgccttcgcaccggcgcgctgtgcgctcgccagcctggactttaccgccgccgccattcgctacaacaacacggcccgttatgacgggacgtacaaccatgggagcagttaa

SEQ ID NO: 445008 - DNA, 2703 bp, Serratia marcescens
atgagtaacctgaccgaaaaggaccagtgggaagacggtatctaccaactggaaacctcagacccggtgctgggtggcccggatggggtctccaacaagccggcaaaacaactcgccaaccgtacgctctggctgaagaagcagcaggaaaaagccaatgaggcgctgaaggcgcacgagcgttcccgcaatcacccggatggcaccacatcggccaaggggttcgtgcagctctccgataacccgagccttgacagcagcacactcgctgccacgcccaaagccgtcaaggcggtcaacgatgcgagtgccaagaaagcggctaatctggccgacctgaccgacaaacccagggcccgtgataatctcggcctgaaatcggcggccctgcgtgatgtcggcaccaccaagggccaggtgatggaagtgggcgcgggcggcttactgatgggcgctcgccatcgggatgacgtgtataccaatgacgggcaaattttccgcgccgatgccaaatcggccaacaaaccgcccatgaatgcgaccgccgggattatcagcctgccggcagatggcggtccatccacggggtatgtggcgattagcccggccaatggcggcgcatggattggttcgtccaacaaacccgagaatggcgtacgctggtcacgaatttacacggacgacaacaaacccacggccggtgacgtcaatgcctacagcaaaaccgaatcggacaaccgcttcctgcagaagagcggcggcacggtcaccggcaagacccagttcaatgccggcattgattttgccaacccgaacaccggcattacgaacggtaccgacggtgccagctacaatggggccaacctgctgctcaaatcctggtatggcattggcttctacaaaactatcggtgaaaaaggcattaccggctttatcgacgtgcgcaccggcgacctgcgcatgcaacgcaacattaccgccgatggtcaactgattgaggcgggcaagcgcgtctattcgccaaacaataagccaaaggccggcgatgttgatgccgtctccgcaagcgaaggtggtgagtttcaaaaagaaatccgtgcgtctggcggcgtgaaaattcaggtgccgggccgcaacgacaatggcggcggcgtgtatcctggcaacggtgacggcgcaagctatgccacctgcaacgtcgacatcaaatcctggcagggcatcggcttttacaacacctgtgacacggtgggtatcaaggggcgaagcctgtttatcgacgtacgccagggcaacctggaagcccagggcattatcaaaggcaaaaccgtctctgatgccagtgggcgggtctactcgccggggaacaagccctcgccgggtgatatcaacgtttacagcaagtcagaatcagacagccgatactttgcacggggcaccactgcgacagccaaggatgtggcctggaacgctgcttccggggtctacaatacccaggcagacggcatgaccatggtggtgcacttcgccgccggcggcaccggcagcacgcgcgctgctgatttcaggttcaactacggcaacggcgggctggcttttcgttcgtcgcgcgatgataaaggctacgagaacggctggacgaaagtgtacaccgaccgccagcgaccgactgcagctgaagtgcaggctgctgacgtcagaaacaatttcgctgctcgtatgggcgttaccagggtgttatccggagaccaaccaccgactgcccctggcatttggagtattgaaaactgtagctggacgccggagaaatggggaacactgatttgcacgtccaaccgctcagacctcaaaacggacagagggaatgggcagttcttccattacttattcctgagtcacaacagcaagctctttgtggcgatcaatgttaacggtaatggggctggctggcagcaactgattgggccggcggggggaaacctcaacggcccggtatcatcaaccagttggttgtctgccgcttcactgagcgctcgcttgcatgctgcaccagcaggaggaacccctgaaggcagcggtgcttattcatcgcaactcgaaacgaaagcgccgttttaccaggaaaacttcgactgggtcgtgagcagtggtgatcactacgtcccactggtcaaggggcgcagcaaccgcaaagggcaaggctatccgaccgcagtgagttttgggtatctgctaaatggtacgcccagttttgctatgccctgcatccatgtaaaaggagacaatacagatgcagtctggcgtttcgatccgaatagcaaacaactttttgcgccaggtgccttcgttgcaggcagtgcggtttatcaaaacgatggcaacatcaaaggcgatgcctggggcggttatatcagtacctggattaacaaccagattaacggccgtgtagactggggggcatttaaccgggaagtgggtgctagggctactacagattatgttaacagcactttcgtcagagatgtgcgtctaggaggggttgaatccatccaagcatggaacgggccaggttatagagaccaaggcccctatgttcttactggggctgcaaatggcaacggggatgagtatatcgataccctttatcgtcggccaatgcagaaaaacgttaacaatgtttggtacaacgtatggttcgtatga

SEQ ID NO: 445009 - DNA, 531 bp, Serratia marcescens
atgaaaaacataaagaacttccaacgctacagtcctgattctgaagagaagaaagctctggaaagggatattaacgctatatttctgatttcagacgatgggcaagactggtatgagtgccagcgtaatttcagtaaagctaccattaaaattatgtacgatgctgaaggcgtagttagagcaataacaaatgatatttctagcctgttcccagaaaatcgaagcgtcgctgaggtcgcttcattgccagaaggtgcggcgatcgacggtacctggatatatgaagatgggcgagttatgccccgtcaactaactcagcatgaattgctacaacaggctgaaagaaaaaaaatgagtttactcttacaggcagagaaagcgatggcaccactaaaagacgctgttgaactcgaaatagcgacgaaagaagagcatgtcagatacgtggcctggaggaactatcgggtacttgttagccgggtcaatgttacagacccggacaacatcagctggccaaatctgcccgagtaa

SEQ ID NO: 445010 - DNA, 1134 bp, Serratia marcescens
atgaataggaagttagaatctctgcaggccctacgaggggttgcagcactgttggttttattgttccactaccgcttttatctccggggtgatgatgagagcggtacgacgatctgggatgcattgtttggttggggaatcattggggttgatattttcttcattatcagcggattcatcatggtctatacaactcaacactatatgcagggatgttcttccgctaaacggtttctgctgaaccgggcaatacgtatcatcccgctgtactacttcggtcttctggttgccttcctttttggaggagctatgagtaccttccattatcccgaaaaagtgcaaaatttactgagcgcactgaccttcactgtctacaaaacttctgtgacacctcactatatcgatgatgctggcatgtacaacatacgatggacgcttaactatgaaatctatttctatcttgcttttgccctatgtctgatgatgaaacacaggattttggcgctcatttgctggggaggcttgatgacttgcattatcccggcccttgcaggatttcaaccaacgctgagtgttcaagggtatgactttcaaacaccaactattgcctttattaccaatccactgttgcttgaattcttgatcggcgttttcgccggttacatctacctccaattaaaacgacgtgttgtatcggtaaaactgcccctgatttcgagcgtaatcgccattggtctactgagttatatcgtttttggagtttacttcggtagcatcagagcattgaatctggaaagcacaatcgtactggggcttttggtcctcttccttacgcttggagaacaggtactgcaggcatacatcccacaggtcctgaaatatgttggaaatatttcattctcgctctatcttctccataacccgatcggcattgccgtaatgaaacaaatggggccagtcgggcagtcagctttcaaaggcattcctactatacttctggccactttgttatcaatactggtagcccatctgacacataagtacatagaggttgggcttacccgaacgctcaaaaacaagttcatgccgtctaaacaatcggatcaggttactcgggcagatttggccagctga

SEQ ID NO: 445011 - DNA, 546 bp, Serratia marcescens
atggacgccggggcggagattgagcagggcaccatcgtcacggtaatgacccgcaacggcaagaacttcggcatcaagatcagcgggatgggcgatcgttggttcaccgcccccgtcaatacgccggaagggctgttcttctccggcttcagccaggcggacgccaacccggacatcggcgacagcgcgatcaccgaaactttcggcattggcggcgcggcgatggtcgcggcaccgggcgtgacgcgcttcgtcggggcttccggcggcatgagcgccgccaccgacatctccgaggaaatggcggaaatctacctcgaacgcaacatgatgctgcagatcccgacctgggacttccagggcgcctgcctggggctggatgcgcgccgggtggtggaaaccggcatcacgccgctgatcaacaccggcatcgcccaccgcgaagccggggtcgggcaaattggcgccggcacggtgcgcgcgccgctcggctgcttcgagaaagcgatcgaagcgctggccgataagctcggcatcacggcgtaa

SEQ ID NO: 445012 - DNA, 366 bp, Serratia marcescens
atgaaatgcgatttaaaactcggcgtaaacgtcgacgcctccgatctgaacaaagtcgaggcacaattaacgcggatcgttgatttgttggacaggataaataaatcgagaaaaatttcattttttgatggtgaaggggcgttgcgccttgttatttccccgtttgttgttgaacaaaatcaggtgcagataaacgatgccagcattgattcagcgaaaatttccaatgcaatcatgtctcacgcgaaagctgttatcacccaagaaaacgcgatgaaagattcgattcgcgaggtggttgacgagttgctggctaagcagcttcgccctggtggtgcactttggcaggaaattaaaaaccgctaa

SEQ ID NO: 445013 - DNA, 597 bp, Serratia marcescens
atgaacgcaagaaatgaaagcaaaattgcttttccagacgaggaaaaggaaagcatatctacacgcctaaggagtttaatcggaaagcgcagcgtgagagctgcagcgcaggattgggggttgtcattctccacattaaacaactatctaacgagaggaactgagccatcactcaatgtggcaataaaaatatcaaatgtggagaatgtctcggtggagtggcttgctacaggtaaatcagcagcgcgggttgacgatacgaccacagaccattcaggcaatagccctacaaaaaatgcatggttaatggtttttgattcattggatgatagtgatgcgactgcattgattagggctatacatcgcaaaggcgtggagggcttgctatcagcagcacaagaatcgctagatgcagaggatgccattgataagctgcagatccgagcaactctcaagcaggcgatcaagatggcgctagctggtgatgaatccactgaccaagagattttacgccgcctcagcttggcagagcatagctcctcgactggtgctgtaacggaagctaaccaggaacaaagcaagaagattgccgggtga

SEQ ID NO: 445014 - DNA, 495 bp, Serratia marcescens
atgaaacagataagtgttgttggcctgatggcaattttatttttcaacacaaactttgttaaggcggatacatacttacctaaacaaagtgagttgattaataagtttcaatctctgaatttagtacagcaaaatcaatggcaagatgctaagtctgattcgggtatgaaattaaagactgcccaggtgggccatgatgcttattccatttctgataatgctgtttcagcaatcatgatgctgcctgggaaagactcaaaggttgaaggtgcgcatgtcgtctccgtttgctctagtttggccagtgtggtcatgccaaaggttgagttggagcagcttaattcaattaaaaatgtgatagtaaaatccgccatgaatatgggtagtgcggaaaatgatttggtcaatggctacatgttttcagcaaaagcccttgcctttgatagtacgccagttatagcgtgtaaaattgaagggtttgtgacctggaattaa

SEQ ID NO: 445015 - DNA, 675 bp, Serratia marcescens; identical to SEQ ID NO: 283290

SEQ ID NO: 445016 - DNA, 2967 bp, Serratia marcescens; identical to SEQ ID NO: 59353

SEQ ID NO: 445017 - DNA, 561 bp, Serratia marcescens; identical to SEQ ID NO: 15275

SEQ ID NO: 445018 - DNA, 351 bp, Serratia marcescens; identical to SEQ ID NO: 146911

SEQ ID NO: 445019 - DNA, 1014 bp, Serratia marcescens; identical to SEQ ID NO: 5004

SEQ ID NO: 445020 - DNA, 780 bp, Serratia marcescens; identical to SEQ ID NO: 16904

SEQ ID NO: 445021 - DNA, 501 bp, Serratia marcescens; identical to SEQ ID NO: 83644

SEQ ID NO: 445022 - DNA, 786 bp, Serratia marcescens; identical to SEQ ID NO: 16905

SEQ ID NO: 445023 - DNA, 1515 bp, Serratia marcescens; identical to SEQ ID NO: 52478

SEQ ID NO: 445024 - DNA, 861 bp, Serratia marcescens; identical to SEQ ID NO: 19455

SEQ ID NO: 445025 - DNA, 1680 bp, Serratia marcescens; identical to SEQ ID NO: 10332

SEQ ID NO: 445026 - DNA, 708 bp, Serratia marcescens; identical to SEQ ID NO: 10331

SEQ ID NO: 445027 - DNA, 237 bp, Serratia marcescens; identical to SEQ ID NO: 10330

SEQ ID NO: 445028 - DNA, 363 bp, Serratia marcescens; identical to SEQ ID NO: 39670

SEQ ID NO: 445029 - DNA, 1695 bp, Serratia marcescens; identical to SEQ ID NO: 31949

SEQ ID NO: 445030 - DNA, 462 bp, Serratia marcescens; identical to SEQ ID NO: 222821

SEQ ID NO: 445031 - DNA, 276 bp, Serratia marcescens; identical to SEQ ID NO: 10326

SEQ ID NO: 445032 - DNA, 351 bp, Serratia marcescens; identical to SEQ ID NO: 10325

SEQ ID NO: 445033 - DNA, 435 bp, Serratia marcescens; identical to SEQ ID NO: 10324

SEQ ID NO: 445034 - DNA, 1038 bp, Serratia marcescens
gtgtccgccaaatggttgaacccggtacaaacggctattatcggcaaccaacaggaattagcctccgtacttaaagaggcgggaattaaaatcgacccgtccaagcaagatcaattactggcggcaattaaaaaaataaccggtacggccacggaaggctttttaaaggcgggtgcctttggacttggtggtgggccaagacatcttgatgatgcattaagcggcatatatcaattttatcgggttaataacacatctaaaaacagacccggagacaacgtatatggcgtagtcagtttaccttgcgatggtgggccatcagccgggtatttggctgtatctgcgaacggcgaactgtgggttgggaattcatctggtaacacaatgaattggcgccgagcactatcagagggatttaataccttcccggttggcgcaccaatcccctggccaagtgataccccacccgccggttatgcattgatgcaggggcaaacatttaataaaacccaatatccccagcttgcgattgcctaccctggtggtgtaattccagacatgcgcggctggatgatcaaaggtaaaccagccagcggtcgaaatgtattgagccaggaacaagatggtattaagtcccacacgcacggtggctcagtatcagcgacggatttaggaactaaatggacatcaactttcgattatggttcgaaacaaaccacatcgtttgattacggctctaaatcgaccgatgcacaaggccagcatcagcatgattataatttcttgcgttgggaggccggttgggggtggccttcaggcaatactaatatgggcacggttactatgcaaacttccgcagcgggaaatcacgcgcacaacgtttggattggcgctcatagccactgggttggaattggtgcgcataatcatacagtggtattaggcagccatacacacggattaaccattaatgctgcaggtaatgcagaaaacaccgtaaaaaatatcgcctttaactatatagtgaggttagcataa

SEQ ID NO: 445035 - DNA, 315 bp, Serratia marcescens
atgaatatcgaagaatttgtgaatgaagataaccatatgtgtaatctgggtcaggaccttttttgtgaaattttcgaacccggagcgatttacgatttacctgataatgagtttaacagaaagattgtttactggttaagccagtatttagtggggaatctaagagaaccgttagattcgatctctgagcttaatattttcgaacagttttatgtttatgagacatggttctcgctaattaaatgccctgatgaaattaggaatttatcgaaacggataattcgatatcagattgggctgaaaactcttttataa

SEQ ID NO: 445036 - DNA, 147 bp, Serratia marcescens
atgaataccgccgagattatcgtaatatttttgcccggttttatcttcaaattgttgccatttttcgttatcaaacagcagaacaaaaccagcttgcttcttaggaggttcaataagaattgcaccttctggaataacgtcacctaa

SEQ ID NO: 445037 - DNA, 534 bp, Serratia marcescens
gtgagtgaacaatcaaacaaagtgcagtcgcagcaagacagcaaggttgataagaaaaaaggcaaaaatgctgaagcgccggttattgcgccagctcttacgggacactatcagtcacttgtccagcccagtgcgccaccgcaatcggattcggcagcacctgagctaaccggcagcaataccatcgtgaccctgaatgtttctgggacgcaactggataccgagcagctcaatcaagaccaggtcacgctgcctgccgttctggcacaggaagatactgacaaacctgctggcgttgaggtgttgttggttcaggctgtatcactcaacggcttttaccgtgccgggcagttctggccgcacgaaggtgtccatgcgttcgtctgcgatgacctggacagtgataacgccgagagcacggccaatatggttgcgccattcatcagcgcagcgacagccgagcggctgaaggctgagccaaacctccgcgtcacgctcgtagaaaccgtcgtcactgacgccgagggggaataa

SEQ ID NO: 445038 - DNA, 240 bp, Serratia marcescens
atggcagatgcttttgaccacgccagcgagctggagatgggtgaccgtgaacgggcattaaacacccatttaaaccgtattaaagaggcccctgtcgattacggatactgcaatgactgcggggccaacattcccgcccagcggctggcgctgttacctgatgccgtttgctgtgtgacctgtcaggaaatcagagagctacgggaggttcagcgtgggttgggaagtcgtcaaaggtaa

SEQ ID NO: 445039 - DNA, 543 bp, Serratia marcescens
atgcgtcatttcgccatggtcagcgtgatcgccttaaaaaagaggtgcttcaccgcatggccggaggccctaaaccggagccggttaattaccggggttgtgacgggactcatgccagcttttacaaaagaggctgggagtcagtcggccccagggatgtcgcctggcaatgccagcgttacaaggaaaaataccgtgaagcacctcatgaaaaacatcattgattctgtctggttggccgccgcattgctgctggtctctttaatcctggtggcaacattgccgcaggctactgtgttgtggtggctgctggcacttgttgcaggcggtgtgacatacgccgggagaagtctagatgaaactgatcttcttttaactcctcgggatttactttctcttgctgtattttccatcggtcttggtatggggttggtcgctatctcttcaggcccgctagctggcattcagtttgtcgcgtttattgccggtgtgctggctgttcgcttggttcgttataaggggctgctgccgtggatccaataa

SEQ ID NO: 445040 - DNA, 519 bp, Serratia marcescens
atgagaaaaagatggctaacaccgcatgagttaactcaagtcactggcttgccaagcacaccgcaagggatcaacagccgtgcaaaagcggaagggtggacaaagaggaagaaggagggggttaagggaggaaaagccgttgagtttgacgtggacagcctgcctgaaagcgttaggaagcttgttatggttactatccctgaaagccgccaggaacaaagtgaacatgaattagaagaaggcgttacagagcatcatccgaatgcaaggaatcctatgattttgtgggaggcattactagggagccttacattggaagatagaaatactcttttgaattatacacttacaaacggtgcgtcaagcttgttaccttttaagacgtccgaacatgctctcaaaattgcgcagctaatcgacaccctgccaagtgatgaccagagagagatattgcacctcattgaggctaagaaacttggggcattattagatagtacacaaggccgtaagaaagcgtaa

SEQ ID NO: 445041 - DNA, 345 bp, Serratia marcescens
atgaacgaaaatagtgctgactggctctggcaggaacttatggatgagtactttttctgtaaatcgctgcgcgaagataccgagtggagttataagaaggttgttcgtggtttcaggaagcatatcggggaagcctgtccgccttacggcataaccagtcgcgatgtgcttgagtggcgaaggcatgtgctcaagaagcagtgcctttctgcacatacctggaacaataaggtcagccatatgcgtgccctgtataattttgccatcacttctcaactgacgaacttaagtaaaaatcccttcaatggcgtatcggtcaaacaggacaatgttatgggtcagtaa

SEQ ID NO: 445042 - DNA, 897 bp, Serratia marcescens
atggtagctgcaattaatacaggaaaagcctatacaggattccgccctgcgcttgatctttcggcctcgattcttgatccgcaagcattgtttgctagctacaagagccgcgtgctggcggacggcgggcatattcccgacgaagtaggctgtatcgaacggtttaacttccttttgctcaatgcaatgtatgagcgaactgttgtagctctgacaccggcctttggcatcaaaacggacagcgcgggtaacgttctgaccgtatataacttgctcggtgaggcaggcgatctgttggcaatatcaaaaggcacaccacctggtcagatgctgtatgacacatcgacccgttcgatcaatgttcaaattacgtctaacggtggtacttggctccaaagccggggcagtattgtgatgcagaaggccgcgacatatctcttggctggttgtatgagcgacagtaatagggctgacgctaatggtattacgttcggttacccaatatccggtctgcctatgacgtatatgcgaacgatgattacgaacaaccaagcgctcactgagtcatggcgttttggtactcgtgattcaggctggccagcggctgttggtggcgcgttgaacgttgcagccacactgtatgaagactacgtgccagcggctggattattcgatgtgacatccggtgttatcaccggttatgaaaaaggtaagttcgcgatgaaaacaacctcgtcaacgggtgccctggcagacctgcgcgatcggacagctgccctggtagtcggtacacctggcagcactacaacgggctgctatggaacattcagggatatgttacacctacattctgcgtccgaagcggatgcggtgctcgcatctcgattgggtatttaa

SEQ ID NO: 445043 - DNA, 1026 bp, Serratia marcescens
atgatcaagtactgctgtgcgagctgttttggggataatggtttaaagaaaaatatcataccttcactttccccagattttggcgattgttcgtattgtggtaccaaaggtattgagattattgagcctcatgctttatttgatcattttagttcattgataaacatctacgaaaatcatccggatggtaagagtcttgttgcacatttgaaagaggattggaagctattttcacatcctcttttagatgaggctcatgccaaagagttattaggtgatatacttgatgatgggaatatcgttagaaaaacttttgtactttctgatacttataagagtgaatctctcgcattatgggatcatctttgtcaggaactcatgtatgaaaatagatattttttgaataaatcacttgatacagatagacttggcgagttattaagtttccttgctttagatgatttttctaaaacttggtatcgagcccgtatttatgcagacgatgctgcttttacgatagacaaaatgggggctcccccaaagagattagttagtcatgggagagcaaatcctacaggtataccgtatttatatcttggatctaaaccagatacagctttgtctgaaattcgacctcatacaggtgacagagcttgtgtcgcagagtttactctaagagataacttgactctaatagacctaagaaaccctcgtgaaaccgtttcaccttttttattaaccgatccaggtgaaatgggtaaaatgcttgcagatataccttttcttgaacgacttggttatgaactaacaagacctgtattacctaaaagtgcagcccttgattatattccaagtcaatatatatgcgaatttattaagaaaactggctttcatggagtactttatagtagttctgtaagtgaaggaatcaatcttgctctttttgatccgttaaatgcgactggatgcaatgtaagtatttatgatatagataaagtcgaagttagtgtaagcaaacaagattaa

SEQ ID NO: 445044 - DNA, 2679 bp, Serratia marcescens
atggctgttaatcaggcgaaaatttttgaacatctcgaacaactagttgaaaaccctgagcaagacgaatttatctacggctttttaactgcttttgagttccctaaatctaccctgagtcagattcggcaaggtggggcgcgtaatgttgcgcaagaaccaggacacgttgggttaaaaaataagctccattatcagccagtggctgaaagcgatgatatcgaatctgcttttgagcaacgtattgccgatacggctgttgcaaaaaataagatccgctttgttctagtaacaaattttgttcgctttttagcctgggacacactgacgcaggaacgtctcgatattgaggttgaagagttaccccgcaactacggttttttcttaccgctggtagggttggagaaggctattctcaatagtgaaaacccggccgatgtgaaagccgctgagaagatgggaaagctgtttgatcttatcaaggagcgtaatgatttaagcaaagcagaagatattcacgcgcttaatgttttcctcactcgtttgttgttttgcttttttgccgaagacacaggcatctttgggaaaggtcagtttacttccgcagttaagagctacaccgccgaggatggcagtgatttagatcagtttctgacagacctgtttgccgtgatgaatagcaaaccgaatagcaaattacgcctgtctcttccgattcatttagctgcattcccttatgttaatggtggtttattcgccagtgatgagcctgttcctgagttggggttaaagggaagacgtatcttacttgaatgcagtgcaatggactggagcgagattaaccctgacattttcggtagcatgttccaggctgtgattgatgtagagcaacgtagccgattaggccagcattacacctcctacagcaacataatgaatgttatacaaccactatttcttgacccactgcgtacggagctggaaaagcaacgcacaaatacgaatggcctcaaacggttacttctccgtctggggaaaatgaaggtttttgatcctgcctgcggttcaggaaactttttgattgttgcctataaagaactgcgtcttttggagatggatgttatccaagctcttttgcagtgtgacccacaatctatttttatgagcggtattcatctcgaccagttctatggtattgagattgatgattttgcctgtgagatagcacgtttatctctctggcttgccgaacatcagttaaataaacagtgggaagaacacattggttcagcaccaccagcattaccgttgcgttcatcaggtaaaatttggagcggtaacagcctgagaattgattggcagacagtatgtccaaagaattttgatgaagaagtttatgtgattggtaacccaccgtttttaggaactactggacgttcagatcaacaacgtgctgatatgcaggcggtatttagcggtttcaggtcattaggtggtttggattttgtagcctgctggttctggaagggggctcaatatatccagaatagccgtgctgagctggcactggtggctacaaactctctatgtcagggagagcaggtagcaacgttatggccttctatattcgagttgggactgagtattcatttcgcttaccctacctttacatgggcaaacaatgcgcgtgataaagcggcggtgcatgtggttattgttgggctatcagggcgaagcaaaacgcgtcaacttttccagcaggtagacgggcagtggcacagcaaacaggtgaacaatattagtccttatctggttgaaggtagtcatgtggctgtggtggcgagaactaggccaatattagattcctcattgattatggttaaaggaaatcagcctactgacggtggtcacttgttaatgaaccgggccgagcgtgatgtattactccgccatgaaccacaagcatcatgctgggttaaaaaggtattgggggctgatgaatttcttaatggacaagaacgctggtgtttgtggcttgtagatattactgatattgagcttcattcgatgccgcttgtatatagtcgggttcagcaagtggctgaaatgagaaggaatagcactaagttaagtacacgaaaaaaatcaagtactccccacctttttgatgaaaaccgccagcctgaatccggtgattacattctgatacctagcgtatcatcggagcgacgaacgtatattcctattggtttttatgatgcaagtgtgatttcgaccaatctgaatttcattatccccaacggcaccttatacgaatttgcaatactaacgtcattgatgcacaacgactggatgcggttagtcgccgggcgcctaaaaagtgactaccgctactcagcgaaagtggtttacaacccgttcccatggcctgatgtgactgatgtgcagcgtaaatctcttatcgatctagcaaaatcggtgttactaatacgtgagaattatccagaaagcactctggcagagttatatgatccgcttaaaatgccagctgaccttttagaagcccatcaggcactggataagttcgttgatcgtctctatcgtgacaaaccattcaaggacgccactgagcgtttaagctgcttgctacagcgttatgaatcattgactaaagcataa

SEQ ID NO: 445045 - DNA, 2016 bp, Serratia marcescens
gtggaaaatattttacaggttacttacgggcagactgggcaaagtgcgagtctaaatgagtttggtatgcgggaaatgcaggcacgagcctttgagcagcgcaatagcccttatctacttatcaaagctccaccagcatctggtaaatcaagagcattaatgttccttgccctggataaactcatcaatcaggggatacgcaaagctattgttgcggtccctgaaatgtctatcggaggttcgtttaaagatactgaacttacgaagcacggtttctttgctgactggaaggtaaaacctgaaaataatctgtgcattggcggtggagaggctgggaaggttgaagcctttaaacgatttatggcgagtcctgacgacattctggtctgtactcatgccaccctacgttttgctttcgataagctgaatattgaatcgtttaatgattgcttggtcgcaattgatgagttccatcatgtctctgcggatgaaaacaaccgtttgggcaatctgattgatgctctgatgaaaggttctaatgcacatattgttgcaatgactggttcttacttccgaggggatacagtacccattctgcaacccgaagatgaagctcaattcacgaaagtgacctatacttactatgaacagctcaatggataccagtatttaaaatcattaggcattggctaccatttttatcagggtccatacatcaaggcactaccttcagtgctggatgccagcaagaaaaccatcatccatattcccaatgttaattccggcgaatcaacaaaagataaacatgccgaggttgatgccatcctggacgcgctgggtgaggtgcaacagcaagaaccagataccggcatctatctagtgaaacgcaaaagcgatggcaaattgttgcgtgtagcgaatctggttgatgataacccggcggaaagaccgaaagtacaggcgtatctgcgcaatatccactctgccgacgatatggatatcattattgcattaggtatggcgaaagagggatttgattggcctttctgtgaacatgtgctaaccattggatatcgcagctcgatgacggagattgtgcaaataattgggcgtgcgacacgggattgcgaaggcaaaactcacgcacagtttaccaaccttattgctcagcctgatgctcaagatgatgacgttaaagtatcagtaaacaacatgcttaaagccatcaccacctcgttgttgatggagcagatcatggctccaaatattcaatttaaaccacgatctcaatggactggcgagccgttacctgccaatacggttctagttgatgatcatgtattaccggtatcagacaaggttctaacaatccttaacggcggtaaaaacgagatcctggcggcgctaatggcgaatgagcaggtggttaaagaggccattaccgagtcaacaccgcccgaggtaattactcaggtagtgttaccatcggtgatacaaacgcttcaccctgacctgactgaatacgaactagaacaggttcgcagtggtattttgcagagtctttttgtaggtcaatgtggtggtcttattgatgaagccgacttaccgactgatgctattattgatagcgccccgggtcagcgtatcggaaattcgaatgactcattaaacatcaaaaatcagttcataaaaatgggtgataaattcatcaatattgaaaacttgaatattgacttaattgatgcggtaaatcctttccacggtgcttacgagattctatcaaaatcagttaccgcgacaatgctaaaaactattcaggaagcagtcagagctaatcaggctcaggtatctgaggaggaggcggtaatgctctggccaagaattaaagcgtttgccagtgagcataaaagggagccatcgctgaatgccagtgacgcaatagaagttcgttatgcagaagcgttagcttacatccgaaaaatgaaacaacagcgtactgtgcgacaggaaccgtaa

SEQ ID NO: 445046 - DNA, 1263 bp, Serratia marcescens
atgctcagactttcacctcttcaagttcgtcaaaaagtgacaattgatgacattttttccgaaccagacgatcttggtttactcgtagtcgaaccactaaaaatatattcccctacgggtaacctgcctgtaagcagattagaagagattaatgcattctatgtggttcatgggcgtccacctctacccgattcggaggaatttaaggaaacgttgctagcacaacgtttgagggttctcaaggataacaagcaatatcgcgagatgttgcagccatttgatattcatggcttactctcaggtgaaaataacgagaatacccttgaatcatctgtatcattctcagctcctcccgtcgaggttgataggtcggagttggtcacctctctggacgatatctttgctgatgacgatgatggattgctctcatttgctgagcccgatattttcacgttaaaacatgttccgattgaaaagaaaacacagcctgacgaaattgccaaacgacagccgtgcccagatttttatcgattttccccactgtttgagacagtccaaaatggtctgaaaacgggagcgttttcatttgttcgcttccgccatgaattaaaaattcatgaaggtgatttttttatcctcaatggggttatgggctatgtagataaagttggtgagcgattggaggaatatggaccttggaatgcccgtttgcatttggtgtttgaaaacggaactgagatgaatatgcttttcctctcgcttacgcatggtctggtacgagatacagaaggtcgtaaagttgttttgaatgaacagtcaatacgtcctgatgaagctccgattccgacaggatatgtctatgtccttgccacgcatagcgaccagccagctcttcaacgttttaaacctgatttgtataaaattggctttacagagggaactatagaagagcgcattaaacacgctgaaaaagataaaaccttccttgaagcacccgttcgtatagtcatgaccacgcaatgcttcaacatcaatactcacaaacttgaagctctaattcatggttttttaggtaagcaacggctcaatatcacgctacgggggctggatggacaaatttatcatcctcgcgaatggtttcatgcacctttagcgactgtgctctctgtgatcaagtacattcttgacggtacaatttcgcaataccggatggataatacgacaggcaagattgtggcgaagaaagatacaggtcattcgtga

SEQ ID NO: 445047 - DNA, 912 bp, Serratia marcescens
atgggatggttgcaggaagtttctgcaactttacaggagtaccttgattatcctgaagtagatgttcctcatttagaggttactgattaccgcgcaattgatgatgaaatgatcgaagtgatggctgcaaaatgccgtcagcagtggggtttgggtatagctcctattaccgatttgcttttgattatcgaaaatgccggagttgtatgttctcgttttgaacagggaagcgcaatgatggatgggtattctcaatggaataagtcagagagtcgtccttacattattcttgctagcgacaaagataattattacagaagtcgttttgacgctgcacatgagcttgggcacgtagtgttgcacagatatgtcgaaagacttgactctgtcaattttaaaccaattgaggaacaagctcataaatttgcagcatgtttgatgttaccagaggaagcattttcggtagaattacctccgtttccaacgcttgagaattttatttcattgaaaactcgctggggaatgtctgttcaatccatgattcatagagctaaatcattggaactcatttctccgctagaataccagcgcctatataaaagcgtttctgctcgaggctggaggaaaggtgagccacttgatgagcttcgcaaaccagagtcagtgagattgctgcctcgatgtgtcaatttgttgtttgaaacaaacacattctctaaatcaaccttacttgaaactttaagcatgtcccgtgttgatgctgaagatattctttctcttcctcgcggatatttagcagataaaccattacttgatattaattcaaaaatcaaactcaagaatagtctgacacctgcagtaagagaagatgaagaatcaaatgttgtcaattttttcactcgcaaatcttaa

SEQ ID NO: 445048 - DNA, 669 bp, Serratia marcescens
atgagtaaagatgacgtacaaaaggacattagcggactgatcgtaaatgcttttcagcgagaattctggcttaacatccaagaagaactccataccgcctacgtggctgcaaatgcacttacaatgggaagcatcgcaaaactaggtgtgccagaacaatctcgctttcgccctcaagctaggcattacgtactcaatgcagcttttcgaagagctgcagaaaactcgggcattgtttgttgtgacgttgacacgacgcctaaaggtgagaactacatcgtagtaaactctgcaggagtgaagattagccgaatcgggctgaactatgatgaaaagtgcattcgaggtgcaaaacatcgttcattactagcggaattaaacgagaattttgaagggtatacgccagatttatttagcgaacgtgataagtcggaaggtggagttggcactctaggaatgttggtcttaaatatcaacccacctcacagtcattcgcaagataacatgctggacctaaggattgtcgttccctttacgaatatgaaggggtatcactttaaccgttcagtaagcgagctacttgagctttaccatactgaacaagctgtggtcataccagacaaggttattcctcagctgaagaaacgcctgaaagaacaggaaggctaa

SEQ ID NO: 445049 - DNA, 1293 bp, Serratia marcescens
atgtgtgacttattcttatcacatccatttcttggcgatttaaggatctcaaatatttacgaggagtatgatggaccgcgattattttctgttgaaaatgaggtcggttctacttttatttcttattggattggtaatgatgaggatttcgataattggtttctaataccatgctcaaaggctaaaataatagcttatgaaaagaaaaatatagacttattgtcgttgttgtctcaacaggaacaggctaatttttacaaaataaagaagccgttttgtcatgataagaacgtagatgtaaccccgatgctttcaaaagaaatacattcaataaaactaccgagagcgggattgtatgttgaagatataactattgcctcgttagctagaattgatgaagcactggaggcgactcatgagcttaaggtatcaaaaagtaataagagcgcaaagaaaaatgtcctccttgagcatgtaactagggtatgtgaaaagtttagtgaactagttggctcatttaatgccactaatggcatactgggagatatacaacctctgaatgcaagatatggttcatttgttctttctttgcatgctgaagaaatgatgcgttttgagagggttctggaaagaattagtgagctgatgattaaccagcgagatatcactccttttttaagagataatgatattgatattaaatcattttgctcattgttagaggcaatcgtttcgacaagtgttaactttgaactaaaaagtaaattctccgacgatgctattataaaaatatataagaaagatgcagtgtcgtatcttaaatcaatatctggtcttgcattacaatatgtatcgtcatatcaagtgccgcaagctaacgatttagataaagtatttaaagtagtggatatgacttggaatggtgaagatataacacctagcgcattgggtgttgataaaagacacgtagcttattataaacacgcagcaaaaattatgggtttcctagaaacgaatggttcaatcactgctgtagggcaaaaaatagcatccacatcagaggatatgcaattaaggtatagaattaccgcgagatcttttgaatccagcaattgtggatgggcttgggtaaattggagtggtgtaaataagctctctgatatcgagcctgagtcggcggagacttttttacttgaaagctgcccatctttgagtgaggaaaccgccaagagaagggctacgacgttatcaaaatggtgtacagaacttaagccgtactatatagaattataa

SEQ ID NO: 445050 - DNA, 528 bp, Serratia marcescens
atggataatatagaagcacgaaatagtagcaataagaaaccttatcttacacaagcaatcattatttctctatacatattagtgtattgcaatgcaagtatttggttgctatttgatggttggattagtggtttcaattcaatatcatggatttggaatttacaagacaataaagagttcccagatattgtcagattcgcattttttacagttttaggatcaattctcggtggaggggttcttagcattacctcttttcacagacatatcgcaattaataaaaacttcgataacgaccatttatggggatttattttctcacctatattatctacagttattggtatcatcatatacagcttggttcagagtggactccttgtactgacaggcaccataaacgaaaattctaacaatataagctctgttcttggatttaccgctatcggtgcaatatcagcttataattgggatatttttataataaagctccaagaactatctagcaagctttcagataagaaatag

SEQ ID NO: 445051 - DNA, 483 bp, Serratia marcescens
atggctgaacttatcattgaagtgcctgatacgttgcggcgtgccctggagcgcatggtgcgccagcttacgaaccgccagccgctgatgcgggcgatcagtgaggatatgctggacgcagtgatggaaaacttcgcgcaggaggggcggcccaagtggctccctatccagcgggcgggcaagatactgcagaacacccgtcgcctgatgtcttccatcgacagcgacgccgacaacaacatggcggtggtcggcaccaacgtggtgtacgcgcgcattcataacgaaggcgggaaaacccgcccgcatgtgatacgcccacgctataagcaggcgctggccttcaacggtcgggtggtcaaaaaggtcaatcaccccggttcggttatcccggagcggcgcttcctgagcctgaccgacgacgatcacgagaccatcaaccagaccatccaggactacctgggcagcgcgctggacgattag

SEQ ID NO: 445052 - DNA, 2019 bp, Serratia marcescens
atggcccgtgaatttgatacccagatgacgttcagggtgcaggatgatgcgaccccgcgcatccgctccctgtccgaagagttccgccgcatgagcagcgcccgcgaaacgctgggtatccggtcggagcgtacgatccagcgtgagattgaccgtaccatggcggcgtataaccgcctgtctcgcagcggcacgctatccgcgaccgaacagtcccgcgcattcgaaaaaacgcaggccacggtgtccaggctgcgccaggaaatggccggggccgagcgtcaacaacgcagctggggcaaagcggcattcgcaatcggcagcggcgtagtggctggcgccatgacgctgcgcaagcccatcaacgaccagatggactacagcctgcatcttgccgagctggccaactttgcatacagcaatgatggcgttgccgagcgaaccaagggcaagcagaccattgatcaggcgatacgcgaagccctgcgccaggggggcggcacccatgagcaggcggtcggcgcagtagaagccatgttgcgcgccggtaacatgcagcgctcggaagtgtttaaagagttgggcaacgtcatgatgaacgccaccgcaaacctggcggatgcggtggacatggccaacctgcagtcgtcgatttacggtttcgggcttaacaagcaggactcgtcgctggcgctaagcgccaccaccaccgctgctcagcatggccgtgcaggcgtggggctgctggctaaagaactgcccggcgcattgtcgtccgcacgttctgccggtttccacggtcgtgaaggctttgccgccgttcctgccctgttccagactgcggccaaggaagccggaacgccggagcaaggggtcaccaacgcctataacctgatggccgatctgacctccagtaatctggccaacaacgccaagcagctgatgctgaaaggcaaggacggtaaaaccatcaagggcgtagattttcgtgccctggcgcgccaggacgccgagaaaggtctgaccccactcgataccgtcaaccgcctggtcgatcgcgctttagccggcgacagcggctatcagaaactgaccaaacgcctggcaacaaccaaggacgaaaatgcccgcgccgatattgaggcgcagcgcagtctcatcgaggggcagtacattgcccagctgttccctaaccagtattccggcagcggcttccgcgcctatcgtaaaaacaaaccgtactttgacaagctgcagcatgaaatgctcgagcagttcgatttaccggagggccagcgctccgccgaactcgattatgggttaatcaaggacgaacccaagatgcagctgcagcgggcggagaatgaaaaattcaacgcgaccaacgatgcgatctctccggtctccaaagtgctgggtgatgttgcagagaccggggccaagctggcccaagagtttcctggattaaccaccgctgcagcaggtgccgcgattgcgataaaggggcttggcctggcagcagcagctaaaaccggtgccgaccttctgacggggcgcaatggtggtaaacccggcggtgtcctaagcaaactcaaaggactattcggtaagggaggtaatgggatacctgatggtgcagccaccaccgctaaaacgtcgggcctgttgaaatgggtgccattattgggggatctcgcacttgcctatcaaggctcgcaagacttcccattaatcgacattcagcggggcaaagaccaggccgccgaggcccgtgccaggggcggagagacgaacccggacatgatggcgctgatgccccagtccgttggggcgctggatgccctggacgagatccgcaagtggttctccggcagtggccaggataagacggcagataaaaccgctgcagcgccacctgcacccgctgcgccgatcgttaacctgacggtcacgctggatggccgcgagattgccaccacgatggaacaacgactagaccgcgatgggagaagaaaataa

SEQ ID NO: 445053 - DNA, 219 bp, Serratia marcescens
atgtatctctgcgtcagcggttgtgaatacctggataacggcgatcggcgcatctaccacctgaccgataacagcaccgtggtggagtgcccgaagttgccaggtaaatcccggttcaagttctacgacggccataaccgcaccgtctataccaaccaagtcagaacggcgatgaaaagcgcagtcgaacgccataaaaagcagtggagaattcaatga

SEQ ID NO: 445054 - DNA, 429 bp, Serratia marcescens
atggacaaaaaaatcatcaatccagagtttactctggaagagcaacttatcattataattgataaatatatatcaaaacgatatcagccacatgataaaagtttctcataccagctttacttaatttttgtgggctatcatttaaaatatttctaccctaaaaggatttattccaaatccaatcgtaatattgataacataatggctatgtttagctcagtttacaaaagtctgacaagcaatcttttacaacgattaaataacaaagaaggcgttattagggaactaaactcgcttgttaattacatagataacaatcaagaaaaagcagaggaaatctatgctattgtcagggcacaatatgaagttaaggttatcgagaacgagctaacccatgaagcagttcgcataagaaccttcagattatag

SEQ ID NO: 445055 - DNA, 1215 bp, Serratia marcescens
gtgaagggtatgcggaagatcaagaggggtaagagcttcgcaggtgttgttcaatatgcattgaagccgggagcacatcataaaagcgatccagtcgtaatcgggggcaatatgctgggtggctccgctcttgaactgattgctgaatttgatggcaccaaacagcttcggccagatgtccagaaaccggtatggcacaactcgcttcgcttacctgatactgaatcattatcgaatgaccaatgggtaaccatagctgacgactacatgaagaggatggggttcagtgatactcatctccgttgctatgttcttcatgatgatcaggctggtcagcacatacacattattgcaagtcgcatagatctcaatggcgggaagctctacttgggtaggaacgaaaacctcatcagtacccgcataatcggtgaactcgaaatcgctcacggtctgacattgaccaagacagcctcttcaattgcaccaaagcaaccgaagcggaagagaatctctcgcaacgaacagatgctatcagaacgaactggtgttccctgccccaagaaatcccttcaacagatcattgataaaagtttggcagatacgcctgaccttctaaccttcacaaaacgactggaggaagccgaagtatcttggacggctaacattgcttctaccggtaagatgaacggcttctcattctcttaccgcgatatagctttcaaagcttcgcagttaggcaagagttactcctgggcaaatcttagtaaccgtcttaactataaccccggccacttagaagctctgcgaatcgacatacctgcaaaggatgtttctcaagctcccatgccaatacctgttcctgctcctgctcctgctcctgctcctgctcctgctcctgctcctgctcctgctcctgctcctgcaaaagatgttgcaacagcggatattccaagggaaagcataagtgaaaaaattgccgaactggaattacggctcagagaagacaaacggaacgaaatcgtagaaaagattcttcaaaagaatgcagtacaacagctaaagcatctcaggcttagtagctggcttccctttttacaacggctcatagagcttctccgaagctacggtaagagcattcttcacaacaaccctgcaagattctcaaaagtctatgcaactcagcatctcagtcggaaaagaaaaattcgtttatag

SEQ ID NO: 445056 - DNA, 1584 bp, Serratia marcescens
  misc_feature (15)..(44): n is a, c, g, or t
atgtctcgaacaggnnnnnnnnnnnnnnnnnnnnnnnnnnnnnncatttataatgttacagccgttgttttcgatgaggcaatgcagatcggaagtaaatattttgaaggtaacgttttggctaaatgtggaatacagcttgaaaaaatatcaaagtttctatgtgaacataatcttgttaagtcaggatatatctcatggaaaaaccatgtgaaacagaaagtcaaaaataattaccttcctgagatcgaggattatcaccgacgcgataagttaccagatgaagaggcattactcgctattgctgatattttttctaaaaatgatgagttactgagcccaagggataagttcaccagttcagtatttgcacttctactttgttgtccgagcagaatctctgagattttagccttacctgctgattgtgagattacacaaaaagatgataagggtgtcgaaagatatggtctgagattctattctgttaaggggtatggccctaatatcaagtggattccacaggttatgataccagttgcgaagaaatcgattaggagactgctttccttatcacaaaatgcaagggaattagctcaatggtgcgaaaattaccctgataaattttaccgacatgaactttgcccaaaagttgatgaaaaattaaagttgactgttgtacaggtttgtcatgcacttggctaccctctacatgatcgtaaatcatgcgttctaaaaattaaaagaacgagtttggatggtgggaaaagtttcttaaactccaatgattataactattcattgagtgacctatgggaaatgattagctcaggttttagcagagactttccatggtacgataaagagaaatctataagatttagtaatgctttatgcttgctcaatgctgatcaattttctttatcacgaatggcttcaattttcatattttacaaaccgactaaaagtttcttctttagcgatatacaaagtaaaagaagctttgaggtggggtataaaaatatatttgcacgatatgggtattatgatgatgagggtaaaccactacttattcgctcacaccaaccacggcatctattaaatacaatagctcactatggtgaaatgtctgaacttgatatagctaaatggtctggtcgtattaatgctaatcagaacaaagtttataaccatgtgtcggaagaagatatgttagataaaatcaaagctattaaattgatcaagagtaattattgtaagagagagtcaattccctcaattgaatcgccagttgacttcgataacctttatcaaggggcaattcacttaacagaatttggttactgtgtgcataactatttggttcaaccttgtaataaaattaatcattttttggaatgtgacaatgaggcactcgacatggaatcaattgatagaatgaagcttgaatctatccgagaaaaagtaacaaaactgaagagtataacgcagaccgcttgtgaaaatggtgattatggtgcagacaaatggctgcaacaccatgagaaaaatttggaaagaattaataaactattgaataattga

SEQ ID NO: 445057 - DNA, 225 bp, Serratia marcescens
atgattaacgtgatcgcccgcgagggcatccgggtgcctaaagaagagatgcccgaccgttacatcaccgacagcgaagcggtcagcgttgagcaatccgcctactaccgccgccgcttgcgcgagggtgatttgctgctggccaccgatgcatcgcccggcgatgcaccagcggtcaacgataccgaacagacacttcccgccaaggttaagggggcgaaatga

SEQ ID NO: 445058 - DNA, 648 bp, Serratia marcescens
atgattagcgaaaccgagctggccatgattgaacgcctgcgcgcaggtcttggccagatggtgaaagaagtcagcagctacgggggcgagctggacgacgtcggggccattgtccgggcgttaccggcagtatgggtcacgttcctgggaatacagagttccgccccggtcagtacccataagaaccgttttcgcgtgacgggtcgctttgcggtgatggtcacggcgtacaacgtgcgccaggaagcggcacagcggcgcggtgggcctcggcttgacgaggtgggctgcaacctcatcgtccgttcggtacgtcgcctgctaacccgccaggacatgggcttgccgattgagccaatgatgccgggccgggtacggtcgctgttcagctcaaggctcaatgaaaaagcgatgtcggcctactcctgcgagttcgacacggtctggattgaagaggcgctggcgtgcggccactggcctgcaccggaaggcgacgacgaccccgaccgggtgtttgcctggtatcgcgggcggcttgataagccgtatccgatgcatgaaagcaccgggctggcgtatcacctggatggccaaggcccggcggtggcgcaagacattatttttacagaggcaaaagaccatgattaa

SEQ ID NO: 445059 - DNA, 1128 bp, Serratia marcescens
atggttttagaaaaacaatcagatgggactaactctttacaatatattgaaacattcctcaacttgttgatttcattaacgcgtcgagaatatatatcgccaactgtatatattgatgaacctgagattggccttcatccaaaaattgccgaatcactcatccaaaacttatataatgtaatgctttccttttcaaaaaaagatccgactaaaactgagaaaggaaaatataaaaccccttaccctagaatatttattgcaactcactcccctcacatagttaaaaacataataaagcttttcaaagaaaatcatgtagttatgcatttttcaaaatatgaaaatactcatacacgttgcaacaccctacactcaacatataaggacaaacgcttcttaaatatgttcagtgataatgaagccagacttttcttcagtgactttatactttttgtagaaggagaaaccgagcaagagatttttagcaatcaaaaattaaaaaatcatttcccacaactaaacaaaatagatatttatccaggaaacaatgttttaactgaaaatataaatccaagttactcaaatacatcaatcccatatttatttttatttgaccttgataaagccttagagttcaacatggatgaaaaaatggttttcactccaaaacttaaaagtaatggtcaactattttgcttagataaaattgaaggggagataaataaatataagtttgggtatagtgcagaatatcaaataacaagaagaaaactattatttattgatgattttaaaaatgaaaaattaaaacttgacgatattagtttaggattcaaaagcaatgacaatgttatctttatcgaagcaaaaaaatcaataaaagagtacctcctagaaaaaagagtttacattatagatgacactattgaagggttattgataagcaaagactctaaagaattgttctttgattggctaagagatgtacacaaaatcgatcttgatcctgtaatacatcgtgcaaaaaacagccgatactttacgacagatatgctgattgtttatataagaatgtcttttaatgggaaatctgagtcacttgtgacggtaatgactccaacttattga

SEQ ID NO: 445060 - DNA, 816 bp, Serratia marcescens
atgagcggcggccagggcgaccccgaactggatgatgccctggcggctatcttcagcgccggtcataccctggtgatttcaccgtactccgatacggcctcgctgcgcaccttgtccacgcacctggataaggtctccgggccgctggagcagcgcggcgcggtcggcgtcaccggctggaacggcacgctgtcaacaggcacgacgctgaccaccgccgtcaacgcggcgcgcatcacgatgggctggtacaacggctccgcgctgccgaacggcgagctggccgctgtctatgccgccatcatggccagcgagtccgacccggcgcgcccgctcaacacgctgacgttgccggggctggatatcaccggccaggacaagtggccaggacgtaccgagcaggagaatgcgctgagtaacggcctgacgccgttcgaggtcagcggcagtacggtgcaaatcgtgcgcgctgtcagcacctacgtcaaaaacgcgatgggcgttaccgatcgctcgttgatggatgtcaccatcatccgttccctggattacgtgcgcctggcgtgtcgtacccgcatgacgcagcggttcccgcgtgaaaagctgaccgacacccggcttgcgcgcatccgctccgagttgctggacgtgctgtatgcgctggagaccctggagatcgtcgagaacgtggatgcgctgaaagaccagcttatcgttactcgcaacctgcaggacgacacccgcgccgatgccaccattccggcgtccatcgttcgcggcctgcatgtgttcgcgggcaccatttatctgctgtaa

SEQ ID NO: 445061 - DNA, 894 bp, Serratia marcescens
ttgcgtgaagatttcgatattgtaatcggtgtggattcaaactacattgatagtatttctgttattgattatataacttcaagagatgttgatattatattttacaaaacactattcggtatatcaattgccttaaataaaggtatgaaacctgatcatgatataaaagaactatcatcctatttatcaggtttaaaaaaagagaaactatgtgagtttcattcatacttatctaataataggcatttaaaagactccataaaaacaacaaacaaaatctactccaacatatattccaatgaagaattttttaggccatccattttcctttcggattatagtagtactaattataagaaagaaaaatcgccactacgtttagttagcgaaaaggttgaggttattcttaatatacacaaagacttgaccgaagttatatcaaaacaatatattcttattgtcggattaagaaacattgaagaaagtgataattatgacactttcaaaatgaattatgtgaggacaaggaaaggaaaggtatccataaataacattgccgaattctcagagcttgatcttggaatgaaagcacgcttcatgaagggaagctactttgagaaggacctgaagatcatctctaataagattagaaattctatcgcacataataactgggagtataatgaattaagtcaagaagttttattcagatttaacaaagggattaatgatgcacctaaagaaaaaaacttcgaatgcaaaacaattcttgaaataaatagtgaaataatcaatttatttaggttgatgcataaattaaatattatttactacctatttggttgtttttatggacgcaatgattgggataaaggagaattagacaacatatga

SEQ ID NO: 445062 - DNA, 879 bp, Serratia marcescens
atgcgggtgggtaaatacccgtccggcaccaccgaagaccagaaagacattctgatggacgctatcatgagcctgggccatgacgcgggcggcattatccccgacggcatgttgattgaattccagtctgccgcccagggccaggttgatccgtatcagttcatgatcgagtggtgcgagcgcacccagtcaaaaatcatcctgggggcaacactgaccgcccaggccgacggcaagaccagcaccaatgccctgggcaacgtgcataacgaagtccgtcacgacctgatggccagcgatgcggtacagctggcgggcacgctgacccgcgagctgttgtacccgctgctggtgcttaatggctacggcgatatcacgccgcgccggatgtgccgctttaaatttgatacccgtgaaccggaagacctgactcagacggcgaccgctatcgaccgacttgtccgcgctggggtgccggtgacagtggattgggcgctggagaaagccgggatgccgacgccgaaaaaaggccaggcgctgctgcagcccctgactgccagcccgttcggcacggtgggactgagtcagtccgccgccctgacgcggctggccgcgctcaatactgccggaacggtggaagatgaccccgtccaggtagccattgatgatgcaccgccgtctgttgccgacgccgtcggccaggccatggacaagatgctgtcaccggcgcttgcagctctggagcgggggcattcgccggatgaggcgatggccatgctggcgacggcctacccgcaactggacgacagcgaactgcgccagctgattgcccaggccattttcgtggcggacgtgtggggacgactcaatggacgttga

SEQ ID NO: 445063 - DNA, 369 bp, Serratia marcescens
atggcaaagacagcgactgatcgcaaggcgcagcagcgcgccaaactggccgccaatggtgggctgaggcatgagctggtactcacgcagcaagaggcgcagatgctggagcgcaactgccagcgccgcaatccaggccgcgcgccctatagccgtaacgagtatctaagcctgctgattttgtgtgatgatcagcggctagacaggcaagaggccgctctcgggagctgccagcgttgcggtaagacgctccccggcggctgcaacggcaattacagaggcgaagccgcctgctggtttacccgtgactgcatggcgatgaatttaaccagcgccgtgaccggtcacgcaaatcttgagggggagtaa

SEQ ID NO: 445064 - DNA, 486 bp, Serratia marcescens
gtgacggtgctggcccagggacacggcacggcaaacgccgacggcaagcataaccggcgctgcaccgtgcgcgatacctccgtaccgttctatcgcccgcggattgaggtggtggccgataccgacagcgacgaagaggtacagtttcgggcgcgcaaaatcatggctgacgcgcgtctcgaaggtctgctgatcaccgccgttgtcaaggggctgcgcaccgctgccgggcaactctgggcaccggggcaacgtgtccaggtcaagagcgagaagcacggcatcaacgacatttattttgtgatgcatcgccgtttcagtggcggtcgcggccaacagctgctgaccacgctgaccctgcgcgaggacggcatctggttgccggatgcgttcccgaaatcaaagcgcaaacgcaaggggaaaggcaccggcaagaaagggcagaaaggtctctggaacgactgggagcaaatcagcaatggctaa

SEQ ID NO: 445065 - DNA, 420 bp, Serratia marcescens
ttgctgactcagaaagatgagcgcattgcggcactgtcagcgcagacgacggataacccagacccggccaagttcgtacccgtcagtgtgctgacctcggtacagcaacagctggcggcactgagccagaaagtgaccggcggcgaagtaaacgggcttatccaggccgccctcagcgatggccgcctgctgccggatatgcaggagtgggccgaaacgctgggcaataaagacattgcctcgctgaaggccttcctggacaaggctccgaaggtcgcggcgcttaacgcgatgcagaccggcggcaaatcgccaaccgatgtcctggacaagtccgggctggatgccgacgccctggcggtgtgcagcgtgttcggccatgacccgaaagacgtcgccgcgttatcacaggagatttaa

SEQ ID NO: 445066 - DNA, 261 bp, Serratia marcescens
gtggtgcgtgatgccgggagcgtttcgctgtccaatgcctggtggcgtttgcctgcgctgttggcgcatccggatgtggtgctgaagggagccagcggcgacctcgtatatgtggtgacgcaaagcggtacgccccgcgcggcgcgggtgggattttctgacggtaaacccgtggtaaaagagacctggatgctgtttgacggcgatgaggcggagctgatgcagctgcctgtcctggtgggagagtggcgcgatggctga

SEQ ID NO: 445067 - DNA, 123 bp, Serratia marcescens; identical to SEQ ID NO: 154057

SEQ ID NO: 445068 - DNA, 219 bp, Serratia marcescens
atgaagcaactgattgatgccgggaacggcgtatatgtcgatcctgccgaggtcagcgccgttatgacagaactccagggacgcgtgtgcatcctgctgcgcggcatttctcagccgcttctcgtgcgctgtgagtccggtgccacggcggatgctctggcccaggcaatgaccgctcgcatcaatgccgtgatggccgaacgtcataacggcatttaa

SEQ ID NO: 445069 - DNA, 165 bp, Serratia marcescens
atggccatcaagggcggcaacggcgcgaccgccagcttcgaaggcaacgtcgagcacactggcggcacaatcagcagccccgacgtcgagataggcggcgtcaaacaaggcacccacaaacacaatacgccgtccggtctttccgacggccccatcagcgggtaa

SEQ ID NO: 445070 - DNA, 375 bp, Serratia marcescens
atgtctggcaaaataacatctgcggtggtgttcctgctggctctggcggccgttgtcggcgcaggcgcctggatggcagggcgtcactaccagccgacgatcgatcgcctcaacgacgcgctgacacaatgcagggacaacaataagcaacaggcatctacgatcgccagccagaatgctggaattgaggcgcaacgacgcgctgatgctgaacgagaagcaaaggccaagactgatcaggaaaaggcccgcatggaggcgcagggcgattatgagagggctaacgcagttatggccgagcgaactacaggcgaagcgtgcaccacggcgtcttcagcttttgacgctgagctgcgacgggagcgtgcgaaatga

SEQ ID NO: 445071 - DNA, 741 bp, Serratia marcescens
atggtcatggtcattaaatcaaacgttgccggcgcgtctatttctaaaccggacggatggaatccgccattcagtaccgaagggctgaaatatgcaaatatctttggtcgcggaaatttgactgctaacctcgcccccggcggcgtgccagcagtgccacacggaaacccaacgcaaaaaggcgaagcggtagagttctctaccagtaactatatcgatactcgcattccgaccagcgaaaaagcgacgttaatttctatcgccgatatcagccatacgctgggcggtcgaaatttcttaatttcaagcttcaaaggcagcaaagacgcaggaaaatcactgcttattgagggtgcaacgcctgcaaaaattgccgtatatgcgcactacaaagggactgacgccgcaggaaaaccctttgatgggccatatagcgtttgggctggtgaaaaagatagcagtaatcctgtggcattccttgccggtcaggattttggcgatcacttaaaaatcgctgatttaacaaattcggtatcacagggttatgcgcccggtagcgatctgcatgcctacgtaaacccggcgctcacttacctaattggtcagagctggactgaaggatcgacgaaacaccttaactatgcctcgttgatttatgaccgcgtgctgagcgacgacgaaatcgcgcagatttaccactacttccaggggtattacagccgtcgcgagatcactatttga

SEQ ID NO: 445072 - DNA, 174 bp, Serratia marcescens
atgcgtttcagaaggacttcgttaaacgcgtgccgtttcagctgtaaagcgaaaggctccgcaggccggcagcctgcggaaaccggcgagaatcagtcgatgaccgccgtggtcagacgcgaggtgcagcacagccgatcgcgcgcgtcgaagatctcgatttgccacacctga

SEQ ID NO: 445073 - DNA, 933 bp, Serratia marcescens
atgcacagcgttaatttctattctttcagaattcttacccacaaaggtagcaggaaaagtaaaaaacttggaatgctgggtctgagcaataaaaaaacagcttatgaaatacttgaagaatacttaaagttacataaatttagcccaatagaatacggggtgtctaaaacaaaaatatctttggaagagcataaaaaaataacatttaataacgctaaaggtttagtttttggctatataaaagtcggcaagtatggtgagagtagtgaaataaaggacattaaactaaaaaccactcagtatatgactaaggttgatgacgtcactttaagagagcgatatattcttatttatttacctgatcctttagaagaaggtattatagccttccattcctcagataacgttagcgctaaaggaactatatcagatgccttagtcgagtactttaagaaacaatatcaacttgaagcgaggataaatccactttgccataagaaaatcccgcaatacattcttgactctgaagtaaaacaaataagagctcttggatatgaagctccaagcgatatagctgactcctttggtacaaataaaaccaatgttaaaactgacttggtcataaagtataaccaaggatatatgggtagctttagggacttacaaagtaaaaaaatctctaatgtgattgaaattgttgaagataaatgtgaagaaataaaggttgctctacaattaggtaaaagaactgttgtttttaaatatgacactataatcaaaaagggaatttctgttgaactggatgatagtacacttaagattgatgcttctactggtatccctgagttaaaagcacttcatgacatggtgcgctcattgactaatgatatactcttagagatccatagcggaaacaaaggggttaggatatga

SEQ ID NO: 445074 - DNA, 555 bp, Serratia marcescens
atgaacaaaataaatatatggcaggtactcctaaaacattacagaaccatgacggatcaaagaggagtggcattacggcaggatatatttattcacttttttctacctggaataatatccgttgtcgtttgtatattttatgggataatgaagccatccatttcagcagtttttgtaaattttggagccatcacgacggctttgctcatgagtgctgtcatcatgatatatgaccaaaagcaaaaaacaatttttaaaatatcggacattatagaaaacaaaaaaccagaaactaacctgcccgcgttggagactaataaaaaagtatatacgcaattatgccataatgtagcatacgcaatattaacatcggtgatattagttattgcatctgtaatcatttctttttttcctgagaaaaaagaaacccttgagttactatatttctcagttcccgccttcatgctcagcttcatagcttacgcggcttttttcaccacagtgataacctttttaatggttattaagcgattcagctttatacttgataactaa

SEQ ID NO: 445075 - DNA, 3096 bp, Serratia marcescens
atgaacagtgttggtcaacgtgaacgcataacacaaaaacgtgttatccagttattcaccgatcatctcggttatcactatcttggtaactggcacaaaagagaagacaaccgcaacatcgagcctagcttagtttcagcctggctatcaaaacgcggtgtttcagaagtcctaatcgcccgagcattacggcagctggatcgagccgcaagcctcggtgaaggtcgtatcctctatgatgcaaacaaagaggtgtatcgcctgctacgctacggcgtaaaggataaagaaggtgctggtgagcagaatcaaaccgtgtggttggtagattggaaaaatccagaagccaatgattttgctatagctgaagaagtaacctacaacggcgaaaataaaaagcgcccggatttggtgctgtatgttaacggtattgcgcttggtgtcattgagctaaaacgttctacagtgtcagtctcagagggcatccgccaaaacctcgataatcagcaaaaagcctttatccgcaacttcttcactaccatccaactggtgatggccggtaatgatttagaagggcttcgctatggtgtaattgaaacgccggagaaatattaccttcaatggaaagaagccgctgaatccccccacgccaacatgcttgatcgtcacctggctcagatatgtaataaacagcgcctgctggaattgatccacgactttatcgttttcgatgctggagtgaaaaaaacctgccgtcataaccaatattttggcgtcactgcaacgaaaccgtttattcaacgcaatgaaggcgggattatctggcatacccagggcagtggtaaaagtctgactatggtttggctagcaaaatggatcagagaaaatattaccgacagccgagttttgatcattaccgaccgtacagaacttgatgaacagatcgagaaagtgtttaacggtgtggaagaagaaatccttcgcaccagaagcggcgcagatctggtgactcgcctgaatcaaaccaagccctggcttatatgctcgttagtgcataagtttggtcgtcaggaggaggaagacagagatgctgacacggacgattttatcgaacaaatgaaacgaaatatccctgccgattttagtccgaagggaaaattatttgtgtttgtggatgagtgccaccgaacccaatccggcaaattgcattcggcaatgacaagcattctgccagatgcacaatttatcggtttcaccggtaccccactgatgaagaaagataagaagaagtcagtggaggtcttcgggccttatatccacacctataaattcgatgaagcagtcaatgatggggttgttctggacttgcgctacgaagctcgtgacatcgatcagcgggtcaaatctcagaaaaaagtcgaccagtggtttgatgctaagacatctaaactttctcgccttggccaacagcaactcaagcagaaatgggcttcaatgcagaagctcttgtcgagtcgctcgcgactggaacagattgtggctgacatccttctcgattttgaacaaaaaccacgtctcgccaacggtcgcggtaatgccatgttggtctgttctagcgtttatcaggcctgcaagtgctatgagatgttcagtgaggcaggtttcgccggtagatgtgccatcgtcactagctatcaaccgaatgccagtgagattaaaggcgaggagagcggtgaaggactgactgagaaactggccaagtacaacatctatcgcaaaatgcttgcggagtattttgaacagcctgaggctgaagcagccaaacgagtgagtgatttcgaaaaagaggtcaaacaacgcttcatcaaagaaccaggtcagatgcgccttctgatagtcgttgataagttattgactggctttgatgctccgtcagccacatacctctatatcgacaagaaaatggccgatcacaaccttttccaggcgatatgtcgcgttaaccggttggatggtgaagataaagaatacggctatattgtcgactataaagaccttttccgctcattggaaaaaacagtgcaggactacaccgcagaagcctttgacggctacgacaaagaagatgtagccggtttactgaaggatcgattgcagcaggcaaaaatcgatctggatggtgctctggatgccgttcgtaccctttgcgaaccagtaaaaatgccacgcaatcaacttgattatcagcattatttttgtggagaatcaggggcgtcgatagagcagttatctgagaaagaagctttacgtctaacattgtatcaatccgtggcgaagcttatccgtgcttttaccaatctggcaggtgagctaacagaagctggttatagcgagcagcaggcaaatcaaatccgcattgatgttgagttttatacaaaagtccgcgacgaaataaaaatagccagtggcgatttcgtggacatgaagcagttcgagccaggtatgcggcagatgctggatctttgggtggatgccgatcctagtgaaacccttatggattttgaggaactagggctgcttgagttgattattgaacgcggagaagaagcactggatgggcttccagccgacatgcgtggcaaccaggaggccatggctgaagcgattgaaaataacgttcgcagaactattgttgatgaaaaccccgtcaacccgaaatactacgaaaaaatgtcggtattgcttgatgaactgatcgcccttcgtcgtcaacaggctatctcctatcaggagtacctggaacaggtacgcgaacttgcaaaggaggtaaaacatccgcaatctggaagtaaaagtacttatccagcaagcattgatactctcgctaagaaagcgttgtatgacaacctcgggcaggatgaagtcttggtgataaagatagatactgcagtgcgtcacaccaaaaaggccgactggtatggggatcgttttaaagaacgcgagattagtttcgctatcgctgaagagatcaaaggttattcagtaacggtcgccgatgtaatggccctggtgaaggcacagaaggagtaccgctga

SEQ ID NO: 445076 - DNA, 2031 bp, Serratia marcescens
atgagtgatgcaaaggtaacatcctttacagtcagatcattactgggtgatgcatctcgttaccttatccccatgtaccagcgtaattatgcttggggagagggggagatcactcaacttgtgcaggacatactcgactaccaacaaaaaaacctgcatagcctataccctcaaacttactacatcggtacgttagtcgtgttcactcgtcctgatggggacgcagagataatcgacgggcaacagcgtttcactaccctatcccttcttgctaactggttaaaaaaacatgcgggatccacgctggatatgagctggtaccaagggattaacttagggtttgagagcagacctaagtctggcgaaacctttgctcggctctggcaaggcgtcgaaccacataaactgcggagcaaggaatttaatgaagggctgatcaaaggctacgaacttattagcaaggttctacgcgacctgaaattagttggtgagtcattaactcatttttgtacctatctgttcgaccatgtacaaattgcccgaatagaagtgcctgctgataccgatctcaatcatttttttgaggtgatgaacaaccgaggcgagcaacttgaaaaacatgaagtggtgaaagcgcgactgatggctgtgctcaacgagataacggaccagcaagctcggcagagcagcctgaacaccctctcacgagtttgggatgcttgctccaacatggaacgttatgttcagtacggttttacaccagccgaacgtcatcaattatttggccaggaaaattggggggaatttgtgcctgctgattttaattctctagctggcatgcttatcccatcgacttcggagcttggcacaagagagaaccaaacaaaccgcacactggctgacattatcaagtcatcttcaaccataagtggtgatagaggtgaagaagacgcaggtagctcagagcgttttaatagtgttatcaacttctccaacttcctgctccatgtattgcgtgtctgtagccaaactggaaaggtcagagtagatgtaccgcttgatgacaaacaattaatcgaacagttcgaacttcgattattaaagcagaatgatccggttaaaacggtacaggatttcgtctttgcacttctcaaatgcaaatatctttttgatcagttcgtgataaaacgagaattcgctaagggtagcgatgggtggagccttaagcgcctgcgttggtattcggaaaagagcaccagctataccaatacgttcaatgaagatgatggtagctatgtagacatcaaccgacagatcttgatgctgctttccgcatttcacgtttcaacccctactctggtttacaaacactggttgaatggggctttgttctatctgtttaatgcccattccgctgtaagccagatcgaagcaagggagtatctcgaatatctggagcatcttgcctccgtatttgtctttcagaacttcctgtcagaagaaacgccaaaatcatattttgagattatctacggtaatgagtcacatatccaacctgttgtactgtcagatcagattcataagaagatgcgctttggtacgatagcaaacaacttggtattcaattacctggactacttactctggtgtcgtgacagacataaagctgaggtagtcaaacgttttgaatttaccttccgaagctcggtagagcatttctatcctcagcaccccatggatggctataggacattaccagatacatcgttgcataccttcggtaatctcagcctgattagccacagcaagaattcgcgacttagtaatttccagccaaaacaaaagcaagagcacttcgaagcgagtcttgaacggaatgaaattgatagtctgaaactgctcgccatgatcgagctgatgaagaagaacaatcagtggggggaagaagaaatcgccactcacgaagcggaaatgctggcagtgttaaccggtgcaggtggtagtgatagcgtatttagggaggtgttatga

SEQ ID NO: 445077 - DNA, 1362 bp, Serratia marcescens
atgaataacattataaaagcccagaatataaataccgctctagtatgctataaacatacagaaataggaatgctcccgaaagactgggatgcagctccacttgtaaatatttgtaaggaaattggtgatggtattcacacaacccctgtctactcggggtctggtaagtattatttcattaatggtaataatatatctgatggacaagtttttacagatgataacactaagaaagtcagcgaatcagagtttttaaaacatcaaaaaaaacttacaaaaaaaacaatactattatcaataaatggaaccattggaaatacagcattttataatggagaatatttagttctagggaaaagcgctgcatatttaactgtaaaagacaatacttcagagaaatttatttattacgccattcagacatctcagactaaaaaacagttcgacgatgggatgaccggttccacaattaaaaacctaggtttagcaactatacggcaaacaatagttccaataccaactattgaagaacaaatagccatcgctaatgtgctctccgataccgatgcgctgattacagaacttgagaacttaatagaaaaaaaacaggcaatcaaaactgccaccatacaacaactactgactggtcgaactcgcctaccgcaattttctagacatcctgatgggactctaaagggatataaaaccagtgaattaggaaaattgccagaggattggaccgtattaacctacggtgaaatatttgattttttatctacatctaccaattctcgatctgacctcagccatagcggtgaatatggatatatacactacggcgatatccatacaaaatggaataataagcttgacgccagcttagaagaattacctaaaatatctaaaaaaatagtatcttcttcgcttttagaaaatggtgatataattatggctgatgcttcagaagattacagcggcattggtaaaagtgttgaaatatgcaacattggcaaccaaaaaatagtagccggcttgcatacatatctactacgagataaatcaaaactgctatctgatggctatagaggttatttgcatagtaatgtaaatgtaaaaaaaataattgagcaattagcaaccggaatgaaggtttttggtatttcaaagaataatcttttgactgtaccagtacctgttccatctaaacaagagcaaactgctatcgccgccattctctctgatatggacactgaactcgaggcactacagcaaaaactagccaaggtccgcgaaataaaacaaggaatgatgcaacagctgctgaccgggcgcatccgtttaccattggatcaccagccatga

SEQ ID NO: 445078 - DNA, 375 bp, Serratia marcescens
atgtctggaaaaataacatctgcggtggtgttcctactggctctggcgtccgttgtcggcgcaggcgcctggatggcagggcgtcactaccagccgacgatcgatcgcctcaacgacgcgctgacacagtgcagggacagcaataagcaacaggcatctacgatcgccagccagaatgctggcataacggcgctgcagcgtgaacaagccgagagagaggccaaggctaaggccgatcagaaaaaagcccgcagtgaggcgcagggcgactatgagaaagctaacgcagttatggccgagcgaaccatgggcgaggcgtgtgccgccgcgtcagcagattttgacgcagagctgcgccgggagcgtgctcaatga

SEQ ID NO: 445079 - DNA, 516 bp, Serratia marcescens
atgagcaagctgaataaaacgggcgccgccggcgccgtctgttctgtgatggtgatcatcggcctggtgctttcgagcggtgaggtaaaaaccagccgcgcaggacttgagctgatcggcaatgccgagggttgccgtcgtgagccgtacaaatgcccggctgatgtgtggacggatggcatcggcaacacgcacggcgttaaacaaggcgcgcgaaaaaccgatcagcagatcgccgcagactggcaaaagaacatccttgcggcagagcgttgcgttaccaactatgcggccggcgacaaactgccgcagggggcattcgatgcggcggtgagcatcacgtttaatgccggctgctcggcgatgcagaaatcgacaatgttccgcctgttccgccagggagatgtggcggtcgcctgcgatcagttcccgcgctgggtttatgccggcggcgtaaagctcaacggcctggtgatccgccgtgacaaggagcgcgcgttatgtctggaaaaataa

SEQ ID NO: 445080 - DNA, 780 bp, Serratia marcescens
atgactgatttaacaaacttcggtgtttctattatagcaaaaggcggtcgccaacttcgacgagcaaatttaatgatgccagcagtttcaaatggtgctgagtacatgaatttttactgccgacacccagatggccgtagtacgttagggagaaatctaattccaggtaagccagaagtagttgtgtttggtgagcctgttcaaaacgatataacggcaaattttaaaagtggtgttaattttattgatacaggagtaaaacatactccaaatatgacattcatcactgtttctatcgcaccaagcccaaaagctgaatcggtattaatgtctaatgctacaagtaagtggcaagatggcgctggtacaacattgggaatcggtttgatgtatcgcccagataaactctactttaacactgcagtatcagatacatccggtggtcatcctctgcttcaagccaacgttaattacaatcccggagagatgcgcatagccgttggacgaagcgatcctggtgcagggcgtattttcctctatgaaagtagcggtattgtatctggctcggctacagtacctgcaggagcaacgtttgatattggtgagacaatccgcgttggctcgttagggcctggagggattggcagtgttaatggaacaacatcagagatagctgcagcgatagcgtacagtcgcaatctcacaaatgatgaggttctgacgatggtggcctggttacgaaatgttttccaataccagttcgcagtgacgctgccttga

SEQ ID NO: 445081 - DNA, 612 bp, Serratia marcescens
atgtttggactcggcgcgatagcgttcgctaccccagaattacccaaaatcgaggggatgcttaacgaactgtcaacgaatattgaaagacccttcaatgagttagatagaagccatgatggttctctatccaaaaaacaggttaaaatcgtggtggacagagtgtataaatcggttgataacgcaaacatgcgcacaaatgaagggcgtcaactcctcagtttgatgctaacaggcaccgaagaagaggtggctgcgctggccatcacacctgaagttgctgacaatctgcataagcgcatagaactgatagaaagcggcatatccaggcttaagtatgccttctttattgccggggcaagtgatgcatggaaaccgcaccagcctaccctcaagcatattgaaagcagaacaattgccgcatatcagggtttcgctgacataacaaaagagcttgctgaagccgcagcacacttcgttgccgtggagggttcagttgctctcaacattgacgccatgcagaaagctattgattccccaaccgttaatcaccctgattgggttaaaaacggtgatgactttgcaaaatggatccgcgagttgaaggcataa

SEQ ID NO: 445082 - DNA, 831 bp, Serratia marcescens
atgaatttagacagcgttgttaaatatcactttgccaagtcaaccctgataagcgattccccacgcgccaccgcatccgacactttgacgggcacggatgtgatggcagcgatggggatgtgtcaaagtcgcgcacctctcggttattcggcattccttgggaagatggagatcagcgatgccgagaagaaacgagcaattcagctattaacgcaatacggaatgaagcattgcgacaaggtggcagccttacgcaagcttggttcgaatattaaagtgaaggttgtgcaaaagctcgcaattttcgcgtacagggattattgccgttccgcggcgagcgttgttgagtgcccggcatgcaaagggaaaaggtttataaccaaaaaaggaaaggcagttaagtcgcactacacgatgcgcctccctgattgggcaaaggagctgggacaaagcccttctgattttgacgttcagcgagtggtagaagaaaaccatcaagagctttgccggaagtgtaatggcaagggatttatcagcacagcttgctgcaaatgctccggtagaggggaggccgtagatagaaaggaaacagaaaggcagggagttccagttaagcgcagttgcaaacagtgcggcgggagggggtatgagcgtctgccagcagctgaagcataccgggccatcacaatctccgctcctggaataaccccgaccgtatgggataaagcgataaagccattttacgaggccctcataaccgaactgcataaatcagaggaagaagccaatcgacaactggcgaaagttacgagcaaatttgagaaaagttga

SEQ ID NO: 445083 - DNA, 216 bp, Serratia marcescens
atggaagacttatcgcaccgcatcaaacagaaacggaatgagttgaatttaacccaggctcaattggctgaaatggtgggcgctaagcagcaatccattcaattaatagaatcaggtaaaactagacgaccccgtttactgcttgaacttgctagcgcgctcaaatgtgatgccgcttggctgttgtacggtaaaggcggatctcaggccgcataa

SEQ ID NO: 445084 - DNA, 645 bp, Serratia marcescens
atgagtattggcgttcgcgtaaaacatagaagagattcccttggattaacccaagggcaactggcagaaaaaataggaacatcgcaacaagccatcgagcagctggaggcagggaagacaaagcggcccagatacctgccagagctagccaaggcgttagaggtaaccattgactggcttctggatgggaaagatacagcttaccgtggtgataacttcaaatatgtaggtgagtatatccctggaagaaagtacccggtgctaagttctgtacaagctgggtgctgggctgaggctgtagaggcatatgcagtcgaagagatcagtgaatggatagagtcaggtgcccacatacaaggcgaagctttctggctaaaagttgaaggtgattcaatgacagcgccagttgggcagagcgtagctgaagggaattatgttctatttgatacaggaaaggagccgataaacggcagccttgtcgtggcaaagctagttgactctaacgaagccacgtttaaaaaattaatcattgatggcggacagaagtatctgaaaggactcaacccggcatggcccatgattcctattaatggaaactgtaaaatcattggcgtagctgttgaggcaaaaatgagattcctgtag

SEQ ID NO: 445085 - DNA, 126 bp, Serratia marcescens
atggaaattaatgaaacagaagcgcaggaaatcttaaagctcatcgaacaggctttccttgatggctttgatgatgaagagctcgtatctcttcacgagaagttaaccgaattcgtaagaagctag

SEQ ID NO: 445086 - DNA, 312 bp, Serratia marcescens
atgaatgacttggagaaagcgcttgatgcgctatcagatgaggaacgcacaatcatcgacagctacgccagtgaataccttcacgccgtcaaggattcagcatttcgcaaggcatggacagatttgcgtctgacttctgacgatgaacagcgcgcatttatggattctgacgagtttgccgaaagcctacaccaataccagacggatacagcctattggtttgcccttcgccgccgcagtaaggaaattgaatcagcaagagatcatcagacttacatggcaattaataacagatacgacgaggtagcgtga

SEQ ID NO: 445087 - DNA, 939 bp, Serratia marcescens
atgagcttcagcatcattgaattcgtgaaacagcaggagccgttttttagcggcgcgctgactgaccaatcagttacatgggctaaggaaagccagttcgcgatgcagcttttccagaagaatgatttcctgacgaaaacggcgatcgggaatccggcaagtgcgcagagcgcgatcatcaacgtagcggccattggcatttcacttaacccagcatcaaagctggcttatctagttcctagagatggatctgtatgtctagatatcagttatatgggtctaatgcacatagcgcagcagtctggcgctgtgcagtggtgccaagcgctggtagtgcggaagaatgacaagtttaaacggacggcaattgaccgcgccccgctgcacgaattcaatgatttttcgaccgaagaagagcgtggtgagattgtgggtgcctattgcgtagctaagacagcggaaggcgattacctcacccatacgatgtcgattgctaaaatttttggtatccgtgaccgttcttctggctggaaggcgtatgtagctaaacgcattaaatctaccccttgggctactgacgaagagcagatgatcctcaagacagtggtaaagcaggccgttaaatactggccccgccgtgaacgcctggatgcagctatcgactatgtgaacacggaggctggtgagggaattaacttcaaccaggaacaatctcgtcctgagaaggatgtcactggcattacccctgaacagtcagatcgaattaactcaatccttatctctgtagattcgactttcgatagcctgaagaaagcttgtctatcaatgaccgggcgccacgtggaaagccaagcggatttgaccagctcagaggcggataagcttatttccagcctagagcggaaacttgccgctaaggaggcggcaaatgctgcataa

SEQ ID NO: 445088 - DNA, 264 bp, Serratia marcescens
atgaccgaagtattgacctatgaagcactgaaggctgagcgcgatgcgctggcacaacgggttgagatgctagctgaagagaacaagggactgaaaatgaaagcggctttcgttgaggcgcgtggagttgacaagttcgccgatagccaaattgcttacgtccgcaggcatcgcgcggagcttgacccgatgaccagggcggcatattgcggaagcgcgacagatgctcgccgttttgccgacgagctgcgggaggggaaataa

SEQ ID NO: 445089 - DNA, 630 bp, Serratia marcescens
atgtcagacaatgccaagcactacgaccacttcaaagtcgaggggccagccgtcaaggcgctgattgagggctttgacgccatcaactccaagcgcaaggctatcatcggctcgctgcaggatgagttcggcgcggtcgcgcacaccgattcatccgggttcggtgacaaggggagccgcgtccgattcctggtgtggccggccgaccacgaattcccgtgccagatcaccgtcaagcgtcgcgactatttcaacggcaatccagtcgtaatcgcccgcggtaagggcaataccaaagaaggacgcgagttcaacaagcagctggacgcggcgaccggcaaggcaaacagcgcgctggcagacctgcagccgtggcaggcctacatcatcgaccactacggcatcatgcgcaccggtttcggcaccggaaccgctcgcggcgtcccaatgctgagcacctacggtggccgctgcccggggcgcgatgattgcctgctgttcgccatcccgaacaccaaagaccgggaaggtgaagcgaagcacggagatgtgaacattcccgctgaattccagaagctgacctatggccagttctacgacctcgccaatacggatcgggaggccaaatga

SEQ ID NO: 445090 - DNA, 852 bp, Serratia marcescens
gtgagtgaaataaaatgtactaggaatgatggtgatttaaaaactatttataattatcgtgttgttccattcaacaactcatatggtcagggaggatatgcaatccgtactattgaaatataccgactgcataaaatggagctgcttttaaagcaatttgaacaattgaccgggtatgcgccacctcgagcaaactgtacggcgcaagagattcattccctgatagagcaaggtgaaaaggtttgttttgatgccgaatcaaaagtatccggagttgagcatgaaattacgctctgtgagcgagaacttggcaatgccaagcgtggtgtcagtgacatctctcattggaatggcaatatgaaagaagccattgtccaggcgaacgccaatctcgaacgggcaaatgcgaaattaattgacgctaaggccgctgttgcggcacgtcgcgggctgctggggttactacgcgagcctgtagagcagatgttaatgtgcggggaaaagggttttaagggaaaggtgttaacgcatatcccgttggaacctcttcctgctcacacctaccgtaaaggggcgtatagcgaggggctacgttctcatatctatgcctggggattaatggataccctggaaaatgcattacgtgaaatagtccaaagatgcacaccaccaacagataaatacgcgcttaaccatggcgggttagagcgtgctgctttggctgtagagtattacaacatgtccggtgagaaatggcgggatttaatgacggtagatgagtataccgctattagaatggatgaggaattatccctaaagtctaaacaacaagaaatgtgctcgcccctttaa

SEQ ID NO: 445091 - DNA, 1002 bp, Serratia marcescens
atggcaacagtttctattcccgccgtggcggaatgctatcaccaaaatttaatgaagagtgtcgatttcccttatggacaccagcgaacattcacgatttcagatgtggctgaaaatgaattgcgtattgccatgctggaatctggctggatgatgaatggcatcacgttgatggatgttgatgcggaaaaaggccaggcaatagaaattggggatgcttctttgtatacggggcgtgctattgaaggacgttttaataaacgactgactgttaatggtacggattatgttttggtagaaacggattcctgtgcatccttgccctacggaaaaatgtcggcaattgcgaatgtcggcggcatggagcattttacgcaagctgtgtctgaattctttggtatggcggtctcgctcgatatgttgcgtattggtctcaacggtgaacggatttcctatcccaccgatccggaaaataatcccaaagggcaggacgttaatattgggtggcacgccattgcaaaagcctttaataacggctcgcaggtcatcactgaggcagtcaagttgggtgacggaggtgatttccctcacctcgatgcgctggctaatcaccttattacgacgaatatcccggaagggtttcgtgaggatcctcgcctggtggtgatggtcggggcagaactggcggcagcagagcgtttgcgcttgtttaatgcggctgatcgtccggcagacacagcggcggcgcagatgctcaccagctctatcgcaggtcggtttgcttttgtaccgccttttatgccgggaaaacgcctggccatcaccacgttggacaatttacatatttacacccagaaaggcagtcgtcatttcagggcggaatttgttgatgatcgcggcgtgtatgaacaaagttattggcgcaatgagggttatgcattgggcaatggttttctttataccgcagtggatgagaacgcgataagccttattcgtaaataa

SEQ ID NO: 445092 - DNA, 630 bp, Serratia marcescens
atgtattttattcttgtttggcaaaatatggcattcagcctattaactgtcaaccttgagcgttcggataaaaacggcttgcgcagtgcggtatggtcacgctatagttttatcgttgtcgcaaaatcggcagccgggcgtggaaacccgtgtaatctgaaggcgatacctgacgccatatgcgtctttttttgtatcgtagctttgacacacctaaagtttttggtgtggtgctcacagggctgtatgggcgtcattctggcctgtgtgcatcactgccatcgcgttatggtagtccaagcggggcagctttcgggctggccggtatccttcagagccggtatttccaccctcgtttgggctaccaccaatcatgagcgtggaaactctggtggtagctgtttcagctatctgaaggaggttgccgctatggctactaccccaatctacacacatctcaaatttacctatctgtttttgggcgttcgtcgcgccgatctcaaggctattccctgccgcttacaaattactgccgattctgaacaagccgcacaccgtgcgttagtcagagagtatgtgctggcgtttgctggccgcctgccgtcacgtcctgcaactgagtggcgttaa

SEQ ID NO: 445093 - DNA, 255 bp, Serratia marcescens
atgaacaacaataaacttacctcgaagtattccttgagtgatcaaggcggcgagcaattaattcgcgccacattagtatgtgaacttatggccgacttgatgagtcaccaaggcagcagtaatcacaaaatggtttcagcgttgggggtatcagccctgtttgaatgtctggccgggcaattggatagcgcgattgataatagtattttattgagcgtggccaaaataaaaggggaagataatgctatcaattaa

SEQ ID NO: 445094 - DNA, 408 bp, Serratia marcescens
atgctatcaattaatcaccccgcatcacccgaatttaaagttgctttgcttagccattatattgcctgcgcctttattgactcaatgacaagtaaaaatggtcaggcggtatttattgaggatggggaagcggtcgcgttaacgttggataatgtggcgttgaatattatttttcatattgaaactccttatatcgagcagtttggtgtcatggacggcgggttgttggctactgcggatttgatggccatgttggcacccggttttatgattgcgcaagtacagctattccactatggctatcatcggctgtgcgaagtgtatcgagacattatctttggtgtcccagatggcgagttgcccccaggggctacgttatacgctggtaatgccagggaggtgcactga

SEQ ID NO: 445095 - DNA, 2685 bp, Serratia marcescens
atgagccaacaaccggttacagaagccattaacgccgccaaagggcgttggctgcatatcctcccggcgttgggtatcacggttcccgccaatggcaaacatggcccttgccctaaatgtggtgggacggatcgctttcgtttcgatgatcgagacgggcgcgggacctggatatgttcgcattgccagcatggcgatggcctggatttggtaaaactggtggctgggattgatgcagtcagtgcggcgaaagaggtggctcaggcgttggccttgtccaccgtgcaacagtcaccccttttgccagccaggaaagaagcctcagacgcgcagaaattggcaaaggtgcagaaaagctaccaggcattgttatcacgcagttcaacgggtgaaagcccgtatctgacagacaaaggcttgcaggggcaggcggttacgctaattgggcagacggcggtttatgggggcgttgagtttcctgtaggggcacttctgctgccattagcggacgttgcgggccaattgaatggggcgcagttgatccaccccctgggagaaaagcgcctgctgcctcattcgctgttagccggggcattcgttgccgttaatgaacccggtgaagaaccgccggagcagataattatcaccgagggctatgccactgcgttgaccgtggccaggctaaccgaaggcgttatcgtcgccgccgttgccgccagcaacttggtcaatgtggcgcagcaactgcggcaaaagtggccagaggcgcgtttgattgtggcgggggataacgattttgacgacgggaaagagaacaccggcaagctgtgggcggaaaaagcggccaaggcggtagatggttgggttacgttgccgcccacacggcataaggccgattgggatgattttcgccaggagcaaggtctggagcgtgcgaaagaagctttccgggaggaaatgatcctgtttggcaaagggaagaccaaactgccgcagggattccggctgacccaggaatatttgtggtacgacaaactggttaacaagacggacggcgacactgagatccgcaatatcaagatatgcagcccgctgcgggtcactgccattacctgtgatgaagatggcagtaactatggccgcttgctggagtgggaagataccaacgggattagtcggaaatgggcgatgccgatggaaatgctctgcggtggcggggaagagctgcggcgcgtgttactggtcaatgggctatcgtacatcaatatcaacggccaggcgcgggcgcacttgatggagtacatctcgttatgcaagccagaacgcaaagtgacgtgtgtcaccaaaaccggttggcatggctcggtttacgtgctccaggatgaagtgatcggtattggtgcggaatcggtgatcctgcaaacctccagtgttcaggggcgtgattttcgccagtccggcaccttggaggaatggcgagaacagattgggcgttactgtgtggggaatgggcgtgtggcattcgcggtcagcctggcctttgctgcgcccttgttaaaactggtgggcgtcggtggcggtggctatcacctcaaaggggaatcgaccgatggcaagaccaccaccatgaaagtggcggcgtcggtctgtgggggtgcggatttttggcatacctggcgcgcgaccggtaatgccctggaaggtacggccagccgtcgtaacgatgccaccttgatgctggatgaaatccgagaagtggatggccgggaagccggtaacattgcctacatgctggcgaatggtcagggcaaggcgcgtgccagaacggatggcagcgtgcgggaaaccaaccggtggtgtttgttgttcctgtctactggtgagttatccctggttgaacacgcggcgaatgtgggggagcgcacttacgccggtgttgaggtcaggatgatccaaatccccagtgacaccggtaaatacggtgtgtttgaagagttacacggctttgcagggggtaaagtcttggcggaacatctggagcaggctgtcaccacaagccacggcgcgccgttccgcgaatggttgcgctgcttgacggcggatctgccgggcatgacgcataaggcaaaagccttgctgaaagagtacacgcggctgctcacaccggaagatgcggggaaccaggttggcagagctgtaacgcgctttgccctggtggcgatggccggagaattggccaccgaagcggggatcaccggttgggcgcaaggtgaggcgctaaacgccgctaaaagctgcttggctgcgtggatgtatgaccggggccacaccgccaatcaggaggatgccgccgcgctggagcaggtcagggactttatgacgcgcaatcaatttagccgctttgccgattggtacgatgcacaaagccggcctggaaatatggtggggttccgccaggtaaagaaaggcgacaacctggaagacgcggtgaccacgttttatgtgttgccgtctgggtggaaggaaatctgcaaggggtttgacgccaagaaggtggcgcgtttatgtgcgtcggcggggtatctggatgtgccagaagacgaaactcggacgcagaaaaacatacgcctgccagaaatggggctgaaacgggtttatcagtttaacagtagcgttcttgggtaa

SEQ ID NO: 445096 - DNA, 1362 bp, Serratia marcescens
atgaaccaatcacagatagagcaaattaagacagatatagatagtttttattctctaaatttcgaaaacattttaggaaaaagttttaataaagatgagttaaattatgacacaactatgattggtgattatacaataagtgaatatatcataattgttaataaagtattccgacacttccaacaagaattgaaggatgtaggttttaaatcacttccgtatcaatataatttcaataatgagtttagtaacggaaatttacattctgatatatcgaatgttgtttcgtatataagttcagcatcattcccttcgactgttcaatatttaaataggcttgttcactatcaacgtttgaatggcttttgggagaaaagtaataggaaatacttcaaaagctctgaggataaaaatatacaagacagggaggttttggaaactcttaaatctcacttaaccaattactctgaaaattttgttgaaatcgtttcacaaatagatcaaaagaaagatgaattgtcgtcattcatctctgctaaacaatcagagttgagggatatcgaagctggtttgtcagaaatgaataggcaaaacattgcaataaatgaacttcataataatgccacgtctacagttgaaaagataaactcgcagtttaatataaccgagagcaaacgggttgactctgagaagctactcagtgaagcgagagttgagttaaatactctccaggatgacataattgaatacggaaagaaaatagtaaatcaagatactaaatacaatgagttgaaagattcgtttgaacagtcattgaattttgttaaaggaaaagaaaaatattttgaagagcgtaatcaatatcttgatgatttaattggtagggaagttggcgcgtcgctttttgagacatttaagcaacggaaagaagaattgtctccatctgttaatttctggaagtgggctgtcccgattttagcgattgctacagttttttggatatttattcttttttatacaagtcagggagcagtactgtcatatcaagttataataattaactcactaaaagcattaccggccattggtcttctgttatttggtatttcgcaatatagtagagagagaaattttcaggaagagtatgcatttaaatcggcagtggcattgactttgaattcttatgcctcacaattgagaaatgaagaaaataaagaccagttgatcatgagttcggttaatgagatatataaaactcctatacaacatagtaagataaagacatccgagagtaagtcattaattgatgctgttaaggagttagtggatagcacgaagaatttagtagatagtaaaaaatag

SEQ ID NO: 445097 - DNA, 513 bp, Serratia marcescens
atgaatacttcagaacattgcaaagaggtttacgcatacttcgggctagctatgtacagagcacaatgtgtcgaacagtcgataatacaactgctcattttcttcgatttttttaaagaaaaaatacctaaactcaccacaaatgaggagtgggaaaatgactttgatcaatttgacaaattcctttctgaaaaaacgatggggcagcttttaggtctaataaaaaaacttggagtgctagatgaagacattaaaaatacactctcaatagcattggaaaaaaggaatttgttagctcattcatattttgttgatcatgcattagattttatgaatgaatcaggtcgccacgatatgattaaagaactcaatcatacaatcgaacttttcaattcagttgaggatattttgcaacccataacaaaatcagccgcactaaagtacggcttaacagatgaggtgctggaaaagattgaaaaagaaatgtgtgaatccgttaaaagtgatctctag

SEQ ID NO: 445098 - DNA, 1623 bp, Serratia marcescens
ttggaaaattacgttgatattcctattccttcagagaacattgaaagtggattattgcccatctataaaggacaggttctttttattcttggggccaatggtgctggcaagtcatcactaatatatcacgtactaagaaacctaggagatcataataatatcgtattgatatctgcacataggcaaatttggtttgatacatcggttattgatatgtcgaactcggagttcgcttctactttagaatatcttcaaaataacgtaagatactcaaacacttctcgctggaaagtcgaggatgcaagacaaagcaagcttcctgttattagattaaaaaaagcaattaatagaaggaatagagatgttgctgataaagtagacgcaagagatatagatggagcgctccaggttagtgtgtcacctaaagaaataattaattcagttttaatatcatcaggaatgcctatcacaatagatcacgatgatgaagataatattatagcagtcaactcaaaatataacccgccagcaatttattctatatctcaactatctgacggcgagaaaaatgctataactatatccgctgatgttatatcagcattgccaggtactctttttatcattgatgagcctgaaaggcatttacataggtccgtttcatctcccttactatcggaactgatagcaatcaggcctgattgttttttcattgtatcaacacacgatataggtcttgcttcagatatggataattcacagatccttttggtgaaatcgtgtaaatatagatctgaaatcgcaacctcgtgggacacagaactcataagagatcccggttcaattcctgattacataaaaaaagatattatcggtgcaaaagagaaagttattttcatagaggggataaactcaagccttgacataggactttataaatcaatttttcccaatgtttcgttaatcccgaaggaaggctgtgaagatgtagctatttcggtcagaggcattagaggtaatgataagctaggatgggttaatgcatttggcttggttgacaatgataataagaaaacagaagagattgatagcttaaaaagtgattttatctttactttaaaatatcactctattgaatcaatattctatcatcctgtaatgatagagttctttataaaaaagtacggtgacatttttgaaattgatatttcggttatgaatattatcaaacaagatattcttgccgtattaattgattcttcaaagaagaaggatttatgtagccttgctgttaataaatcagtaagatggatgtttaatcagttgatgccaagtcatagaggcggcttcgaaaataaaagcgtgtcaatcaatgctggagatatttatagcaatgagctatcgatttatgaagatgctcttgaacgaaaagatgttaatttcttgatagaaagatattcaattaggcgaactggtatgatagataaaataattcgtaggcttaactgtccaaaccgtgcattttatgaaaccaaaattatgtccttagtgagagatgaccaagaggccaggcattttgttatagaatgtttggatggattaccagagtctgtatattcttga

SEQ ID NO: 445099 - DNA, 546 bp, Serratia marcescens
atgaataaagcaatcaaaggcatcgctcagggcttgtccatttgcctgattggcctggcctgtgcggcacaggcagcagacggcaccatcaaaactaaagtgaagtttattcagtttacctgcaacctgacggctgccagcaaaaatatgcgcgtgccgctgggggatatcaaccgcagtcagctggctaaaaccgggagcctgagttcgccagtgttgtttgaattaaaagcgaccggttgtccgactaatggcgatactagcgttggagtgcgtttttcaggcacagcagcgacgggggatcatcaatcttttgttttggatcaagacagtgtggcatcgggggtcgcagttaagatagctaaagaatttcgaggcagttatgattatttcgttacccccaatgaaaagggtggagcttactttggtccaaactctggcggtgaggtaaccctgaagtacgcggcacggtatgtcgccctcaatgataaggttacgcccggtaccgccaatctgactacccaaattgatttgttttactattga

SEQ ID NO: 445100 - DNA, 558 bp, Serratia marcescens
atgatagcaacagtaagaaaaagaatgccactgctgacattattcagtgcagcaatattatccccgtcgttatacgcagcggatgggaatattaatgtgaccgggcgggtggtggagaatgcctgtgtagtcgccgccgagtcgaagaatatcatggtggattttggtgtgcaggcaggtaattcctcattgggtggcagaggttattgggaaactataaggcttctggattgcccttcgggggctaagcaggtgaagattagatttgaaggtaccgctattagcggtaacgagtatattttcgcccccgataatcaggggcagccgggagctgcacagaacgtagggttcacgatatacaatcggtatcctattgatactgatattaaagttaacggtgaatcgcagccttatgagctggaaaacagcggttccggcagtgtgaatgagcttgattttggtgtgatgctacgttggcttaatgggggcggggggagccagtccatcccacttggtgaggcgacgagtactattcagttcagcattctttataactaa

SEQ ID NO: 445101 - DNA, 258 bp, Serratia marcescens
atggaagaacttaaagacggattcattttgagaaagcttttagataacgacgataagcctcaacttttcgacattctttgtgtgtctgatggcatggcgagatattcatttgatgttttcaccagcgaagtttatgcgaaagcggccttggaaaagacctctctcgatcaagtgaataatgaagggtgggattgctatacgcacaccaaggaatcttcaacgctttgggctgaagtcgaaagaaaggaattgagctaa

SEQ ID NO: 445102 - DNA, 267 bp, Serratia marcescens
atgacagagaagaaaacatacaacctggccagcctcagcagagaggatatggacaaggttaatgtagatttagctgcgtccggcgtggcgtacaaagaacgaatgaacatgccaatagttcccgctcaggttgaggctgagcagccggagaatcttcgagattatttcaaagaacgcctgcagcactatagggaacaaagtgccagattccccgggcctaacgacccacgttaccagcaaatggctgaagccaacggtaagaagtaa

SEQ ID NO: 445103 - DNA, 183 bp, Serratia marcescens
atgctccttgccagcgtatgtatcgctattggcgtgcccctgttcattgccatcatgtcgttcatcacttggcagaacggtttcaagatgcttggggctggatatctgtctcgcctgacggcggtgcttattgcttttgtgtgggtttattacgcaattctaaaaattaaggggggtgcatga

SEQ ID NO: 445104 - DNA, 564 bp, Serratia marcescens
atgacactaacgaccgagcagttgaaagagcgaattggtcacctgaaagaacgtctgcgagacatgaagcagcataaatatcccgacaattgccctaacgccgccgcgtatcttgaaagtttaaagggtgagcgccaacaagatattgaacttctagaagaactcctggctaaccgggaggcgcagccggtggcttggttggctatttatcacggagaggtgtatgacgaagcgatcggcattattcgctccgttgttgaggctcaagcggatcgtttcggctgggagtcggcgttgacggaaattatcccgctctatcgccacgccccgccagcgccagcagtgccggatggggttatgccaggaggtctagtctactcatctgcactacctgaggttgaaatcaacgacagcgataaggtaattgggtatcactgctttatcagcggtcaaactcgaagcgtggagagccaagggcaggcgtatgccgacgctaaggctgtaattaacgcctgccgcgccgcaatgctggcagcagccccggagggtgggaatgatgcgtga

SEQ ID NO: 445105 - DNA, 189 bp, Serratia marcescens
atgaccaaagcattaatcgaattcagccctgaccgccacgacaagcaacaagaggctatgtctcgataccacgctaagattgatgcgctgcgcagcgttctgatggaccgcggcggctgtgaaagcaaggaaagcctggaagctatcgccgagaacatcagtgaggcgttcgacaagattaaactgtag

SEQ ID NO: 445106 - DNA, 690 bp, Serratia marcescens
atgataaacaagataataatttcaattgcggtatttttggcttcaatatctactcctgctttttctgcatcatgtgcaatgtctgatgtgaaaggcttccactcagttcctggtgctatatgtttagggagtactaattatgcagaagaaatggcaaaaaggcagagaattgaaatagatagcttttatattctagacaaggatatggttttctacacggcatcatctcctatgggcacagccatgttttttgcaggtgacaaggggttcgtaaagatcttgggtgaaattccttctggggatgtacagtcaaatatcacaggcataaacaatgttgtttacaacccttcaaatggtgatttgtacttcatgacggatgcatgggcaacttcaggtgcagttcacaagctcgataaaaaaacttggatgaactcacttgagttcaattctatgccagtacaaaaagagatagggtttattacagctggtaattctctttaccttattaaaactggcaagtactcaggaaacctaattgttagcaagcacaagtacaaaaaaggtggtggctcatatgatccatattgccttgtgtctttggaaggtaaagagttgaaagagattggggaatcaaaagaatcagtagaccagttcctttactcaaccggttcaaaggatcgctttttctaa

SEQ ID NO: 445107 - DNA, 705 bp, Serratia marcescens
atgactggattaactgtagcaaaagcacgatctgttgtcaccaaaatgtctagccgcgagatatcggttctgactgggaagttgcataagaacgtaatggccgactgtcgaaccatgtttgaggcgcttaatcttcaatcggctgagttctcagctgattaccaagatgataaaggccgcacctaccaagagtttctgttaggccaggatctgaccatgacactggtaatgggctatagcatcccgctgcgccacaaggtggccaagcgttggagagagctggagagtggagaggccttgccatcaaaaagcaacagtggcctacctgagtatcgccgcgcgcgcacactgaagatgaccgtcgaagcggtcacgaacctgtttgacctgatgcctcatttggcaccagaagcgaagcaggtagcagcagccagcctcatcaatccggtggccggtttcgatgctatcccattaccgaaactccaagagcactattacagcgccggtgaagtaggtgagatcctcggagttagtgcgaacaaggtagggcgcctggctaatgcacatggcctgaagaaacaagggtacggcattttcgtgatggacaagtctaaacactcagtgaagcaggtagaggctttccgctataatgccgccggtgtcgacgcactccgctcgatagtttctgtggatgcggaggcctga

SEQ ID NO: 445108 - DNA, 846 bp, Serratia marcescens
atgaaaagcacgctaataataacaccaaatacgctggttgacttaaagaaaaaccattttagtgtaatgactggcatcgataagccacagataattaggggtattttatattatgataatatttctttcatcaatagctttataattgatttatcgttaaaggataaccttgattacaacgtgttatacagagaggggattgcatcagatataaatgtagagttcgatgggtatggggatatggctaagtgcgcttatgattcagtatataaaaaagtaatttcacttgtctcatccattgatggtaattactcgacttataatcttgatgagatatacaaaaatgaagatgatgacttctatgctcatggtggcagtgtagtttcattaataaatgcactccctgagccagccatagacgtaactattgatgaaatattagaatttagattgaagaggggtgatatgcttaaccaccttatcaaccatattcaatcacttggtattagagtctcatcatctgagaacaaagttcaagaacttagaacatgcattaatgaggttgattcagcctgtcttgatataacaagagtctacaatgagagtggaataaaatttaatctgtcaagtttgaagtttaatttctcggttaaggatatcgtagaaacaaccgcacttacatatggcggggcatctatgtttttaccgcaaactggagctataatttcagggatagcagctggagttgggaccatggttgaaataaaagatgctatttcatttagaaggattgataagaaaaatccttttaactatgtaggcgaggttactaagcatctttgctaa

SEQ ID NO: 445109 - DNA, 513 bp, Serratia marcescens
atgaaatatattccagggttggccgccttggcctgcatgggattgctggccagcggcgcggcgcaggcgataaaggtgaactttaccggtacgctggtggaggcgccagactgcaccctcaacgagggtaacgatgtcagcgttaattttgcggaagtggtgatcaacaagattaatggtaaagactataagaaaatgccgatcccctacaccgtcagctgtagcggcggttcaccaggcagcggccagcttaaggtgatgttggaatatacgaccgtcccatggggcgattacaacgcgatccaggccctacccctcccggcatttaataatctcgggttgcgtatcatcgagggggatggggataaaacctatgtacctaataccaaggtggtggttgccgatcagaataacccgcctaagttttacgccgtgccgatcggcaagccgaactcgggtttacctgcggcgagtttcaacgcgtcggcaaccatgaccgccatatatgagtaa

SEQ ID NO: 445110 - DNA, 267 bp, Serratia marcescens
atggccgggcaatcggactatctaccacccggccagccattcaatcgaggcacctggacgcaggaacaacgcgatttagagcagttcgacctgcgcgcttgcggcctggtccgcgatttattcgcgaggaagatcacccgcacaaaggtgctggtggcgattgaagaggcgccggagcaataccgggaacatttcagagcacgcatgaattactggcgtgatcataggaagacgaagtcccaacatggctgtgctatgagtgtttga

SEQ ID NO: 445111 - DNA, 696 bp, Serratia marcescens
atgcagcggctatttcatggttatcaagctaattatttcacaagcaataatgatgttacggctacgccacctattttaggtaccttgttgaatcaactttccaatatgtccttactcccaacatttggtcaagagttgaatcctatgaccggggaaaaaaggaaggtggttattatgactgactccaacgaggcgtttagaattgagtttatctccaacagtattatttttcagggtggaggtgagaatgcagaagagttttttaataaagttgaaatggctgtggggattttaaagaatattttcccagataaaaaagcaaatagattggctttcttaagttcaacgttttaccgggataccgcagcgaaatatgatgagttatataagagtttatttactcatcataaagcaaaccccattgaatgggataatagaatagttgaacgagattttcttgaagtttctcgtgaggaaactaattttgttagtgtgattaaacgctgcatgattagatcaaattcaattgatagtggagatcaagttgatgtaattaacatcgaggttgatacgaacacaatcccagagaatgatgactatagatttgattttgattcggcattaaaaattatgcgagaactgctcaataagaatgtacaattaatggattcattttctcgttacactaatagctga

SEQ ID NO: 445112 - DNA, 630 bp, Serratia marcescens
atgagtgttattaggggcctttctatcacgagtgatggtggtttagagtttataaaaaatgaagtcatgcaccctcatgttaagattagttcatcacgtgaaggtgagggcaatagtgggctaagagcaagtaaaaacgctgttagttcgctttcttctggaagctttttaagctattcatctaatgacagtgttaacgttttcaataacgaagtttccataaatttaaatttgttattgagctttctacggtccgaggattacgtagagggagatataacaaaaactcaattatttcttgaatcattgtatttaaagaataatttcctatttggtgaggtttttcagaaagcatgggtggcattatataaaaatacgcatgagttgactaagtatctttgtatagcctcctgcattgattatgaaatgctcaaagataaagctgatgtttttatcctaggagccgcttcgcattcagatccatatgtaaatgaagccgcattacgagcagcagaggcatgggcggaacccaaatttctagagtatctagctaagctaagagattttgagtttgattggctcaatgattataagatatccgtaatgagctacttggagcatttaaaatga

SEQ ID NO: 445113 - DNA, 525 bp, Serratia marcescens
atgagctatcttttaagaaagatatccatttcaaaatggcagccaaaccttaatttatcacctaaggatttttccgctgacgccattactggatgcactaaaacgagtgaaaacactctgtcagtttggaaatcagaaacgctagacttccgctctgaggaggttgaaaaacttattgttgctttggctaccactatgcaggctccagatactatagatcttatttggctggaggagcaggcacttagggaagatggtataaatatcagtgagacgccgggtagcagtaagttttccgatgttaataatctgcataaagatctagtggatattaaccatgaacgactagctatagttggaatgcacatagtgaatcagtataataaggatagagttagtcactatgcccgactgcgtagagcggagctgattatgttgatgaaaaaatgggtgatggaaagaggggttataaaaatggatgaattaaccccgaagtggatcgatgcgatagttaaaaccaagtaa

SEQ ID NO: 445114 - DNA, 675 bp, Serratia marcescens
atggattggcaaggtattccttttaagttttggagtgaagactctttacagcaagcatttttaagtgttagtcaccttcctaatatagttgtgaaaactgattttgcggttgatacctttttatcaggtttgtttgctggtctttttcccgctgctgttgccatttgggcgatgcacacgaatgcaaaaaacattcgagaagaacgattacaccaagaaaaattatccagcataacaattaccaaacaaattgtatctgcatctcgtcaagtttggattagcgaccttagagaatctactgcgaaatttattggtgtggcgactggagtggttaactgtctaaacactatggttgatgagtataggaataaccaaggtgcctctgagctatacttgaaactatacgaagatcatagggtggcaatgagtgaacttgggttactaaggtcgaaaattgatttattgcttaatcctgaggaagaaagatccaagagagtgagtgacgtacttgataacctcagagaattcttgacaaaagagcgtaattccgatgaggaaattgattttgatgaaattacaccacatattaaaaaactaaaaggatgtatttatgctgttattaaacatgaatggaaaaaaatatcctttgtagaaaatgagtcggtgcaaaattaa

SEQ ID NO: 445115 - DNA, 807 bp, Serratia marcescens
atgccaatagctaatacagcaggatatccagatgggcattggactgatgtctacggtatcttgtgcgaagtagccaaaaaggcaggatttgatccctgcatggttagttttgacgaggatattggcgtaatccataagcgaataattcataatttatataagaaccctatagttgtttgtgatattagctctagaaatgctaatgtaatgtttgaattgggaatgcggcttgcatttgataaaccaacaataattataaaagataaagtgactcctttttcttttgatatatcatcaattgaacatcttgagtacccctccgacttgaggtatcagtctattaacgaatttaagagtaagctggagtctaaaataaaagaaacctacaggcgctcacaatcagaaccagagtattctacctttctcaaggactttggcacatttactgtttcacgtttggatgaaaaagaggcctcattcaatgaggttctgcttgaagaattcaaggagcttaaaaaatcaatatctatgcagataaacagaagtaaccatagcaggggcctcccaagaagtcccttaggtgatattgcaaatgctacgagtgaaaattccctcgcatttggatctgatggtcttggtggtaaattatccgacatattggaagccatgattgaattgaaaggttcgcatggggttgaaattccgtccttgagaaaggttaacgatgacttggtgattatgacgtttgataaagttatatcacctgagcataaggaattgataaaagaagcaatggtaaggttctga

SEQ ID NO: 445116 - DNA, 900 bp, Serratia marcescens
atgagcgattcaaaagatgaaggtttaatcgattcagttaagaaaactctaatcgataggataaatacaccgttgtttggctttattgtgttgtcatggatcgtgtttaactgggagttattgcttactgtgatttttagcaagcaaatgattgccactagaatagattttgttaagtcaagtgattattatccttttgaaatgtttatctaccctgcgatatctggttttgtacttagcgtggcatttccatactgtcagtgggcggtatcgttccttcagcgaattgctcagaaattgattgacggaaacaatctaagaagagagcttgctgaaaataatgcagttattgctctggcgtcaagcaaggctgatgctgataattctagggaagtggaaagagcaagaaaaaaattagaaatagcaatgaaggaggatgagatagccaaggttcaacttgacaccgctggacttgagaaacttcatgggaatatttcaggtgcgattagtaaactggagttggatataaaaaacaaagaaactgcatacgaaaacattaaaggggatattaatgtagctcagagtagggttgataaattaaatgctagagaaaaagagcttctggattctattgccaataaagaaaattacaataacagtattcatttattgtcgaatgatatagaacgagtggttgatattatgaggggctctgttatgttgtatcggaaaaaactgagggatgaaggtgtcatttttgaaggcggtaattcatcaagttatttaactgttggtgttagagagtttgatgattttatcgaatcaatagaacgtggtattagtgagattcaattgatatctactgaaaatgcaagccaggttgctttaaataaaaattaa

SEQ ID NO: 445117 - DNA, 330 bp, Serratia marcescens
atgaatgtacgtcatcttattagcgccattatgattggctcggccgccttgatatctacagcggggcactccgctgtttttggtggctccaatctaagcttttctggatatcctgagtttgatgaatatccgccaagcccaccgtatggaaatgataaatacgcatgggaaaactacaagagagaaattgaagactacgttaataaagcgaaagaatacgtagaaaatgcaaataatgacatttctcgcattaaagaggcaaaggatgaagccattcaaaaggcaaataatgccgtggatgagtacaacagaaatgtgaggggctactga

SEQ ID NO: 445118 - DNA, 168 bp, Serratia marcescens
atgaaaacaacggtgatggtatacggcgagcaggggcaacagctcgccgagtatggaatggatgacgagcgatttgatgaaatgaacattgctcagatcgttaacgaatctctaaaaaatgctgccatgcatgcgcaggccagcgttgatgatggcgcaaccggttaa

SEQ ID NO: 445119 - DNA, 204 bp, Serratia marcescens
atgaccggtatctacgagctgcagcgcctgggacgctcccccgaaagcatcgcgctgatgctccgcatgcccctcgatcgcgtgctgcacatcctgaagcctataacggccgtacgccgcgagatacagaaaagcgtggcaagtgggttacccccacgtgaaaaagacgtcatgcgccgtctggcggccgaatcgagggcataa

SEQ ID NO: 445120 - DNA, 207 bp, Serratia marcescens; identical to SEQ ID NO: 427886

SEQ ID NO: 445121 - DNA, 246 bp, Serratia marcescens
atgccagcgtgggtgtgccgcctgcagattccagtgccgctgagtgatatcgaacagttcacgcacggcgtcttcacccaacgttttacggcgctggataaccgaactgcgggcagtgaacgggcatccgtttcggtccacaatgtccatcaggccaacgatttcagttatcggacggttgcagaaaaccgccataccaacaacgagccaaatcatcgattcaagagggagttttcgcttgcgtag

SEQ ID NO: 445122 - DNA, 1416 bp, Serratia marcescens
atgaaggactatctggaaagcgacgccaattacgtcctgcagcgccatattcgcgaggcgtcggcggaagtcgagttaacccgcaccttcggaaataagagcctcgataagcagctgaaggacattcaggacgaatacgacgcgctgatgcgaagcaagccagacgagcaggcaaaattggcgaaagccagggacaacgatattcgcgatataaccgcgctccgcgaccggctggttggcacctatggcatgcctgacgatccatcgtcgttctttgtgcgcgctggcgctttcctgcgtagcgccaactttgtcacgaagctgggcggtatgaccgtttcggccatcccagacttggctcgcggcgtgatggtgaacggctttagcaactcaatgcgcggttactctgcgctgatcagccgttcgccggcattcaaagccagccgggccgagatgcagaaaatggcggttggtctggaaaccatcttgcatacgcgggcgcgcacgatgggcgatctggtggacagctcgtcgcgtactacagccgtagaggccggcatggagcgcgttaccgatgtgttcggcaagctgacgctgatggggcatttcgacgacgtgaacaagtcggtaaacggcatgataacgtcggacagtattctatctggagcggccgccgcgaagaaactggcgaagctcgggatcaaccccaatatggccggccgtatccgcagcgagttccagaaacacggtgaggtgatcgacggttggcatattggcaattttgaaaaatgggacgatcagcatgtcgccggcgtattccagtcggcggtattaaaggatgttaataacacggttattacgcctggcatcggcgacacgccattatgggctagcaccccgttgggtaagacggttttccagtttaaatccttcgccacagcgtcatataaccgcgccacgctgggcggcctgcaagagggaacggctcaattctactatggcacagctttccagatcggccttggcgcgctgacgtatgcattgaaacaggcggccaacggtaaagaggtggagatgacgcctaaaaaattggtactggaaggtctggatcgttctggtatccttggcccactcatggaatataacaacatggcggaaaaggcatcgggcggcatggtgggtctgggagcaattttcgggactggaacacagtcaaggtatgccagcagggggtttataggctcagcgctggggccaacttttggcctgttggatacgttgactgatgtcacatccggcgtgcttaacggggatgcaggggatcgtgttattcacaacgcccgcactcttttacctggtaataatttattttggatagcaccacttattaatcaggttgatccgggcatgcgatag

SEQ ID NO: 445123 - DNA, 567 bp, Serratia marcescens
atgacaactgcaaatcgtccgatacttaatctcgacctcgatctgctaagaacctttgttgcggttgctgatttgaataccttcgcggcggcggccgtcgccgtatgccgtactcaatcagccgtcagtcaacaaatgcagcgattagagcaactggtcggcaaagaactgtttgcccgccatgggcgcaacaaactcctgactgagcatggtattcagcttctcggttatgccaggaagatcctgcgctttaacgacgaagcctgtacctcgctgatgtacaacaatattaaaggtgttctgaccatcggcgcttccgacgacaccgccgataccattctgcctttcctgctgaaccgcgtgaccgccatctatccgaagctgtccattgacgtgcgcgtaaagcgcagcacgacgatggtcgatctgctggaagagggcgagatcgatctggcggtgaccacggccgatccggccgggcacccgcacatcgccgacgctgtggtactgcgccgccgattaccactatcaggccggcgaaccgatcccgctggtggtgatggatga

SEQ ID NO: 445124 - DNA, 648 bp, Serratia marcescens
atggaaacaatcatcaccgttatcgctgctgttgctgggatcgctttttgggttgggttaataaatcccaaatgggtttttatgccaacacgaaagcgctcatctgctatctacttcggggcctgcctcctggctgcaatcataggctcaatggttgcacctgttgcgccgaaagcagttgctaaaaataagcctcagccagtagtgacaacctcagatcaaacacaacccacagctaaagccaaagaacaattaacaaccactatcgactttgcagaagcgaccaatcaactccccccggccttatctgaggcgctcggtaagttgaatctcacagtaaagccagtcatttacaacaaagccttagtggtcgcattcaattttgacagcatagaagaattacaggctaagagcgccgttcagtccgtatgtctcagctacttcaatcatggggaatccaacagggcttggaagtccggtttattcgatcatatttatgtgactaacgacattttaaccaaaggctacgtttttcagggtggcgaatcttcgtgcgatatttggggtaaaaaagccggggatagcggcgatcaatatttaagtgaaaaccttacacgttcaaggtttgttgccataaacatgaaatga

SEQ ID NO: 445125 - DNA, 1119 bp, Serratia marcescens
atggacacgacagaaaaccgatattcgccgcgcccggcgttcagtatcgaaattgagggtaagcagctaactgcgctggataaccggctgatctccctttcgttgaccgataaccggggctttgaggcggacacgctggatctgactctggatgatgcggacgggcaggtagctttaccatcacgcggcgcaaagatatcggtggcgctgggttgggataatgatccgcttgtttttaagggtgtgtatacggttgatgagatcgggcacgctggcccgcctgaccagttaacgatcagcgccagaagcgcggattttcgcgataccttcaacgtgaagcgagaatatagctggcacgatattaccgtgggtgatgtggtcgccagcattgccagccgctacgatttgcgcgcgggtgtcagcgaagaactggcgaagattgagatcgaccacgccgatcagacgagtgaatcagatatcagcttcttaacacgcatggccgaaatgctgggcgcggtggcgaccattaaaaacggaatgctgctgttcatcacgccaggcaaaggagtgacgcaaagcggcaagccgctgccggtgatcgaaatagtgcggtcaagcggtgataaacaccggtttaatgtagccgacagggatgcgtacacgggcgtaacggcgtattggcttgatctcaactttggcaagaagccatccaccaccgtgaagaaaaccacccgcaggcaccgaactacccaggccaaaaagaaagaacccgcatcaagcaagaaagagggggattatctggccggggctgacggtaacgtttttgtgatccgtaaaacattcaaaacagaaaaggcggcgaagcgtgcagccgcggctaagtggcgggagttgcagcgcggggcggctacgttcagcatcaccctggcgcgtggccgcgcagatttgtacccggaacagcccgccagcgtgtacggctttaagtccacgatcgacagtggaagctggacgataacgcggtgcgttcatgatgttggcggcagcgggtttaccacgtcgctggaactggaagtaaaaattgacgactggacagcggagagtgacgattcaacgtcttaa

SEQ ID NO: 445126 - DNA, 1194 bp, Serratia marcescens
atggccactaactaccatcgcggtgtaaccgtcacggaaaccaccgaccttagcacgatgatcaccgacattgattcggcggtgatcggcgttgtctgcaccgctgatgatgcggacgaaacagcgttcccgctggatacccctgtactgatcacccgcgtggctaacatgctgggcaaggcaggtaaaaccggcaccctgtttaccaccctgaaagcgatttcagaccagaccagcccgcaaactattgtgatccgcgttgctgatgctgcaaatatcgaaccgccagaaggcggcacagcacagacacaggatcaactggttattggcggcaccgatgcaaacgggcgctttaccggcatgtacgcgctgctgtctgccgaaatgcgcgtaggcgtgcgcccgcgtgtactggctgttcctgggcttgatacggaagcggtagccgcacaactcggcgtcattgcggaaaaactgcgcgcgtttgcttacgtggcagcgaacggctgcaacacaatcgccgaagtgaaggaataccgcgagcagttttcacagcgtgaaatgatggttatctggcctaatttcatctgctacgacaccaacgccggggcgaatgccaccgtgcccgtgggtgcccatgcggttgggatgcgcgccaaaatcgacgcaacgcagggctggcataaaaccatttccaacgttcccgttaataacgtgctggggatggatcgggatatctatttcacgttgcagggcaccgataccgacgccgacgaactgaacgcagcaggcgttacaacgctgatcaagcaggacggctaccgcatctggggatcgcgtacctgcgacgcggaaacgtatatcttcgaaagctatacccgaaccgcgcagatcgttgcggataccgtcgccgaagcccatttcgcctatgttgataaaccgctaaccccgtcgctggtaaaggacattgtggacggcatcaataagaagctgacctcatatgtgacggctggcaagctgctgggcgcccgctgctggtatgacccggaaccgaatacctcggaaaccctgcgcaatggtcaactgaccattaagtacaactacacccctgttccaccgctggaaaatctcagcctggtacaggagttcaccgacgaatatttcgctacgttttccagcgcagtgaataactaa

SEQ ID NO: 445127 - DNA, 516 bp, Serratia marcescens
atggcactgcctaagaaactcaaatatttcaatatgttctttgacggggataactacttcggcatggtgccggaaatcacccccgccaaactcaccaaaaaaaccgaagactaccaggcgggcggtatgccgggttcggttgcggtggatctgggcttcgacgctggtgccctggatatggatattacgctgggcggcatggatgccgggctaatgaaaaaatggggcgttaccactgcggacggaatgcaggtgcgctttgctggctcttaccaggacgatgcgaccggtgacgccgtaccgtgcgaaatccagacgcgtggccgcttcactgaactggatcccggttcggcaaaggttggggatgatacttcgcataagtacaccctgaaaaacacctattacaagctgaccattaatagcgaagaaattatcgaaattgatgtgctcaacatgatctacaaagttgccggtgtggatgtgctggaaaaacaccgcgctaacatcggcttataa

SEQ ID NO: 445128 - DNA, 336 bp, Serratia marcescens
atgagcaagaccaaagaaaacaccgttattcttaccgcccctattacgcgcggtaagaccaaaatcaccgaagtgacgatcacttccgtgcttaaacaggctggatcactgcgcggcttaaaagcctatgacgtgctgacttccaactatgacgcgctggttattctgctgccccgcgttaccgctccggcactaaccgccgatgagattgcccgtatggatacctgggatttttgccagctagccaacgcggtggttgattttttgcaaccctcttcggatctgaccgcgacggatacgggcaacgaatcatccgatgcccctgcgaacgcatag

SEQ ID NO: 445129 - DNA, 2928 bp, Serratia marcescens
atggcagaccgcaatttaaatatcagggtggcattcagcgccctgaataatatgtcccgccctgtcaacgcggcgcgccagagtgccgccgcgttggcgtctcaaatcaatcagaccaaaaccagcattaaagggcttgagcgtcaggcaaccagcttcgaccgcctcaccgcagccaataaaaaaaccaccgaacaactggcccaggcgaaagaacaggcccggcaaatggcggcggcttatggcccgttacgccagcgcagcgccgaacaggttgccgccctcaatcagcaacgtgcagccattcgccagttaacccagcaacagaaaggcgagcagacgcaacttaaccagttgcgcgccagtttctacagtgaaggcattgcgatcagcagcgccagccgggcgacggaacagatcaaccagcgcaccgcgcaatacaaccgccagcttgccgaacagcaacgacggcttgacgctgttaaccaggcgcaggcccgttacagccgcgccaaagaaaccggcgaaaagatgatgagcggggggatgaaaaccgccgcagtaggggcggcaaccctcgcacctgtcgccgctgcggttaaatcctacagcagccttgaagacgccatgaaaggcgtagccaaacaggtaaacggcttgcgtgacgacagcggcaaccgaaccccgcagtatgaagaaatgcagcgggcgatcatggatgccagcgaaaagctaccaatggctaacggcgctgttgactatgccgccctggtcgaaggcggtgcgcgcatgggcgtagcaaacagcgatgatccgtggcaaaagcaaaaagccgatctgctgtccttcgccagtatggcggcaaaggcttctgttgccttcgaacttcccgccgatcagctttctgaaagcctcggtaaaatcgccgggctgtacaagatccccacgcagaatattgagcagttgggagacgccattaactacctggacgataacgcgaagtctaaaggctccgatattatcgacgtactccagcgcgttggggggcttgccagccaactggattacaagcaagccgccgcgctgggttccacctttctgacgctcggcacccctgccgaagttgccgccagcgccaccaatgcaatggtgcgcgaactctcaatcgctacggttcagggcaaaaactttatgcagggtctggacgccctcggcctcagcgccgaaaaagttcagaagagcatgtcagtggacgcgatgggcacaattatttcagtgctggaagcgtccaaaaaactggccccggatcagcaggtagccaaccttacccagattttcggcaaagagttcggcgacgacgcgcagaaacttgccaacaacctgcccgaactacgccgccagatagaactgacgcagggcgcagccgctaaaggttccatgaatcgggaatctgatatcaacaaagcttccctttctgctcagtggcaattgaccaaaaccggcgcggttaacgcattcagttcagcaggggaaacgctccgcgaaccactgatggatatcatgcttaccgtcagtaaggtggttggcagcgtccgccgctgggttgaggctaaccctgctctggttggctcaatcatgaaagtcaccgcagccataggcacgttgctggttgtcgtgggtggcctgatgctgtccatcggcgcagttctcggcccgatggcacttgttcgcctcagtttcaccacgttggccggtgaaggaggaatagcgcggctgactggtggagtaatgcgcctgggtggtgcgttccagtggcttgctggctcgcctatgcaggcattgttaagcgccggtcgcatggtattcggcccgcttattactctactggctggcatttctgcgcccgtctgggggctgattgcgctctttgctgcggcagcagtggccgtcattaaattctggcaaccgattaaggcatttttcagcggcttctttaccgggctgatggctggccttcaacctatcacgcaggcatttaacgccgtatttgcaccgctggccccgatttttgacagtatcggcaacgcgatcagcggcgtctgggagtggtttaccaaactgctggaaccgatccagttttccagcgaagcgctggcatcctgtaccagtgcaggggaaacattcggcaaggtggtaggaggggcaatcagcgcgctgacgcttcccattcaggccgtagccaaagggctgggctggattctggaaaagctgggcgcaattcccgacgcagcgaaagcagcgcagcaggttgcgcagcaaatgacgccagaagcggtcaacaatctggcagaccgggttaacgccttttccggtgacgtgcaggcagtcgcgaaagaaagcaaaaaagccgaagagaaaaagaaaaccgatgagcagaagaaacaggacaacctgattaactcgctcaagggcccggccaacatcgtgccgaagatgagcagcagcctggacaagatcgccaccaataccacggagaagaaagacgggcccggcgaaatcgtcttcaagaataagcagccctatatcccgatccgtggcggatattcggaaccgcttaagcagacacagcgccagctaccatcccttaccgattgggtgacgcagcaggccggatcgctgatcgcttccgttaccccctggcaggttgagaagcccgccgcacgggtgcccgtttcggcatcgccgtctgcggcttccgtcgctgcgctgatgcctgcgccgggtggtgatgtatataaccttaactttgactttagcggccagaaactggatgaagaaaccattatcaggcgcgtgcgcgaagaacttgcgttagcgaagcagcaggccgaccggcgcaagcgttcccaactgaccgatcacgtctaa

SEQ ID NO: 445130 - DNA, 450 bp, Serratia marcescens
atgatgatgattctggggatgttccccttttcactgcaaaccacgccttaccagagtgcgaataaaaccaactcctggcggcacgtcaaaaacgatcgcgtggggaaatccccgcgctatcagttcatcggcgctgatgaagaaccgttcgtactcagcggcacgctgtaccccgaaataagcggcggtgatgtgtcgcttgtcatgctggaaactatggctttttccgggcgcccgtggcccctgattgaaggcacgggcaggatctacggcatgtatgtaattgagcagatcacgcaaaaccggacggagttttttaaggacgggaaggcaaagaaaattgattttacgctcaacctgaaacgggtaagcgaggacatacgggaaaagctggccgaaacgaccaccgacgatctcttctctctggtgaaaaccaacctttcgatataa

SEQ ID NO: 445131 - DNA, 297 bp, Serratia marcescens
atgggtttagttcccgaaggtaagtacaggacggccagcgcgcagggtttgcctgtgtgggctgatttggctccgccttcacacgatgagttgattgcaatagttgaggctgacaggcaaaaccgaattgataatgctatgagctctatagctgttattcaattaaagatgcaggcgggcaggaagttaactgagagcgagactataagattgaatgctgttttggactacattgataagctggacgctatagacatcaactcatcagatattgaatggccggataagccggaataa

SEQ ID NO: 445132 - DNA, 1044 bp, Serratia marcescens
gtggcgactaaatattatgccgtgctaaccaatgtgggcgcggcgaaactggcaaatgccacggcattgggtgcgcaggttgagatcacccagatggctgtaggcgatggtaacggcgcattgccgacgccgaacccggcacaaacggcgctggttcatgagttgcgccatgcgccactcaataccctgagcattgatcctaacaacgccaaccagattattgccgagcaggtgatccccgaaaacgtgggcgggtggtggatccgtgaaatcggcttattcgataaagacggcgatatgattgccgtagccaactgcgcggaaacctataagccgcagttgcaggagggcagcgggcgtgtacaggttgtccgtatgattctaatcgtgagtagcacggaagctattactttaaaaatcgacccgtcggtcgtgttggcaacgcgccagtatgtcgatgaaaaggttatcgaggtgaagacctatgccgatggtctgatgaaaaagcacgttgacgccgcaaacccgcataaacaatacccactgattgagaatgcgcttaaggaaatggccgactcggggttgattgataagctttttgaaaacctcgggttaggaaatgcagccaaaaaaaatgttggttctggaaatgggcaagtaccggatatgtcattttttcagtcgacgaaagggtcaaacggtattcaatatttgccaagtggaataattgttcagtggggaatatggaatttatcagttgtcggaaactataactcggaaacagtggggggcgtaacatggtacacccattatacaaagcctctttatacggttgctttccctaatatggcgctggtcaatttcatgaatctggcgggctctacttttgaggggcaaactaacgaattcaatacgtttatacgctcaaacatgagtgcggcaagtgatgggaaagcggggtcacgtactaacgcctgcgtttctgttacatccagaattttggggtacacccctacagtacattggctggctatagggtactaa

SEQ ID NO: 445133 - DNA, 579 bp, Serratia marcescens
atggagcgcgtcgccgcgcgcgtctgtgcgtcgttgggtgaagtgcccgtgccattgcgccagttgtggaacccgtggacgtgtcgggctgatctgctgccctatctggcgtgggccttctccgttgatcgctgggatgaggcctggccgatcagcacgaaacgaaaggcggtggccgatgcgttctacctgcataagtacaagggtacaacgggtgccatgcgccgggttgtggagccgttcggcttcttcatccgggttaacgagtggtggaacattgataccgcaccgggcaccttcacgctggatattggcgtggaagaccagggcattagtgaagaaacctatcaggagcttgaacgcctgatcgccgatgtgaagccgtgcagccgtcatatgctgggaatgtctcttcacctgcaaacaaccggcgatctgtatatcggcgcgggtagttattccggcgatacgctgactgtgtacccgtatttccctgaaaccatagccgtgggcggtgatgattacaccggggcggcaatccatttaattgacaccgtggagatcgcaagtggcgactaa

SEQ ID NO: 445134 - DNA, 912 bp, Serratia marcescens
atgagcggcacgatcgatttatcgcagctaccgccgcccgtggtggttgaaccgctggacttcgaaacgcttttcgcgcagcgcaaggccgcatttattgcgatgtacccggaagatgaacaggaagagatcgcccgcacgcttgagcttgaatcggagccgatcaccatgctgctggaagagaattgctatcgcgaattgctgttgcgccagcgggtgaatgaagcggcccgcgcggtgatgctggcttattccacggatagcgatttggataatctggcggtcaatttcaacgttgaacgtctgaccattcaggaagaagacgacagcgttaccccgccaattgaagccgtgatggagtcagatccggatttacgcacgcgtacccagcaggcttttgaaggtctgagcgtggccgggccaacggcggcgtatgaattttgggggcgttcggcagacgggcgcgtagctgatatttcggcggtcagtcctacacctgcttgcgtcaccatttcggtgctgtcgcgtgagggtgacggaacggccagcgatgatctgctttccgtggtcgctactgccctgaacgatgaagaggtgcgcccggtggccgacagggtaacggtgcagtctgcggagatcgtgccgtatcagatcgatgcaacgctttacatctatccggggccggaagcagaacccgtccggcaggcatcggagcaacagttacaggcgtatattgccgcgcagaatcgcttagggcgcgatatccgtctttcagctatctacgccgccctgcacgtcgaaggtgtccagcgcgtggaactggcgcagcctgttgcggatatcgtgctgagtgactaccaggcatcacactgcaccgaatacaccataacggtgggtggttacgatgagtaa

SEQ ID NO: 445135 - DNA, 363 bp, Serratia marcescens
atgagtacagtccgttacagcggcatgaatgccggttcaggccatgccatcaccgacaacgagcatatagcgcagtctatcggcgatattctgttaacgccgatcggttcccgtgtaatgcgccgcgcttacggttcgcagcttttcaacctgatagatcagccggtcgataacgccataacgaagctgcgcgttatgtctgccatttacagcgccctgtatttatgggaaccgcgtatctctctgaccagtattaccctgagcgcgccgggtgctggtcggctggttgccactattcaggccaaccgcaccgacaatcagacgccatttaacgccgatatcacattgaggggccaggcatga

SEQ ID NO: 445136 - DNA, 630 bp, Serratia marcescens
atgaatttaaacgaactctatcgccttatctgcaatctcgcccgcattggcaccgtgctggaagtggatacggaaaagtatcttgcacgcgtcgaaaccggcgagaacaaaaccgactggatccgctgggcagtgccgcgcgccggtgaagccgtgacgtggtgggcgccgacagtgggcgaacaggtttatattttgtgcccctgcggtgagatggaaacggcatttattgccggaagcctttacagcgaagacgcaccgccgccagatgctggcgctaccacctgcgtaatcctgcacccggatggcgcccgtatttcatatgacccggaggccagcgcgctggttgtcagcggggtaaaaacggcaagcgtcaccgcgtcggaatccattaccgccaccgtgccggtggtaacggtcaaggcagacacgcgcgttaccctggacacgccggaagtggtctgcaccaacaagctgatcaccgccacgctggaagtgcaaaacggtggggaaatgaagggcaacattacccattcaggcggatcgctttcgtctaatggtgtcgttgtccattcgcacaaacatagcggcgtccagtccggtggcagtaatacaggtggcccggtatga

SEQ ID NO: 445137 - DNA, 645 bp, Serratia marcescens
atggcaggacaacaaaccgatcccctcttccagcagttagacgactggctagccagtgtggccgcgcagctttcgccggggcaccgtcgcaagctgacgcgcgacgttgcgattgggctgcgtaagcgtcagcaaaagcgtatcgccagccagaagaaccccagcggagaaagctatcaggcccgccgacgcaaaatcctgcgcacccagggcgggataaagttcatatggaatgatgaggccagggagttacgcaactggcgaactacgggcaggggtgagcaccgcgcaatcaccggctatgacgttgatcgcggtgccctgcgcacgttctataagcgcgatatccagcgctatattgaaatcaatctcaaccagtcaaagcagaaccgcaccagaaaggatccgatgttccgtaagctgcgcaccgcacgctttcttaaggcttacggtacgggcggcatggccgtggttggctttcaggggcataccgccgaaattgccagcgttcaccagtacggtgaagtcgataacgtggtgccgggtgcccgtgcgcgctacccggtgcgtgaactcctgggcatgaccgagggggatttagactggctggccgatactgttgttgccttcatgcaagagatttga

SEQ ID NO: 445138 - DNA, 495 bp, Serratia marcescens
atgcttaaacccgatttgctgcgccagatgataagccagcatgtgccctggctgcgcgagaatcccgataatctggcggtttacctgcgtaaaggccgtatggtcagcaccggccagcgtgctgctgcgtttgagtatcgctatacgctggaagtgcttgtgatggattaccctgaatctctggatactatcagcgtgccggtgctggcatgggcgcgcttatatcagcctgatctgttgtttaacccggacaggcagcagaacggcataacattcgaagccgatatcctgagtaacagcacgatggacgtgctgatccagattcaggctgatgaagcggtgatcgtcacccgtgaagatggcgaaatcgtcacccgtcaccgtgctgaccctgcaccggggccagaaattggcgcgtggtcactggtatttgttgatgaggtcagcggcgaaacatggcaggacaacaaaccgatcccctcttccagcagttag

SEQ ID NO: 445139 - DNA, 534 bp, Serratia marcescens
atggggctgttatcacgctggaaagtgattgtttgttttgtgctggccgctgctgctgtatggggttttagccactggcgttacagcgccggttacggtgatgccgatcagcactggcgtgaagagtgggcgcaacgtgatgcacgcgacgccaccgcgctggcacaaaggcaggctgaggccagggcagaagaacaacgccgacaaggtgaaattgatgcgatcagaaaacaagccagccagcagcttgctggcgtgcaggctgatgccgatcgtgcccgtgctgcttctcgtgggctgcacgacagggccgacaaactcgccaggcaactggcagaccgtgaacgcgcctgcggtgccggatctcccggcagaagcgaggcagaaaccagcggcgccgtactgctcgccgacttgttccgccgcgctgacgatcgagcggggcaactggcaaaagatgctgatgaagcaagagccagaggattagcctgtgaggctgcgtatgatgcggttaagtccgggagggataagtaa

SEQ ID NO: 445140 - DNA, 441 bp, Serratia marcescens
gtggaaatgagtaataacggcatcaatatgctgaaaggctttgaagggtgcaggctggccgcttatcaggattctgtaggcgtctggacgatcggttatggatggactcaacccgtcaacggcgcgccggttggcaagggcatgaccatcacgcaggaaactgccgatagcctgttgcgtagcggtctggtgcagtatgaaaaaggcgttacggggctggttaaagtcactatcaatcaaaatcagttcgatgcgctggttgattttgcctacaacctgggcgtaaaggcgttggaaggttccacactgctgaaaaagctgaatgctggcgatttcaccggggctgcggctgagtttccgaaatggaataaagcaggcggcaaggtgttgccggggctggttaagcgccgggaagccgagcgcacgttatttctggcctga

SEQ ID NO: 445141 - DNA, 201 bp, Serratia marcescens; identical to SEQ ID NO: 15003

SEQ ID NO: 445142 - DNA, 489 bp, Serratia marcescens
atgagtctggtagccactgagccagtacggccaccatccgatccagtgcctgatgatggcggcgcgaaagttgaaagcctgccattctggccggtcatttcgctggctgaactacgccgcgcgatgcgtcttgatgggcaggtgacaaccgatcgcctgatgtcgcgaacggtggaagcggtggcccatgttaatgatcagcttttcctgtggcgccaggtgcagattgatgcgggctatgagtcattggcagaaattccggccagtccggtgaatggcacttctgtgaaggtatggcgctataaaaacgccgtgtattcactcactaaggcgctgttgattgaaggctaccgcgatattgacaccaccagtaaaggcgaagaccacgcggcggcattgagcacgcagatcgatacgctgtggcgggatgtgcgctggtcaatccgtgatatccaggatgaaagccggggcctggcggagttggtgtaa

SEQ ID NO: 445143 - DNA, 849 bp, Serratia marcescens
atgttgacacctgctcaacaacattttaatcgcgtgatggctgaacgccgccacgccagccgtgagccgtcgcagcttgaaatgacggcatacgaaaccatgcttcaccgcctgcgactggataaagcccgtttgagtcgtgtccagtcccagaaggctaaagcggatttaaaacgcgaactgctgccggattatcagccgtggatcgaaggcgtacttacggcagattccggccagtctgacgacgtgttaaccaccgtcatgatctggtgttgtgactgcggaaacatcgccgaagccctgcgcattggtcagtacgtattgcgccataagttgccgatgccggatcagtatcgccgcaccaccgccaccgtactggtggaagaaatttgcgatcccgtcctggctgcattcaaagctaacccggctgttgcgccggtcgccgctgacctgctggaagcgttacggggcttaaccctgaatgaagatatgccggatgaggtgcgctcaaagctgcttaaggcgctggggtatacgctgcgcctggctgaaaacgttgaatcgcttacggctgcggttgaatacctgcgccaggcggcagtgttgaacccgaaaaaagcaggcgtaacccgtgatattgagcttctgcaacgtgcgcttaagaagtccgggcaacctgctgacggtgacggcgaagacggcaagccagaatcaaacagcaccgaaacccagacggcaaagccgccagcccagccaaaagcgaagcgggaaaccaaaaagcccgcggctaaaagcaaaccggcagcgaagaaaagaaccacgacagcccgccagaaggcggcgtcataa

SEQ ID NO: 445144 - DNA, 1047 bp, Serratia marcescens
atgcgtaattctacccgcgaattgtttgatgcgtatcttgagcgacaggccgaactcaatcacatcaacaaatcccacgtaacaaaagcgttcagcattgatccgagcgttgagcagacgcttgaagacaaagtgcaacagtcttccgaaatgttgaagaagattaatatctacggcgttaacgatcagtccggtgaaaaaatcggtctgggtgtgagcggcccgatctccagcaccaacaattccaccaccgatcgccgccagcctgtttccgtcacggcgctggattcgaacaaatacacctgtaataaggtgaacgcggatactttcgcctcttatgcgcagcttgatgcctgggctaaattcccggatttccagcagcgactgagcaatcagatcattcagcgtatcgcgcttgaccgcatcatgatcggctttaacggaaccagctacgcggataagtccgaccgcaacgctaacccgcttttgcaggattgtggtatcggctggctgcaacagtaccgcgcaaacgcgccgcaacgagtcatgaaagatatcaccgtgaccagccgcgacgattccaaccaggtgatcgctaaaggtgattacggtaactacgattcgctggtttatgacgcggttaactcactgatggacgagtggtacaaagattcgcccaatctggtggtgatcaccggtcgtaacctgacggttagccgttcgttcccgatcatcaatgccgtaagcaccaataacccgaactccgaagcgctggccggtcagttgatcgcatcgcgtaagacgatcggcaatctgccttcgtttatcgcgcctttcttccctgatggcagcatgtttatcacttcgtgggaaaacctgtcgatttactggcaggaaggtgcgcaccgccgccgcattgtggaagaaccggaatataaccgcgtctctacctacagttcgtcaaatgatgcctatgttgttgaagattacggcttcggctgtctgatcgaaggcattaccgccgccgaaccagcaccggcaccataa

SEQ ID NO: 445145 - DNA, 843 bp, Serratia marcescens
atgccaatgacaaattttttccgcgtcgcagtcgaaggcgcaacctgtgatggccgagtgctggaacgtcagcacattatcgaaatggccgagcagtacgatccccaggtctatggcgcccgcgtcaatctggaacacattttaggctggtctccaaacagtgattttcgtgcttacggtgacgttgctgaaacgaaatatgaagaaatcgccgaaggccagttaaagggcaagttggcgcttctggtgaaggtggacgccacggatgaactggtcgaactgaagaagaaacgccagaaaatctaccatagcattgaggtgcatccgtcctttgccgacaccggcaaagcctaccttatgggactggcctgtaccgataacccggcgagcctgggcaccgaaatgatgaagttttgcacccagaacgccaacgctaacccgctggccgcacgtcattacgcaccggaatgcttcttcactgaaaccctggaatcatctctcgaatttgcgcaggaacagccgccagcctctgacgccggaaagaatttctttgcccgcgttaaagaaatgctcaccggcacccgtcagcacttcgatcgtgaaaatagcgatatccgccaggcggtggagttggtcgcggaaagccagggcgaattgctggacaaggtggaaaagctgaactttgcgcttcttgaaaataagcaataccgcgaagcaatgaagacgttacaggctgatttcgatcagctgaaacagcagctttctacccaggacgccagccaataccgccgcccggaagcgaccggagcggaaaaaactaacgcccagcttgctgactgctga

SEQ ID NO: 445146 - DNA, 1713 bp, Serratia marcescens
atgaatacagccgaagacctcagcacaagagccaaaagcctctactggcaggcgtttagcatcactcagatttctaaggaaatcggggtgagcattaacacgatctacagttggcgccgccgctatgaatgggataaagccacccccatgcagcgggtgcaggatcgcacgcacgttcgttacctgcgcctggtggaaaaggacgacaaaaccccgaaggacttcaaagaaattgacctgctggcgcgccagcttgaccgctttgaacggcatgagcgacgcgaccaggagaaagagaagaaggcgaagaccccgaaaaaccatttcaccgaagaacagataacccagcttcgcgccctggtctttgattcgctatacgagcatcaaaaacgctggttcaaacagtggaaccggcgtaaccgctttatcctcaaatcgcgccagattggtgccacctggtactttgcccgcgaagcgctgttgcgtgcgctggaaaccggaaataaccagatattcctgtcagccagccgcgcccaggcgttccagttcaagcggttcattcagaagctggcacaggaaatcggtgtagaactcaaaggcggcgacgccatcgtattgagcaacggcgcaacgctgtattttctcggcacctctgccgcgacggcacagagctacaccggcgatctgtacatggatgaagccttctggatcagcaacttcatcaacctgcgcaaagtcgccgcaggcatggcgacccacaaagggctacgccgcacctacttttctacgccttccagtgaagaacatgaagcctaccccttctggactggcgatcagttcaataagcaccgttcacgggccgatcgggtggatatcgacaccagttataaggcgctcaaaaacggcaagctgggcggagataacatctggcgccagatagtcacgctggaagacgccgtgaagctcggcttcgatctggttgataccgatgaaatccgtaacgagaactcccccgatgaatacgccaacctgtacggctgcatgttcgtaaaagccggggaacgcgccttcgactacaacgcaattctgggctgcggcgttgatggctacatgccggacgcgtggccggactggaacccgtttgcaccccgtccgctgggtaatcgccctgtctgggttagctatgatcccaacggcagcagcggcaaaggcgacagcgccgggctggttgtgctagccccgccagccgtgccgggtggtaagttccgcgcggtagagcgccaccagttacgcggcatggagtatgaagagcaggccaaatttattaaagagatcaccacccgctacaacgtgcagcacattgctatcgacggcacagggatcggcgatgcggtttatcaactggtggtcaagttcttcccgcaggcggttaaatacaactattcaccggttcttaagcggtcgatggtgctcaaaatgttgatggtcattcgcgccgggcgctttgagttcgacgccggaatgatggatctcgcgcagtcgtttatgaccgtgcgtaaagtcaccgcaggcggcgttataacctaccagtccgatcgcgcccgtggcagcaatcacggcgatctggcatgggcaactatgcagggcatttacaacgaaccgatcggcgcggaagtgaccggcgataacggcagttttgtggaggagttttaa

SEQ ID NO: 445147 - DNA, 1050 bp, Serratia marcescens
ttgagcggcaaaaagaaattcagggcgccaactgctgcgccagccagcacggccagcaacgcagccaccccgctggaaagcgtggaatctttcagctttggcgacccgatcgcagtcaacgatcgcgcgtctcttatggagtgcctcgaatgccataacaatggccgctggtatgaaccaccgatcagcccctacgggcttgcgcgcatgttcgacgttgccgcctatcaccagtcaccgctgatatttaaacgcaatgttatcgccagttgctacataccacacccgctattgacccggcaggagttcaccgcctgggtgcaggattatttaattttcggtaactgttacatggaatgccgccgcaaccgactcggccagccgattgagctgcggcacagccaggcgaaatatacgcggcgcggcatagacccggctcaattctggtttgttccgcgctacgttgacgatcacgcgttcgaaccgggcagcgtctgccagatcaagaaccccagcccgcaccaggagatctacggcgcgccggaatatctggccgcgctacaaagcgccatgctgaacggtgaagcaacggtgttccgccgcaactactacattaacggcagtcatgcgggtgtgatcgtctacctcactgacccggtggcgaataataacgatgtggaaaagcttaagaagtcgctgaaagatgcacgcggcaacggtgcttttaaaaacctgtttgtctacgcggcgggcgggaaaaaagacggcctgcaaattatgccgttcagccaggtggcggcgaaggatgagtttaccggcatcaaagacgccacccgcgacgacctgctagccgcgcaccgcgtgccgcccgttctgatgggggtaatgcctaataactccggtggcttcggcgacgtagagaaagcggcgaaggtgttttccatcaacgaactggctccgatacaagaaagcctgaaagagttaaacgactggctggggatcgacgtggtgcgcttcaatccttacgcactgttgcaggcagcaatctga

SEQ ID NO: 445148 - DNA, 2388 bp, Serratia marcescens
atgaccacggcaacccgtggccgtcgcgccccttctccacctccaccgtatccgggtagcactgacaatgctatcccttacgcttatggcgggaacaaaccataccagccgattggcgttgatgtagcgccggggctggatggtttcgactatctcatgccggacggcacgcgtaagcatattgcgttcagtgaactggtagcggaggacgaaaagccggaacgcagtaagctgctgcgtcgccgtctggcttctcttccgcaatatgtccgccgccactttgcagcgaagcttgatgcgctggatgtgaaagaccgcaaagcggcagatcactggctgcttaacacctttgagcgccacgtattaacgcgtattgatagcgtgaacagtgtttaccagcctgatactgtgatgcccggcattctgctgccaattcgcgatcagcttttccgtatgctctgggcagggaaaaaagagttaaaaagactggcttatacgcttgccgatatctttacgagcgagtttatacgcgagtccgatcaccagttggtgcgcaccggcgatcctgagttcgcggcgctttctggctatggccgtattgcatcgctggcagtgcatctgaaaacgccgatccccggttggacagcttattgcaatgaagaacttgaagcggaggacgcgttacgcgcagttctccgtcttgagtcaccgcagtggtggttaaaccgcctgcgccgtatccatgcccggtggcgtgagcatttgatgatcgcagcgggatacgtccagaaaaaatcctccccatacagtagcgccccgtgccttacggaatggctggcccagaaaaaagctaaccgtgaatacctcaaggctatggaactggaagaccaggacacgggcgagcgcatttcgctgatcgataaagtcgccggcagtgttgccaatccggccaaccgtcgccgcgaactcatgacgagaatgcgcggatttgaagatctggcgaagctggaagggctggccggtgacttctacacgctgacagcgccttcccgctatcacgctatgcagcataacgggcgccgtaataacaaatactgtggcgcgtcgccgcgtgagacacagcaatatctttgcaaagtctgggcgagaacccgcgccgcatggaagagaaaagggatccgcgtctttggtttccgcgtggtcgaaccgcaccacgatgcaacgccacactggcatttgcttctttttatgcgcccggaatgcgtcgagcaggcgcgcgaaatcttccgtaaatatgccctgaaagaagacggcaacgaaccgggagcgcaggaaaaccgctttcaggtcgtgccgatcgacgatgcccacggcagcgcaactggctacatagcgaaatacatttcgaagaatatcgacggcttcgcgctggatggtgagaaggacgacgaaaccggggaagacctgaaagaaatgtcactccgcgttagcgcgtgggcatcgcgctgggctattcgccagtttcagcaaatcggcggtgcgccggtcacggtatatcgcgaacttcgccgcctgggcgatcgcgaactggtgttacaccctgaactggaaaccgcccggcaggccgctaacggtggcgaatgggataactacgtattagcccagggtggcccgttggttgagcgcgataagctgcgcatccgtctgaattatgaaaccactgaaaacggtaacgcctacggcgataacgtccagcgaatcactggtatttactgcccgattacgggcaatgactctttgatcttcacccgcaccactcaatacaaaatcgtgccgaagcgccagagcgctgacggtgtggccgttgacgttggtttttcaggcggcaacgccgcccctcggagttctgtcaataactgtacgcgggatcccgctgcaggtgctgacggtgttgaacatgccgccatcgaagctacagggcagtcagaaatgactgtgccagctgagggcgtgacggtgaattttgatgcgctttcacggcaggaaaagcgagaactggcgcagcggcttagtaacgatgtgcgaagcaagcgtaaaaaacggccaccggaacgggaagagggcgccgggctatccgtgaaagagcagcagatcagtgaactgctggcgctacgtgggattgatgccagcgccggaatggtcagatcgatgatggccggtgcgtcagtggcgtgcggcgatcttgttatgaccgtgcaggatgggcggctggtatcgcgcaaccgcgcagcgtccgggctggataagctgccgtcgcaggtgatggcggcgaagcaaaaaacaagtgagcttgtgaacaggatgaaagcagcattttcgcggaactaa

SEQ ID NO: 445149 - DNA, 180 bp, Serratia marcescens
atgaatcttgtagacgcctggatcgttgaaatcataagcgtgagtcgtggcgagattgtgccgtattggttggttgaggcgaaagtaacagcttatggaagggagtcaataaccacaattctgaagaaatcagaagaggaagccaaagccgttaaagtaggggatgtagttcaaatatga

SEQ ID NO: 445150 - DNA, 972 bp, Serratia marcescens
atgatccgcccgttcatcaaatgggcagggggtaaaacccgtgtccttcctgacctgctgccgcaccttcctaaagccgactgcctgatcgaaccgttcgtaggcggcgcatcggtatttctggcgactgagtaccgccgctatgtgctggctgatatcaacccggatcttattaacctttatcggaaagtcacccgttacccggacttagtgatcgatgcggcccgcgaactgttcaacagcaagaacagcccgcaggggtacaacgaagtccgcgccgcgttcaataagcaggtatgtacggtaaaaagctgtgggttgcgttatggcgtcgaaatggcgcgcatcatgcgtgctgctcaattcctgtatctgaaccgccacggttataacggcttatgccgttacagccgtaagaccggctttaacgtgccgtttggcaagtataagagcgtctactttcctgaaaatgaaatccgcctgtttgccgaaaaggccaacgatacaaaggcaatatttctttgcgcgccgttccagcgttctctacaggtcgtcacgggtggcgatgttctcgtttactgcgatccgccttacctgcctgaaagcaaaacagccgattttacccaataccacaccgaaccattcacggaagacaaccaccgccagttagtccaggcactgctggaagttaaccgtaagcatggcgtgaaggttgtcatttccaacagcgacaccgaagccacccgcgcgatttatcagcctttcaagatgcacgaaatcagcgtgcaacgttccgtcagcactgacaaagacaaccgccagaaggccaaagaagtgatcggcgtgctgcctgtctgcgactgctgcgggcgttacggcggcggttgccctgattgtggcgccgtgatgggtgatgcgacttacaacgcgatggttgcggcaggcacgtttgacgatatggaggcgttttaa

SEQ ID NO: 445151 - DNA, 213 bp, Serratia marcescens; identical to SEQ ID NO: 14990

SEQ ID NO: 445152 - DNA, 183 bp, Serratia marcescens
atgctgcgcgtgctggattcactacgtccggcgctggccctgctgttggccttcatggtcgtagcagtggatttcaccagctacctgctttcggtgattggcgacgccttcttcgttggcgctcttcttctccttgtctggcctgccatcaagtcagctaaccaatcagcggatcaccagtaa

SEQ ID NO: 445153 - DNA, 204 bp, Serratia marcescens
atgagccagaaaacagccaaccacgaaaaccgggtgcgtgaatgcaacaacattctggacacccatttaaaagatatgcaaacgggcttcatgattcgcaccaatagcggcgaatttatgatcagggataaaaagctgattaagaaaataaccaaagacgtggcccgccatgttgatggtgaattgcttaaattgggaatgtga

SEQ ID NO: 445154 - DNA, 282 bp, Serratia marcescens
atgacagacaaagagttagaggggttcattgaagtgcgtcatgccgttgacgcggttccataccctaaatttgccgagttaatcggtaagaagcccgccacggttaagagcatgattgaagacggtaagttgccgatcatcccgtggaagaacccggaaagcctgggcgcccgtgctgagaactggatctatattcctgagttcaaccgcgcaatgcgtgacgcctactacaaccgtccgagagagcagcgcgacgcttggttgctgtggatcggtctttga

SEQ ID NO: 445155 - DNA, 237 bp, Serratia marcescens
atgtctcagaaagaagtacctatctacattcctgctgaacttgaatacctcgttgctaatgacctggcttgcttacgcttccactaccacttagctacaccgacaaaactgcccgaagcaggcgagttgtttactggtttaaccattgagcaagcaaaagacaccgtaaccttcctccagcaatacattgctaaagctgaacttgcttcttcactggccccgaaacggagccactag

SEQ ID NO: 445156 - DNA, 981 bp, Serratia marcescens
atgtcgattaagaagctcgaaggtggtcaatatgaagtggacgtatggccgcgcgggcgtaatggaaaacgcatccgtaggcgatttgagaagaaacaagaggcggttctttttgagcgttatgtattagccaacgccgacaaaaaagaatggctgggggcgagcgttgaccgccgcaccttaagcgagttgttagatacctggtggctgctgtatggacagactcaggaaaatggcgagattgaaaagcggcacctgaataaaacaatcagggcgctgggtgatccagccgttaaccgactgaataagcgaatgattgcacagcaccgaagccaacgactggaagacggtatcagcgcagcaacgatcaaccgtgatatttaccgcttatccgggatgttcagcacgttgataaagctggaagagttcaggaaggaaaacccctgcaaggggctggaaccactgaaagagacgccgccagctatgacctatctcgccaaatcggagatcagcagattgctggatactctgaccggcgacgatcggcgttttgcgctgttatgtctcagcaccggcgcacgctggggcgaaggaagcacgctgcgaggcgagcaggtaaatcacgggcgcgtgacgttccttaagaccaaaaacggaaaaaaacgcacggttccgatatcggaagaactggagaaagagatcaagaccagcgacaccgggccactgttcaaagttgattatgaaaacttctgcgaacggctcaaacaggttaagcccgatttaccacgcgggcaggccacgcatgtgcttcggcatacattcgcaagctggttcatgatgaacgggggaaacattattgcgttacagcaaattctggggcacgccagcatacaacagacgatggtttatgctcatcttgcccccgattacctgcaacacgcagtaacgttaaaccctctcggcggcgggctggcggtgtga

SEQ ID NO: 445157 - DNA, 225 bp, Serratia marcescens
gtgaggacagaatttgtctacggtcgtggggtcagtccatatcgccataagcttgtttggcttttctggtatgatcgtatgctcggagcgtctcttgatgactggctggagaaccttaagaaaatgaatgacgaagagttttgcttttggctgttgcagcgtcaggaagaaaacccagagttaacccatttgatggatgagtatgtgaacttcacatacgactaa

SEQ ID NO: 445158 - DNA, 441 bp, Serratia marcescens
atgtctgattctcagcaaatatcaccgtcgcaggaggcgattattcagattatccgggataaccggaaggcatttagcgaaatactggggttaccgcaactgaattcatgccgccagcaatcgatgatgaagggaaattatggccttggggactgggatgacacccatgtgtggatcgaacccggctataaccccgagctgcgggtctcattggcatcgtattattcagcttatttgcaggacgagttgaaagggttttgggtgccaatttatgccccggatggtaacttgctggtatggcttaaattcagtcatacgagcaaaattcatggggcatttcactttgctgcgtcggagatccgtttgccgaatgacggggcccccgaattgagtgagctggtaacattcggccttgcttaccctacggcaactaagccctag

SEQ ID NO: 445159 - DNA, 1023 bp, Serratia marcescens
atgaatggtactgtaacaaaaggagccgcggagaaattagcgaggatgggcgggataccttttggttatcttttcttggaacacccccccaaggaaactaaaatagatattcctgaccttaggcaggcgcctgattccattgcattatctagagatttcattgatacttataaagacataaaatataaaattgactggtataaagactatcttaatgagtttggttatgacgttccaaaagattttatcggaaaattcagcataaactctgatgttagtgatgttgctaataatattgctaaaacgataggttttgatttaaaaaacactctccctagagtaagtaaagagtcttattttggtgtcgtcagtacactggttgaaaatgttggcgttttagtattcaagaatggaatagttaaaagtaatacgaaaagacagttgaatactagtgagttcagggggttttgtataattgaccctgtggctccttccgtttttattaatggtgctgatgctttctctgcgcaaactttcacacttttccatgaggtagcccatttatggatagggaaagagggtgtgtctaattgggactttgagaacaagatagagtctttctgcaacaaagttgcggcagagatattaatgccaacaaagtattttattgaaaaatggaatggtgaggtgggtaatggtttagatgatgtgtacgtaaataataatgtttccaagtattttagggttagtgcttatgcttctgcaataaaagcaaagaatttagggcttattgatgacgattcttttttgtttataaaagacattagcggaaaggttaagaaaaaagacaataacggggcaaatccttatgctgtatatccatataggaatagccctaaaattactgatgcgatactttcctccgctataacacagtctcttcctatcagagaggctgctaatatgctaaatataaaagcaggtactgtcatggagctttataggaagaggaatgcaagatga

SEQ ID NO: 445160 - DNA, 510 bp, Serratia marcescens
atgatacctaaacgcttcttgattgatagcaacgtttttattaacgcaaaatattttcattacaactttaattactgcaagattttttgggactatcttttagcattgcacatcaaaggtgtggtgtattcaattgattctgttagaaaagaactgttagctaagacggatgaattatctgaatgggtaataaaagaaaccccgcaatcattttttgaagatgagtctagctcattagctgcgtacggaaccctcatgaattggtctcaaggtttagatgttagcgataaagcaaaagaggattttgctagccaaactaaggctgatgcttttttgatagcgcatgctatgacccatgggtttaacattatcactcatgaaagaccaatggctggagcaaaaaaaagaatcatgattcctaacgcagctgaggcgcatggagttacaacgctaacactttatgagtttttggctgactattcaggtcagaatttttcttgtttaccctga

SEQ ID NO: 445161 - DNA, 540 bp, Serratia marcescens
atgagttacaccaatgcagataaactacagttacttatgctatgcgacatatataaaaaattagatattcaaggaggattcaaccctgacattatcagtacagcgatcagtacaggaaacctttgggcgatcgatgctgagtactcaatggtgattggcgaagaaatctcaaaagaggctcgtgataacgtagttggggcattgaactgttaccgctatatcagcgcatctatcgccaagctccctactgcagataaagacgagctggtagctgaattcaagctaaagatccatgataaacacgttcagttccctggctacgatggcaatagcgaaggggaatactcttctgttgctcgtatgtttggggtgcttggcaaattcgctgaacaagtagagatcgacaaaaactctcatgaagagaatcgagacgcttactcagaaatgtccttatatgtccgagacgttgtagaccgtttggctctttccaaaatgcaattaaaagaactgctttcgttagcacctatcttctgggattga

SEQ ID NO: 445162 - DNA, 336 bp, Serratia marcescens
atgcagcgtgctgatcgtcgtgtggaccgctatttcgccgaagacccctcggtggttttagtcattgaggggcaagcccgcccggtagtcgcaatttttgaaagcccggatgatatggccctggtgcagggcggcggtgaaattcaggatcatgcgccagctatcagcgtgtacacggctgacattattggacttgaaaaaaaatgccaggcgttgatcggcgtggccagctattgggtgacgcatatcggtgctgatgaagcgggcagaacgcgggtgaagcttgccagaggcgtccctgggaaagatgtggaccccattaaatggagtaagtaa

SEQ ID NO: 445163 - DNA, 270 bp, Serratia marcescens
atgagcaagcagttttacgagcgccgtaagcgctatttagaagagaagcgccgccgcatggaagagatggaggtcagcaagattgtgctgactcaagagcaaatcaaagagctggcacggttcgcggctgaagacggtcagccgtcatacaccattacgcatggacttattgatgcgtacgaggcggatgatggtaagcacgtgccggagtacaacggcctgatcgcctactcggagtcggaagagcatggcgttctgcagttggcctga

SEQ ID NO: 445164 - DNA, 249 bp, Serratia marcescens
atggctctgagtgatgcgaaggttcgttcggctaagcctgaagaaaaagcctataagcttaccgatggtgacggcatggttttgctggttcatcctaacggctcaaaatactggcggctacgctatcgctttggcggcaaagagaagatgctggcactggggaagtaccctgaaatatcgctggctgatgcaagatcacgtcgtgacgaagcacgtaagcagttagctaacggcgtggacccaagctag

SEQ ID NO: 445165 - DNA, 360 bp, Serratia marcescens
atgagtggaaaccgtgagctgatctttatcggtgatcacgatccacgtaaaccgatgagtgaaaacacggtaaacaaagccctacgcgtgatgggctatgacacaaaggttgaagtctgcggccacggctttagaaccatggcctgtagttcattgattgagtcgggattgtggtcgaaggatgcggtagaacggcagatgagccatcaggagcgtaactctgtgcgtgcggcttatattcataaggccgagcacttaggtgaacgcagtctaacgctgcagtggtgggcagattttctcgatgctaatcgggataatggggtgagtccgtttgattttaggaagctgaacgatgattga

SEQ ID NO: 445166 - DNA, 1299 bp, Serratia marcescens
atgactggaagcaataaacatatgctggtaccacaattgcgtttccctgagtttagaaatgcagaagaatggaccacctataatttgggccaactttcaaaaatagtaacagagagagtgggagatgatgattgtattccatatacaatcacatctggggttggccttattagccaacaggaaaaactaggtagaactattgcaggtaattctttaaaaaattacatactcctacagcataacgattttgcttacaataagagtgcaacaaaagcatacccgcaaggatatattgcatgttaccagggacacgagcgagctgctgttcccaacagtattttcacttgttttcgccctgccctaaacttagtcataccagcttttttggataatctttttattgccaacctacatgggaaatggctaaagaatcgcgttgctgttggtgcacgtgctaatggtgcattgcaaatcaataatgatgacttaatgaaagtacccgtaccattaccaactggttcgcagtcgctttccgaacaaaaaaaaatcgccgactgcctgtcttcgctggatgacctgctcacagcagaagtccagaaactggatactttgaagaaatataagcaaggtttgatgcagcaactttttccccgcgaaggcgaaagcgtaccacgattacggtttcctgagtttcaaagcgagggagaatgggtatatgaaaagatcggtgattgccttgagaaagtgattgattatagagggaaagcaccacctaaggcagaatctggtgtgcaactaattacggcaaagaatgtaaggtttggctggctcgatatgagctgcaatgaatatatttcagctgatgaatacgaaagctggatgtcaaaagggattccgagggtgggggacattcttttcaccactgaagcccctctgggaaatgttgcgttcttcccttgtactggaaaatttgcgttgggacagaggataattactctaagaacgaaacctaagaaatgtctcgcggagtttctgttccaagctctgcttactcccgatatgcagaaaaagattgattttcacagtactggttcgacggccaaaggtataaagtccaaagtgtttgttaatcttagtttttgttaccctaaaatttcggaacaacaaaaaatcgctgaagttctgtcatctcttgataattttatcgcagcccaaagccagaagcttgacgttctcaaaaaccataaaaagggtttgatgcagcaacttttccccgtgtttgatgagattttagcatga

SEQ ID NO: 445167 - DNA, 246 bp, Serratia marcescens; identical to SEQ ID NO: 445121

SEQ ID NO: 445168 - DNA, 246 bp, Serratia marcescens; identical to SEQ ID NO: 445121

SEQ ID NO: 445169 - DNA, 318 bp, Serratia marcescens
atgaaagcactacagatacccgtcaagctgcatttcttgttaaacacaaaatcttacggtgataaatacaccgtcagcaccgcagacttatcccttcacatccccgattacgttctgctcgaaactcgcgatgcatcatttgagttttcagagccggaaccgatcgagattatcggcaaacaggttgacgccctacgcgccaagaaagagcagatcgccgctgagtcgatgaagcaacagcgcatcattgaagaccagatccagcagctgctttgcatcgatcacacccacatcgacgctgacgaaatcccattctga

SEQ ID NO: 445170 - DNA, 261 bp, Serratia marcescens
atgagcaagctgaaaatcgtcaagtttggcgatgagcgcggagtgggcgcagtagttgaggtaatcaacttcttcggcatcgttcgcacctggacgctggtgccagataaatattccgacggtagcatccgtgaaagctggactgccgacaagtgggtatgccgtgaaaccggtcgctgggaatggcgagactgctgttacgtttgccgtttctacgcggctcaattcaacacaagttccagaggtgcagatggacaataa

SEQ ID NO: 445171 - DNA, 5976 bp, Serratia marcescens
atggatttattaaggtttatcctgcgtttgccttttaccctggttaagggcgtttgccgcctgctggtcgggattttgtcgctgttggggcggttgctgagaccgctggtcggcaacctcagctggcgtgcgccggcctggtgggctgcgctgccgcgcggttttttgcggctcgaaagcggcgtggataaacacccgaaagcgattggtctaggcctgctgctgttggcgggcgccgcaggcggcgcgttttacggctggcactggtggcaaaaccggccccagcccatcgaaccggcgccgatggcggttcaggagatcagcgccgagttggccaaccccgagccgatagactacgccgccgcccggcaggcgccgcaaacggtgagcctgaccttcagcggctcggccgcggcgataagcgcggtgggtaaaaccgtgagcgccggcatcatcctcaaaccggctgcggaagggcagtgggcgtggcgcaatgagtcgacgctggtgttcacgccgaaaaaaccgctgccgatgggcgcgaaatatgacgtaaccctcgagcccgccaccttgctggcgccgcaggtcaagctcgccaaaacccgctatgccttcaccgtgcccgcgttcgattaccgcctggggcaggccgagtattaccgcgatccgcaagatgcgcagaaacgcagcgcgattttcaatttgcagttcaatgcgccggtcgacgtcgccagctttgaaaaacagatttcgctgggattgaaggagggcagcgcttcctccgagaaaaagctgaacttctccctggtctatgacgagaaaaaactgaacgcctgggtgcattccgagccgctgcaggcgctggatcagggcggtgctgtgcatctgaccgtcggcaaaggcgttaaatcgacggcggccggcaatgcggtcgctgaggcgaaaagcaactgggtcaaagtaccgacgctgtacagcctggcgctgagcgacgccagcgcccaggtggtggataccgacggcggccaagggcagcgtgcgctggtggtcggcttcagcgatgcggtgaaggataaagagctggcgcgggccaccaaagcctggctgctgccgcagcacgatccgagcgatgccgagaccgccaacgatgccgaagatttctatcaatggacggtcgacagcgtcggcaaaaacgtgctggcgcaggcgacgccactgccgctgacgcttaacgaggcggaagaggcctaccagccgcagttcagcttccgtttcgaagccccggcgcaccgcttcgtgctgatcgagatagacaaccagctggtctccgtcggcggttacaaaatgccgaagaaggtttaccgggtggtcgaagtgccggagttcccgaaatcgctgcagttcatgtccgcaggctcgctgctgtcggtcaacggcgacaaacagatcagcgtggcggcgcgcaacgtggcgggcctgcggctggacatcaagcgggtgatcccgagccagctgcagcacatcgtctccttcaaaagccgggaatactcgtcaacggaattcaaccggctcaacgacgaatatttcaccgagcatttcaaataccagacggcgctcaacaacgagcggccgggggaagtgaactatcagggcatcgatctctcccgttatctctccaccaacgccagttcccatcgcggagtattcctgctgacgctgtccgaatggcagccgaaccggaaaccggcgacggaagaggcgggcgccgagccagaacaggaaccggacgagagcaccggggaagatcagcccgacgtcggcgattcgcgctttgtggtggtgaccgatctgggcatcgtcgccaagagctcgcaggataagacgcgcgacgtctttgtgcagtcaattcaaagcggcgcgccggtcagcggcgccaacgtgtcggtggtggccaaaaatggcgtgacgctgctcagccaaatcaccggagccgacggccacgtgcgtttcccggcgctcgacgtgtacaccaacgagcgccagccggtgatgttcctggtggaaaaggagggggatgtctccttcctgccgaccggcagctataacgatcgcgggctggacttctcgcgcttcgacgtcgccggtgaacaaacgccgaccgatccgcgcacgctcagcagttacctgttctccgatcgcggcgtttatcggccgggggatacctttaacatcggcctgatcacccgcgccgccgactggggcgttggcctggccggcgtgccggtgcgcgccgaaatccgcgatccgcgcgacaagctgatgaccaccgtgccgctgatgctgggcgccagcggtttcaacgagctgagctataccaccgatgaaaactcgcctaccggcgagtggaacgtctatctgtatctgatcggcaaaaacaacgatacctccacgctgctcggccataccgcggtcaatgtgaaggagttcgaaccggatcagctgaaagtgaagctggcgctgatgccgaaccgccagcaaggctgggtcaaaccgtccgagctgaaggccagcatcgatgtgcagaacctgttcggcaccccggcgcaggatcgccgcgtgagcaccaggctgacgctgcggccgatgtatccgagcttcgatcgcttcccggattatgcgttctatgaaaatcggcaaaacagcgacgggttcgaaaccgagctggaagatcgcaccaccgatgagcacggcgcggctgaaataccgctcgatctgaaatcctacgccgacgccacttatcagctgcagctgctgtcggaggcgttcgtcgccggcggtgggcgctcggtggcggcgaccgcccgcacgctggtttcgccttacgattacctgatcggggtgaaggcggacggcgatctgggctacatcaaccgcgacgcggagcggcatctgaacgtgatcgccatcgatccggacctgaaacagatcgccatgccgaacctgaagcaggtattgatcgagcagaaatacatttcggtgctgaccaaacaggattcgggcgtttacaaataccagtcgaagatgaaggaagtgcagctgtcggaacagccgctggcgctgagcgggcagggcgcggatctgcggctggcgaccgataagccgggcgacttcgtgctggtgattgaagatgcgcagggcaaaacgctcaaccgcgtcgcctacagcgtggccggcaacgccaacctgagccgttcgctggatcgcaacgccgaactgaagctgaaactgaaccaggcggaataccagccgggcgaagagatcgaggtggcgatcaacgcgccttataccggcagcggcttgatcaccatcgagaaggacagggtttacgcctggcagtggttccacaccgacaccaccagctcggtgcagaagatccgcgtgccggccggcatggagggcaacggctacatcaacgtgcagttcgtgcgcgatatcaactccagcgagatcttcatgagcccgctgagctatggcgtgatgccgttcaagatcagcaccaaggcgcggcaaaacagcctcgaggtgacggcgccggaggtcatcaagccgggtgaaaacctgacgatgaccgtcaagaccgacgcgccgcagcaggtggcgctgttcgccgtcgatgagggcattctgcaggtggcgcgctaccgcctgaaggatccgctggagttcttcttcagcaagcgcgaactgaacgtgagcagctcgcagatcctcgatctgatcctgccggagttcagcaagctgatggcgctgaccgcggcgccgggcggcgatgcgggcgaggggctggatcttaacctcaacccgttcaagcgtaagcgcgataagccggtggcctattggtccggcattaccgaggtcagcggcgagaagcagttcgtttacccggtgccggactacttcaacggcaagatccgcgtgatggcgatttcggtgaccccggagaaaatcggcaaggcgcaaaccgccgccacggtgcgcgacaatttcatcatgacgccgaacgtgccggcgatggtggcgccgggtgacgagttcgacgtcagcgtgggcgtcagcaacaacctcgacgggctgaacggccagtcggtggccatcaacgttctgttgacgccgccgccgcagttggaggtggtgggcaacgcgacgcaaagcctgacgctggcggaaaaacgcgaaggcgtgatcgctttccgcctgcgcgccaaagccgtgctgggcgatgcgccgctggtgttcgacgcccgttacggcgaccaggccagccgccgcactgtcagcacctcggtgcggccggcggcgccgtaccgtacccagtcggtgatggggcgcatgagcggcggcagtcagaacgtcgatggcctgcgccagatgtttgacgctttcgcgcagcgccgggcggcggtgtcgaattcgccgctggtgctgaccagcgggctggcgcaatacctggcggattacccgtattactgttccgagcagatcgtcagccgctcaattccgctgatgctgcagagccgccaccccgagatgaaaagcagcctgagccaggcggaagtcagcaagcagctgcgcaacctgcttggcgtgctgcgcgcgcgccagaacgacagcggagcgatcggcgcctggcgttcgtcgccggatgccgatcctttcgtcacgccttacgtagtgcagtatctgctcgaagccaaagcggcgggctacgccctgccggaaggcatgctggacgaggccaacggcgcgttgcgcgagctggcggccagcggattcgacgatctgtatctgctgcgcctgcgcagctgggcggtttacctgctgacgctgcagggtgaagtgaccaccaactcgctggcggcggtgcaggatacgctgcaaaaacgctatggcgaagggtggaaaaccgatctgagcgcgctgtatctggcttcttcctatcggttgttgaagatggacgacgaagccgccgcgctgttgcaaccgagctggcagcagctgagcaaggcgtatgacagcgcctggtggacgcagaactatttcgatccgctggtgcaggatgcgacgcggctgtatctgattacccgtcacttcccggagaaggtggcgtcgatcccgccgcaggtgctggagaatatggtcaaggcgctgaaagaagagcgttacaccacctactcctccgcgatgagcattctggcgctggaaagctattcggcccaggtggcggcgcaatccgccaatgcggatgccttgggcatcgtgcaggtaggcaaaagcggcggcgagccgcagcgcatcagtgagctgcaggggttgttcgttcaggggcagttcaacgccgatgccaccgcggtgcgcttcaccaacggcggcagcgcgccggcctggtatgtggtgacgcaggccggttacgacctgaatgcgccgcaaaaagcgctgtcgcgcggcattgagatcgtccgcgattacaccgacgaacagggcaagccggtgacgcaggtgacgctggggcagaagatcaacgtccatctgaaggtgcgcgccaactcgaaagaggggcagagcaacctggcgatcgtcgatctgctgccgggcgggttcgaagtggtgcagcaaacgccgccggaaccggccgatgccggcgaggagagcgaagaccgcggcggttggcagtcgccgctggccgctaccggctccacctgggcgccggattacagcgatatccgtgaagatcgggtgattatctatggcagcgccggcaccgaggtgcaggagttcgtctatcagatcaaggccaccaataccggcagctttattgttccaccggcctacggcgaagccatgtacgatcgtgaagtacaggcgatgtcggccggcggcggcaagctggtggtggtgccggcgggcaacgactag

SEQ ID NO: 445172 - DNA, 1323 bp, Serratia marcescens
atggcaactttaagtcagcgttattctgcaaaagaaagcatcggttcggatatcactactcgcaaaacgtttctggttccactcagtgaaatttatgctgaagacggctataacgttcgcgaattaaatcaggcgcacgttgaagagtttagggatgcgtttattgcgggggaatatataccaccgctggcagttgaagtgactgagcaaggcgtgaaggttatcgacggccaccaccgcttccacggtgcgcttttggcaagtgaagctggccatgaggtaatgcgtcttgagtgtaaggattttgtgggtactgaggccgataaaatcgccttcatggtcaccagttcgcaaggtcttgcacttacccctatcgaacgtggcgcggcctatcagcggctggtaaatcagggctggactaacgcggagatcgcaaagaaagttaaacgctccgagtccgatatcctccagcacctgcaattgcaggaatgtagcccatacataaagagcctggtgcgatctggttccattaactatgccctggctattcaaattaaccgtgagcatggcgtatacgccgaccgtgaagccgcgcgcttaatgaaaaaggccgaggatgcaggtaagacaaaaatcaccaagagcgtcgctcagccacaatttagcgccaagaaagcccggcgattgcttgagctgctgtttgatgctgtgccaatcgttcaaggcgatacagattcgctgatgttggctaaaggcgttaaggacgaggtcatgaagataattaatgattatcgccatgaaaatacacctgccaccactagcagcaccaccactacaaatgaaacagctctacctgataatgagcagctccctttgcttaaggccgacattatcagtcagagtggtatacaggtatgggcatgtgcagcagcagcctttggcgataaagatgaattcctattccaagaatcgaagtttgctcacacttgggcggcagattctttcgaacatcctgaagccgttattgtcccaacagaggtaatttataaggccaaagcgctgataacccaacatcaggaagctcaagagcttcgcacctggctgagtaacaaattcgataatgctgacgtgatcgactcaatgtatgagcggttatatgacgtttcaactgagactataggtgaccaggaaaactcagtgatgaatatgaaagattttatttcccttgtagaaaacatccaatgtgataaatgggaaaacatcagggtgctgcgggctgagatcaaatctattattgaaatgaacaccaccagcgatgagtaa

SEQ ID NO: 445173 - DNA, 189 bp, Serratia marcescens
atggcgaaagttatttttaaagataccggcattgaagaagaacatgagatcgactttgaggttcgtgcgggacaaacaataacacttattcgtgatggtgtgaggaaaaaatatattgtcgataatgtctctgggcctatttatgaaaacacatgtcaccccacccgtattgaagtcaaagaagcttaa

SEQ ID NO: 445174 - DNA, 246 bp, Serratia marcescens; identical to SEQ ID NO: 445121

SEQ ID NO: 445175 - DNA, 450 bp, Serratia marcescens
atgacgataacaatcgagttaccagataccaatgaacaacgcctgattttgcttcgtgatggtgtcgaacgtgggtgcaaagcactgctaaataacctcaatgctccgcgctatggatctgtgcccgatttcaacgcggccatatacggtgagaaacatttactgacagagaacgagggatggcaagcaccggcaccggaacttatccgtgcgtggttcgggcaatttcagacagtgttcactgagtacgacagtgaagataaactggccgcgttattaggtttacacggtaaacaagccggacgccgtatacgcgctttcaaaagcggcgaaatgcctattccatatggaatctggcgacattttttggtgctaactggccgtgcgagccaagaaattattccggtattaggtatcttcgacatgacacctaaaaacggccaccaatga

SEQ ID NO: 445176 - DNA, 276 bp, Serratia marcescens
atgagtcagcatagactaaccggattaactcccggtgggaaagttgacgttctgctaggttgggacagtccaatgtcatggttttttttggtgatcgagccagaaagcgacgaacctctgtattccaacctctacgaacagcacccggagtcacttgatttggcacactttcagaaggtgcttgagcgattcgggataaaaaatatcaacttgtcacccggccatgaatccggcctttatgagctactgcaatcagaccgagttgcaaacaaataa

SEQ ID NO: 445177 - DNA, 252 bp, Serratia marcescens
atgaaaaataaacaatctatcttcgatgccgctctcaatattggaaatgaagcgcctctacaggttaatactgaaaagaataatgcagcaccggcacaacgtacagtgcgtacaaaaacactgaaagcgatcccaacaacatattttgacgcccatcagaagctgcgggatacgaacaaaacaaatctggatttctccaattacattatggaagcattacgcgaaaagttggagagggaaggggggatctag

SEQ ID NO: 445178 - DNA, 744 bp, Serratia marcescens
atgggatttcccaaggaaacactaaagatttactttgcataccttaaggatttatgtaatatagccaaaggaatcactaaacaggggtgcgtaacaatggctatatatgcaatttcgatctcaaaaggcggggttggaaaaactacatcaggtgtacatatcattgatgaaattaatccagatgtagtgttcgatctggatttacataacagcctgagcgtaatcaacagactgcgcccggacgataaaaaatggccgatagtgaccgtttcagataaagcggaattattggcacatcttaagaaagtagatgaggaagggaaaacggctgttatcgactgcggcgggtttgatgctgatattaaccgcgttgcgatagccgttgctgacgtgataatcgttccggccaatgacgatgttactgagcaaatcggtttggctaccttcgataccgttctggctgaaatctcaaagcagacgggcagagatatacaggctcacgttttgatgtgtaaaacgcaacctaaccagaaacacttcccggacatggatgacaccatgaagaaagttcagcacatgacgttactgaacgggagactgtcataccgtaaaggccgctatggatttacagactcactacgaaaaggaatgggagtgacacaaattaagcatggacgtagttcacaagcagggcgagaagttatcgaactggtaaaagagttacgggctttagctgaaagctga

SEQ ID NO: 445179 - DNA, 444 bp, Serratia marcescens
atgaatctttccacaaacaccccaacctgttacggcgaagccgatacacgtaaattcctggccgaactgttagaggacactgagcatcgcagcaaagttgttatgctccagtttcttatacagtcgttctatgaaattcgtgttcctgctactgcaatccccgatgttcaggcatgggggctaaagcatctggcaggtaaaggtttttatctgtaccccttggtagaaaaagtctatctggtcagattcgataacttctctatatcgctggataaccagcaactggggctaggcgtaacactcgacgttttgtcgctcgttgtgggtgaatcaagtgagccagcaatctatcaggcatacaaggagctgagggaatacatcctctctcatgccgatacgctagagggcgcgtatacctacgctaaactctctcactctatctaa

SEQ ID NO: 445180 - DNA, 768 bp, Serratia marcescens
ttgaccacattaccccgcgaaatcttgcagaattcacgtagcgtcgtttcggtgcataacgtcccccctgctgtgccggtaggaatggattacacgctggcttatgccctgcgccagctcgcggccgccacgacaggatacccgcgctatctgcttgccccggaagtggccgtgttactcgatgccgttgcagacctgcgccagcgcatgttgtttgaccttatctggaacaccggcgcacggatcaatgaagcgctggccgtcaccccggaagatattgttctcgatgccgcaaggccgttcgtggtactgcacaccctcaagcagcgccagcagccgcgccccggacggccacgcaaaaatcagccggtaaaacgggctgtaccactgctagatgaagcctttacggtaagattgcgtgaccatctggcgacatttacacgccaccggactaaaccggtatgggggatcacggacgacaccgcccggaactggatgaatatcgcactggatgaatgccagcagcgcggaatacgcttctccattccggggatcacccccaaaacactgagacatagctttgctatgcatctggcgatgcatggtgcgcttcccgctacgttacaggcatatatgggacaccgggattttaagagcacacaacactacctgagggtgtttgccctcgatgtggggataggccggaaccggggaatacagtttacattcccgccagatccggccatgctttcgatgttgacaccataa

SEQ ID NO: 445181 - DNA, 390 bp, Serratia marcescens
atgttcgatcagattaccgatggagtgcattttgtaacggcgctgatcttatcagtaattatttgggggttatgtcttgccgtggcgtggttttaccatttcagtgaggcgcggcgttactcatggcataataactcattggctgattttatggatctgataccaaattggttgatgaacactgttcttgttgcatggtttattgtggggacgtttcccatgctgaactacgtggccgataaagcgcagttcggtggtgttgtaggccgcgctcgcgagctaaacatgttcgatgatcgcccgtggtatggtgttggcggttatcagttcctgattgttgtggtgattctgatagtggggtacctgattaactggtatcgaaacaagtga

SEQ ID NO: 445182 - DNA, 192 bp, Serratia marcescens
atggctgaacccttcctgaaaaaccgccgccgcttcacgtcatcgctcgacaatcatctcgtaccgctgttcgacgagctggccgccaaaactcgcatccctaaaagccgactactggacgaggccataagcgatttactgctgaagcacggcgttccgcccacaaaaaaggacgagaagaacgataactaa

SEQ ID NO: 445183 - DNA, 249 bp, Serratia marcescens; identical to SEQ ID NO: 94076

SEQ ID NO: 445184 - DNA, 369 bp, Serratia marcescens; identical to SEQ ID NO: 94074

SEQ ID NO: 445185 - DNA, 591 bp, Serratia marcescens; identical to SEQ ID NO: 94072

SEQ ID NO: 445186 - DNA, 828 bp, Serratia marcescens; identical to SEQ ID NO: 94071

SEQ ID NO: 445187 - DNA, 1986 bp, Serratia marcescens
atgaattttgacggagtgggtttcttaaggtgggtgtacgatcatgcctatccggggcttacttatctgtttcttttgatactggccgtgctaatacagttcacattcagcggtcatgtaactaagaaatcagacctaagtgtaatggatcacattattagttatctgcgcgtaaagttactcgtattttatgttttgattgttctaatgttcaatggctttgtacttcttgtttcgctgaacgttttcggtaaagacgatggtttagagtacttaggattgatatacagaaatgtgttaaaccaagtattaaacgtcagttccgtcatatcattaatcactgtattcttagttccatatttaattcatctagtttataggcgatttataacacctagaatttctgcttggaaacgtaaatatagggtatcgcaaactggagatagccttagtgatattcgcgttgaaaaggataaatacgcaagtaagacctttgacaatcggaaatactataaagatgattttgtatttatgggactcaatccagatgatgaaccaatatatgtatccgatgaagagtttaaatctaaaaatttaaaaatactcggtgcaactcaaacaggaaaaggtgtaattcaacaagttcttattgaccaagcaatctggaaaggttggggtgtttggttttttgaccagaaaccagatgattttatctattcagtaatggtgcaatcttgcaaggattggaataaaccactgccagttattttagatttgactggtgaaagcattggttcatatgcaccattcgaacatggattattaagagaacgcttacagagatttaataaggtttttggtttatccaatacaggtactacagcagatcattataagcaaattaaccgccagataatgacatttttgactaactattgggacggtactttacaacatctagataaacttcttaatggaaaagacaacgcggttcctgatgcaaaaaaagaatggatttttgaaaacacattaaatataagaactaaattagatgagtggaaactgcttccccatttattccctaaaaaaggtgaaggtttcaatattcaaaaggaattagagaatgcttctattgtttatataaaaggtcggcaggacgatgatttaatacgcgaagtttgtacggctttgttaattgaatggaaagattgcatcattagaaaaaaacacacgaaacatatttatgctgctcttgatgaagctaagttttgtatatctgcaactgttgcaagcgcattagcaactatcctttctaaagatgcaaacatgtctcttgcatatcaagagcgtgatgatattaaaaacgttccagaccaaacagtagataaagaagcccttaaaaatcaggttgagactaacactctaataaccctctcgtataaatgttcttttgataccgctgaatgggtcgcaaataatactggtactatcctaaaaagcacaacacgcatggagcaggttgatactgatggattcggtgccgaaaaatggactggtaatagaatgataggatcagaagaagaaaaccttatcaacacaaactctatacttagcctgaataaacgtgttggtgtattcatgaataatgaaggtttagcgcaatatctttttacaagctggataaatgtaaaagaaaaagtatcgttaccttcacgtaatgaggctatcactagacaagaaaagatcataaatcaagaggttacagaaaatcagataaatgaagaaattctttctggtaaaaaacagaacgatattgataatattgatattgaaactgtagagaaggtgcactttaaccctgaggaagatccagaatttgtgaggatgctttctgaaaaagttaagggcgtaaaacctgaaaaaaccgttaaaaatcccgtttcaggtagtgaccttatttctagtattggcaaaaaagaggactaa

SEQ ID NO: 445188 - DNA, 714 bp, Serratia marcescens
ttgaacacatttgatattaacgctcagaagcgtgagaaaattgtcatatggcttgccaagtttggtttctctacacgcgatctgttatcaaaaatgttgagtgttaacgttgacgggcaaggagcattttttaaaaagttagttgagagtggaattacgaaagaggagtacgtacccggaacacgtaagcgagttatcactctgacacctgacggcgttcaacaagcaagaatttatcaacccgatcttgaagtaaaatctctgcgtaagtttccattacatacactcattcatagttatagtatccaatcctttttaactactcagaaaggtgttaaggatttttttagtgaaaccgagttagccaaaagaaaatttattcgcagacctgatctgctaatcgtcaatgatgctggcgttaagatagcgattgaagttgagttaacacagaaggacgttaaccgggtttacttcaacttttatggtcacgttcaggattggcagcaggaaagaatagaccatgtgatttatttgttttcttctccaacggttttagccagatatgaagaactctatcaaaagaatccttggcctaaatttattacaactgatggaaacgttcgacacatgagcagatcgggatctgttgatccctcacacgctcacactcatgggctgatgtattttcataagtttgaatcttacgccttgtag

SEQ ID NO: 445189 - DNA, 1023 bp, Serratia marcescens
atgcagtatccgtttggtcacatccctgatgaagataaaactggtatcaagcgttggaatctaatccacgatgaaatgatgccaatccttggcttgtataagcagtccgacattaccgatatttttgttgaccggtacgacaaaattaatgttatgcgtcgtggagtccttgagaaaactgactgcgcatttaattcagaagaagcgttagtgtcgttgattgaacaactgcgtaaaacactaaatcaggattttggcttaaacgccccgatccttgatgcgcgtctacccgatggtagccgtttgaactgcactcatgtatcagtgacgccgcaaggctcatcaatgtcgctgcgtaaagttccagtgattgctttatcgaaaagtaacttcattgattcggggatgctgacagaggagatgttagcctacctcgttgagatgattgagcagaaagatatattcctgatctccggtaacatgggttctggtaaaacatcgctgctgcgttttctatcagagtacattgataaacgtgaacgactcattacagccgaagatactcaagaattacatatcaatgagcgctttccgtttggtcttgcaatggaagctgcaaagcgtaaagacagccctatagatctcccggctcttatacacgctacgttgcgtcaacaaccagatcgcgtttgggtaggtgaatttcgtgttgccgaagccgtagacgcctttatgcagattatctacacgggcgttcgtggatgtgcagggactatacacggtagtagctgcctgaatgcaatcattcgtatgcagtatcttttagcgtcctcaggtaaggttgattaccatcttacgggtgagctgattcgcggagctatcaacgtcattatacagactcaccgtgatccaaaatggggaagacgtgtaacggaaattggccgtttggttgatggcgaagttaagttgatttttaagttcaataccaaaactggcgagcatgagcgggttgacggtaattag

SEQ ID NO: 445190 - DNA, 354 bp, Serratia marcescens; identical to SEQ ID NO: 94111

SEQ ID NO: 445191 - DNA, 360 bp, Serratia marcescens; identical to SEQ ID NO: 94110

SEQ ID NO: 445192 - DNA, 2580 bp, Serratia marcescens; identical to SEQ ID NO: 94109

SEQ ID NO: 445193 - DNA, 813 bp, Serratia marcescens; identical to SEQ ID NO: 94108

SEQ ID NO: 445194 - DNA, 975 bp, Serratia marcescens
ttgtctaaaaacaagatattgataattttgattggcatttttgctgtatttcctgcgttcgcgcttgataatgcggttacgcagaaaatagatgcaaacattaacgaatatgtaaatgccgtcctttcaagttctggtagtgatatttatgttttcgttatggctgtagcaacatttcttatgtttgtatgcgccgtaggtgaaataattaaattcatatatggacaagctgattgggtggcaatattcacccttataattgtatggtttgtcacaatggcattgattacttcatatggcatggttacggataccgttaaatatgcatttaacgagttggcagacaccttccagtatctgactattggttccaaagacagaatgttcctatctaacttcattgatagggtgattaatcaagctgttcaggctcctgatgttggttttactgacactatttatatgtgggctattactatcatttgggcggtaatttcactgttcctgcaagtggctttctatctttctgatgtttatgtgacattgggtatagcgttagctcaaatgattggcgttctttttattccttttctcattgctccttggactcgtggtatttttgacggttgggtaaggttcatgattggttggggggtttgtggaatagttctccggttaacatgtttactaacaatgttagtgatgaaagcgacaattaacgcagcgggggattttcagaacactggaacggcgctgattaatagtaattatgatgtttcagctccattggttgttacagatgaaaatttagggttgcttatagcaataatagtctttggatttatatcttgcgtgatgatattcagctctttcacttttgcaaaaatgttaagttctggcgttggagacacaggtaaagctgttaacaatacagccaagaaactcgctgctcaggctattaaagcgcttatatag

SEQ ID NO: 445195 - DNA, 726 bp, Serratia marcescens; identical to SEQ ID NO: 94105

SEQ ID NO: 445196 - DNA, 834 bp, Serratia marcescens; identical to SEQ ID NO: 94104

SEQ ID NO: 445197 - DNA, 1374 bp, Serratia marcescens; identical to SEQ ID NO: 94103

SEQ ID NO: 445198 - DNA, 687 bp, Serratia marcescens; identical to SEQ ID NO: 94100

SEQ ID NO: 445199 - DNA, 162 bp, Serratia marcescens
atgcgtatctcctttttgaggacgcacgttgcccaacaggcgcagtgcgccctatgggccaagataggttgctgtttgtttttggcgaccagctatcgcacgttttcgccctcagagaggacaaaattcactttctcagcaaccctcaatgaaggcctctga

SEQ ID NO: 445200 - DNA, 2628 bp, Serratia marcescens
atgagcaagagcaccgctgagatccgtcaagcgtttctcgatttctttcatagtaagggtcatcaggttgtagcgagcagctccctggtgcctaacaatgatccgacattgctgtttaccaatgccggcatgaaccaatttaaggatgttttcctggggctcgacaaacgcgcctattcccgcgccaccacctcgcagcgctgcgtgcgcgcaggcggcaagcataacgacctggaaaacgtcggttataccgcgcgtcaccacaccttctttgaaatgctgggcaacttcagcttcggcgattacttcaagcacgacgcgatcggctacgcatgggaactgctgaccggtgaaaactggttcaacctgccgaaagagcgactgtgggtcaccgtgtatgaaaccgatgacgaagcgttcgacatctggcagaagcaaatcggcgtaccggccgagcgcattatccgcatcggcgacaacaagggcgcgcctttcgcttccgacaacttctggcagatgggcgacactggcccatgcggcccgtgcaccgagattttctacgatcacggcgatcacatctggggcggccctccaggcagcccggaagaagacggcgaccgctacatcgagatctggaacatcgttttcatgcagttcaaccgtcagtccgacggcaccatgctgccgctgccgaaaccttctgtggataccggtatgggtctagagcgcattgcggcggtgttgcagcatgtgaactccaactatgaaatcgatctgttccgtaccctgatcgccgccgtggctaaagtgaccggcgcaaccgatctggacaacaaatccctgcgcgttatcgccgaccacattcgttcctgcgccttcctggtgtcggacggcgtgatcccgtctaacgaaaaccgcggctatgtgctgcgccgtatcattcgtcgcgcgatccgccatggcaacatgctgggcgcgaaagacaccttcttctacaaactggtggcgccgttgatcgaagtgatgggcccggcggccgacgaactgaaacgccagcaatcgctggtggagcaggtgctgaaaaccgaagaagagcagtttgcccgcacgctggagcgtggcctggcgctgttggacgaagagctggccaagctgcagggcgataccctggacggcgaaaccgctttccgtctgtacgatacctacggtttcccgatcgatctgaccgctgacgtctgccgcgagcgcggtttgaaagtcgacgaagcgggctttgaagaagcgatggaagcgcagcgccgccgtgcgcgcgaatccagcggctttggcgccgactataacagcctgatccgcgtggacggcagcagccagttcagcggttacgatcacgacgagcagcaggcgacggtcatcgcgctgttccgcgacggccagccggtcgatcagatcaacgccggcgaagaggcggtggtggtgctggatgagacgccgttctatggcgagtccggcggccaggtcggcgataaaggcgtgctgaaagccgccggcgctgagtttacggtcaacgatacccagaaatacggtcaggctatcggccatcagggcaaactggcgcagggttcgctgaagctgaacgatcgcgtggacgcgcagatcgacgctgagcgtcgtaacagcattcgtctgaaccactccgcaactcacctgctgcacgccgcgctgcgccaaacgttgggcgaccacgtcgcgcagaaaggctcgctggttaacgacaaatacctgcgtttcgacttctcgcacttcgaagcgatgaagccggagcaaatccgcgcggtggaagatctggtgaaccagcaggtgcgtcgtaacctgccggtgcagaccgagctgatggccttggaagatgccaaagagaagggcgcgatggcgctgttcggcgagaagtacgatgacaacgtgcgcgtgctgaccatgggcgacttctccaccgagctgtgcggcggcacccacgccagccgcaccggcgatatcggcctgttccgcattctgagcgagtcgggcaccgcggcgggcatccgccgtattgaagcggtgaccggcgctggcgctatcgctacgctgcatcagcaaagcgatttgttgcaagacgttgctcagttggtcaaaggcgacagtaacaccctgaccgataaagtgcgctcggtgctcgatcgcacgcgcgcgctggaaaaagaactgcagcagttgaaagatcagcaggcggcgcaggagagcgcttcgttgtccagccaggcaaaagtggttaacggcgtgaagctgttggtcagccagttggataatgtcgaagccaaaatgctgcgcaccatggtagatgacctgaaaaatcaattgggttcggccatcatcgtgttggcaacgacggctgatgacaaagtcagtctggttgctggtgtgaccaaggatctgactgaccgcgtgaaagccggcgagttgatcggcaacgtggcgcagcaggtcggcggcaagggcggtggtcgcccggatatggcgatggcgggggggacggatatcaacgccctgccagcggcgttaaacagcgtagaagcctgggtggcctcgaagctgtga

SEQ ID NO: 445201 - DNA, 441 bp, Serratia marcescens
atgtttgataagcctgattttacaagagaaaactttgaagaactattgaggataaataattctttaaggagggaaaatagtaatcttttaagtgatataaaaaagtatcataaagatacggaaaacttccttgttgataaagaaaacttcatcaaagacattgaaatgtttagaggcgaaaataaggagctgaaaaaagagttgttaaataatgagaaaagatcaaaaaataacaacggtgatactaaaatcagaccgccagcattaaatgcaatttatcttcttagcaaagagtgttatccagaatgcgaatttattgcaaaggattttgttaaaaaattagactccctcgcaaaatcacatgatattgtttactcctttcagttaaagactgttgaggcctggtgtacagaattcaaaaaaatggatgctaaacactga

SEQ ID NO: 445202 - DNA, 360 bp, Serratia marcescens
atgcaaaaactactacaaaagatcacgcagggtagcctggtcaaacaaatcatggtcggcctggtggccggcattctgttggcgctggtttcgccggcggcggcctccgccgttggcctgctcggttccctgttcgtcggcgcgctgaaggcggtggcgccggtgctggtgctggtgctggtgatggcctcgatcgccaaccataaacaggggcagaagaccaacattcgcccgatcctgttcctctacctgctgggcaccttcgccgcggcgctggtggcggtcgtcgtcagctttatcttcccttccacactggcgctgagcactgagagatcccctcataatttccccaaagcgtaa

SEQ ID NO: 445203 - DNA, 828 bp, Serratia marcescens; identical to SEQ ID NO: 28366

SEQ ID NO: 445204 - DNA, 387 bp, Serratia marcescens; identical to SEQ ID NO: 158544

SEQ ID NO: 445205 - DNA, 936 bp, Serratia marcescens; identical to SEQ ID NO: 158543

SEQ ID NO: 445206 - DNA, 531 bp, Serratia marcescens; identical to SEQ ID NO: 158545

SEQ ID NO: 445207 - DNA, 1476 bp, Serratia marcescens; identical to SEQ ID NO: 48588

SEQ ID NO: 445208 - DNA, 885 bp, Serratia marcescens; identical to SEQ ID NO: 48589

SEQ ID NO: 445209 - DNA, 531 bp, Serratia marcescens; identical to SEQ ID NO: 158545

SEQ ID NO: 445210 - DNA, 936 bp, Serratia marcescens; identical to SEQ ID NO: 158543

SEQ ID NO: 445211 - DNA, 387 bp, Serratia marcescens; identical to SEQ ID NO: 158544

SEQ ID NO: 445212 - DNA, 240 bp, Serratia marcescens; identical to SEQ ID NO: 94098

SEQ ID NO: 445213 - DNA, 258 bp, Serratia marcescens
atgaaggtgataacacattgcatgagtaagagcgcagatagcccgagcacgatgtttattgaagtggcgctgccgttctatgcgttgatgtgtcttatgatggtaggcaggaaggaaatagaaaccctcccaacgcgatacgtcgcgcttggacaccacattgatcaggcgcttattgaacgctggcaattcgtgtttatggtgtgccggtatctgaaacgcaggattagcgttgagtacatagcaatcacgaactaa

SEQ ID NO: 445214 - DNA, 837 bp, Serratia marcescens
gtgacggtgttcggcattctgaatctcaccgaggactccttcttcgatgagagccggcggctagaccccgccggcgctgtcaccgcggcgatcgaaatgctgcgagtcggatcagacgtcgtggatgtcggaccggccgccagccatccggacgcgaggcctgtatcgccggccgatgagatcagacgtattgcgccgctcttagacgccctgtccgatcagatgcaccgtgtttcaatcgacagcttccaaccggaaacccagcgctatgcgctcaagcgcggcgtgggctacctgaacgatatccaaggatttcctgaccctgcgctctatcccgatattgctgaggcggactgcaggctggtggttatgcactcagcgcagcgggatggcatcgccacccgcaccggtcaccttcgacccgaagacgcgctcgacgagattgtgcggttcttcgaggcgcgggtttccgccttgcgacggagcggggtcgctgccgaccggctcatcctcgatccggggatgggatttttcttgagccccgcaccggaaacatcgctgcacgtgctgtcgaaccttcaaaagctgaagtcggcgttggggcttccgctattggtctcggtgtcgcggaaatccttcttgggcgccaccgttggccttcctgtaaaggatctgggtccagcgagccttgcggcggaacttcacgcgatcggcaatggcgctgactacgtccgcacccacgcgcctggagatctgcgaagcgcaatcaccatctcggaaaccctcgcgaaatttcgcagtcgcgacgccagagaccgagggttagatcatgcctag

SEQ ID NO: 445215 - DNA, 186 bp, Serratia marcescens; identical to SEQ ID NO: 424745

SEQ ID NO: 445216 - DNA, 246 bp, Serratia marcescens; identical to SEQ ID NO: 445121

SEQ ID NO: 445217 - DNA, 1032 bp, Serratia marcescens
atgtcctctaatattgttatctctgcgcaaaatctgcgtaaagtttatcagatttattccagcccgatgcagcgcctgggagccttgctggggtatcggggggctaagggtagggagtttgtcgctctggattccgttaatttcgagattagaaaaggtgaaacagtcggtattattggtgtcaatggttccggtaaatcaactctgttgcaaatgatctgtggaactttggcgcctacaagcggcagcgtatttactaaagggcgtattgcaccgtttttagcctttgccactgccattcatgtcgatcctgaaatattaatcgtagatgaaattcttgctgttggagattcacgctttcagcgaaaatgtgtaaagaagtttaatgaaatcagaaatgatggatgtacaatcctgttcgtttcgcacgatgattatcaggttcgaaatatctgtaatagtgcactataccttgaaaaaggtgtacagcgttattttggaaatgcagatgttgctgttcagcattacctttctgatatgcagaagagtgtgatggagactcaagatgccgaaaataaagctattgaaaatgaaataagtagcagattgataaaaatagctaatgtatctcttctcgatcggactgggaattcagtaaccgagctggctagcggtgacaatgttaaactgtctttcgattacaaatatgaaggaagtgacggggaattcgatgggctgacctttgtctttaatctttaccgtaaagatggggtatatatctgtgggacgactacagcaatgcgtggcttagaaccattttccctaagtcgggaaggacgagtgactattgattttcccgcattgaagttgttgtcaggtatttataactggcgagtcgctgtcaatgatcaagatggtatacagataattaacgaagctgtaccggtctgtgagttttctgtagccgataacttcagtgccgttggaatttatgatattgaacatagctggtctgtggtggccaaggggtaa

SEQ ID NO: 445218 - DNA, 717 bp, Serratia marcescens
  misc_feature (672)..(681): n is a, c, g, or t
atggttcctggtgctaagcctggtacggaaaaacaaggtgatttcttcggtaaacttgctcgcatgatttcccgcctagaaaataaaatctacgataggcgtttaggtttcatgtttaatggtggtaatgatattctggatttctgctggcttgacagttttgctaatgccgtactcggtagtgctgaggagaatggcaaggctggaataaaaattatagatttttcagaagttccatcggatgttttgccattgattgtttctctggtcgctcgtgtcaccttttcaattcagcaatggactccatcaacgttgcgtcatccaattgctctcctatgcgatgaagcccatctatacatgccccagcgcaatatggcagattcagcggatgacatttccctagatatttttgagcgaattgcaaaagaagggcgtaaatatggggttagccttgtggtaataagccagagaccttcagaagtgaataagacaatgcttagccaatgtagcaatttcgtatccatgaggttgaccaactctgaagatcaaggggttattaagagattactaccagatagtcttgggggatttagcgatatacttcctactttagataccggtgaggctttggttgttggcgatgctagcttgcttcctagtaggattaggatnnnnnnnnnngccagtcaaggagcaccgtttatcagttgcccttga

SEQ ID NO: 445219 - DNA, 996 bp, Serratia marcescens
atgtcattaccgtcaggcgtttccgcccggccggcgctgcccggcgcgcgtctttttcagggcagcagccagggttacgccatcgccattatcagcgcgatgctgctggcctttaccgccatcatcatccgcgcgctgaccgagtactatcacctgccgaccttcgtgctggcgttctggcgcgcggcgctggtggcgctggtgctgttgccgctgctgttgctggtgaaaccgcagtgggcgcgcctacgccgtaaacaggtggctttctacgcgctttacgggctgttgctggcgctgttcaacagcctgtggacgctgtcggtggcgctgaacggcgcatcggtggcgaccattctgacctactgttcggtgggttttaccgtgttcctcggctgggtgatgtacagcgaacgcctgacgctgcgccaattgctggtgatcgccatcagcctgggcggctgcttcctggtcagcaacggcgacagtatgggggacagccacttcgatctgctggggctgctggtggggatgttgtcgggcatcggctataccctgtataccctcggcgggcgggtggccagcgaacgcggctatccggtgtggaacaccatcctgtacgtgttcggtttttcggcgctgtaccagctggtgttcaacgcggcgctgacggcgttcccgctggcggcgttccacggcatggccggctctctgtggttcctgtcgcacggtgcgcagggcattcaatggagcggctggctgttgctgctggcgttggccgccgggccgacgctgctaggcttcgggctgtacaatatcagcctgaaaacgctgccgctggcggtggccaacctgatcctgtcgctggagctggtgttcaccgcggtgatcgcctatttcctgctgggggagagcatgaatcagctgcagctgctgggcagcgcgctggtgatgggcggggtgctgctgttgaaaagcaagaccgccgaggcgtga

SEQ ID NO: 445220 - DNA, 141 bp, Serratia marcescens
atggttaacttgcaatcttttcagctgatcaatattttccacatctacgataacatttgtcgtatcaacggaagtaacacttccaagtgcgtcttcatctttaaaattgaaaatagacataccttcttcctacatgattag

SEQ ID NO: 445221 - DNA, 183 bp, Serratia marcescens
atgaagatcaaatacaattgcatttgccgtcgtaagaccagacatctgttcaataattttagctgtcgtccaagacttgccggaacctgtactgcctccgatgaatgcatgccgttggaaaaatttatttccattgagataagcaacagcctgttcgtcaagcgtatatttaccaagtgttag

SEQ ID NO: 445222 - DNA, 138 bp, Serratia marcescens
atgtcaaattatcattttttcctgctggtgtcatctgagtttggtcagcgcagtgaaaatgatgcggcggccaaaaaagtgttatatgatattggttatcattatcacttaaggaggttgtcatgctcactgccatga

SEQ ID NO: 445223 - DNA, 339 bp, Serratia marcescens
atgcatatacacacatacagagaaaacacttactttatgtggagtgagcttttagttataagtcagtgtaaaatcggccactgcctggaattcaccttcagtaatagacgcggaagaagcggtatcgccctgcatgtaggcagcgaaactcagcgtgttgttaccgtcctgcaatacttgctctttcgttggctcgcccagtttgatgatttcaccatcagcctgagtgatagctacgctggcgcctttagccgtgccggtaatccccagcaggccatttttagccgcagattccatacccgtaaaggttacctgcaccttatttttggtggcaggtga

SEQ ID NO: 445224 - DNA, 165 bp, Serratia marcescens
atggctaagcgtaagagcaacagagcggcgcggcaactatttggcatgaggcgctggattagcaatcgcatgttttttagtggcgaaaaatcattcttaacctattggcgaatcatgccatcaaaaggcgcgcgtcgggccgaggcccaggagaaagcattatga

SEQ ID NO: 445225 - DNA, 612 bp, Serratia marcescens
  misc_feature (130)..(139): n is a, c, g, or t
atgccattagccgtgaggcagcgcagcagatatgcgaaaaatacgggtattcgctcgattggttacttaatggaattggtcagccaaaggttgtccaggcaggtcaaggttcaaccattaatccagatcnnnnnnnnnnatccagatcaggaaggggtgggcgtcgaggtgtgggatgaagatacccccatgggtgaggatgatgtttatattccctacttcaagagcatcgaactagccgcaggggctggtagctcgaacaatgaagactataacgattacaaacttcggttttcaaaagcgactctaaggcgctatggcgcagagccttgcaacgtggtcagcttccctgttcatggtccaagcatggatccagtaattcctcataaatctacggttacagtggataccggaaacaaaaaaatagtcgatggtggtatttatgccatagaacaagacgagctttttcgggtcaagctcctttatcgccttcccggtaggcgcttaagcatcaggagctacaacaaggaagaattccctgacgaagaagatagcttggataacgtaaaaattattggccgcgtgattaactggtcagttatggcttggtag

SEQ ID NO: 445226 - DNA, 162 bp, Serratia marcescens
atgagattagtgtgtactcatttaaacttcatgcaggaaacccttaccagccacatatatcagaaagttatagcggtgatatttatattagctacttatattatgggaataattcttactacgaccgcaggcgtcaggaatacagaaaatatttatcattaa

SEQ ID NO: 445227 - DNA, 225 bp, Serratia marcescens
atggtggtaaacaagcaaatcgttaagatttatctcttcactcataggtcatccttattcagtttcgctaaagcgccatttctggtgacgctcaagaaccattccgagcgattttgctttccggtcggctttcaaaaagtcgggaatacgttctccgtcagggaactcccaacagataccgacaagacgcacgacagggcaaatttcattgcgtttttccattga

SEQ ID NO: 445228 - DNA, 315 bp, Serratia marcescens
atgtcaacaggcactctcaccctaacgaataattccgcaatagtaaaaggtatcggaacggcctttaataccgaattaaaatccggtgatttcatcgtgagcgtcgtcggtggcgtcacctatacgttaccggtgaaaaccgttgataacgccacgcaggccacgctgattaaagcctatgatggcccaacgcaggcgggcgcagcatggtatgccgttccgcgcgacgcgatgaacaccatcaccgctcagttggccgcagagacggcgaaagcgctacgcgggctgaacctcgataaagccaactggcaatag

SEQ ID NO: 445229 - DNA, 429 bp, Serratia marcescens
  misc_feature (354)..(363): n is a, c, g, or t
atggcaatggacagcacacttctcggggcgttgattggtgcaggggcggcgattgcaggagctatagcaacatccaccatcacctacttttcaaataagtcacatgacaaagaaaaaacattatcaataaaaaaagaatcactctacatttgcttggaagatttaaaaacaaacattcacaacaacgcattaatgtttggcagcatgggcagggatgagaagcccataattaccaaatgccttgacgacgaatatagggacatacttaaaaatataaaaatgcttgttaatatttacttcaaagactttggtagtgaatttgattcaaaaatggatattgccattgagttttannnnnnnnnngttttatacttcatacgcaatacatctaagacaagacacaagaacatcaccattattaataactaa

SEQ ID NO: 445230 - DNA, 768 bp, Serratia marcescens
gtggagtcggctcacggacacctcaaagagcgtatacgacaggccctgctgctgcgcggaaataacgacttcggttccctgaatgagtatcggcagttcgttacacagcaggtgctgcgtcataaccagcgcaatcaggatctggtccgtcaggaactggcacttctgaatcccttccctcagcggcggtgtgctgactacgaggagctgtctgtccgggtcagcagcagtagtaccatcaacgtccgacacgttgtgtacagcgtgccatccagacttatcggacagatgctgaaggttcgtctgtgggatgacagactgagttgttacgttggcagcgatgaagtaatgagctgtcagcgggtccgggccccgaaaggtaaacggcgggcccgcagtatcaacttccggcacgtgatcggtagtcttgtcatgaaacccggggcgttttaccacgccacgctacgtaacgacatcctgccggatgatgaatggcggcaactgtggcagcggatgtgttcacgtcttgcccctcaactggccagtcgcctgatggttaatgccctgaagctggcggcagagcgggaagacatctcagcggtcgctaaggggctgaaccacctgctgctggagccgggagagccggatctgcagaagctgctcaactggctgggcgtgaaagataaacgcccgctgccggacgggaaactggttcagcacagcctgcaaggttatgacagcctgatgcgtaaaggaggcctgcagtga

SEQ ID NO: 445231 - DNA, 765 bp, Serratia marcescens
gtgaccgatatccatacgcttgaaaggttgctcagaaggttacgtctgacgcgcatagccaccgagtggcacagccaggaaaaacgcgcgttggccaaagggtggaccccttcgcgttatctgctgtcactctgtagtgaagaggcgacgcacagggaaagcgaacggctgcggcggtatataaaggatgcgcggttgccagtggggaaaacgctggccgaatatgacttcggccaggtcccagagctgaatgccgcacaggtgcgccagctgtgtgaaacgacggactgggtggacagcggagagaatgtcctgctgttcggtgccagcggtctgggcaagagccaccttgccgcagcgatcgcggacggcgtagtgagccagggctatcgggtccggttctacagcgccggcgagttgctgcaggagctgcgtaaagcccggtcgttgctgaggctgaacgagatgcttctgaagctggatcgctaccgggtgatagtgatagacgacctgggctatgtcaaacgggataacgcggaaacgggcgtgctgttcgaacttatcgcgcaccggtacgaaagaggaagcctgatcatcacaagtaaccatccgttcagcacatggggcagtatcttcgtggacgaaacaatggcagtggcagcggccgacaggctgatccaccacgggtatatcttcgaagttacgggagaaagttacagaaagaaaacatcaaaagcagtcacccagcagtcagctaagaaataa

SEQ ID NO: 445232 - DNA, 468 bp, Serratia marcescens
gtgagcagaattatctccaccaccgtatatacgctggatgaactctccgacgcggcccgtgaaaacgcccgcaactggtatcgcgaacatgcgctgaatgatgactggtatcagaacgtgtttgacgagttctgcggcacctgcaatatcctgggcgtcgaaattaatatgtacagggtacctctcctgtctggcggcagtcgtcagcaccgctgtatctggttcagcggcttttgccatcagggagagggggcctgctttgaaggagattatgcttaccagccgcaggccgtctaccggatccgggaacactaccctgaagacgcagaccttcaccggattgccgatttactgcaagccattcagttgcacaacagcggtcagcttcatgccacgatattagacgtcaactaccttggccggtacgcgtcaactactctggccgcctttgagttatttcttagctga

SEQ ID NO: 445233 - DNA, 486 bp, Serratia marcescens
atgaccgacattatcaaccttaacgaccccctcccgttacaaccacaacctgccggtatctgttcttcacccgcgctgaccgccaccctcgtacccgacgagcagcgcatcggcttctggccgcagcacttcgggcgcataccgcagtggataatcctcgaaccgaccgtcttcgcctggatggaccgcttctgcgcggactacagcgggggtatctggaatttttatacgctcagcaacggcggcgcgtttatggccccggaagctgacgatgacagcagtgagccctggtcgctgttcaacacaatgaacggtaacggcggtgacatgagcgccgaagccgcagggattgccgtctgtctgatgacttacagccaccacgccatgcgcaccgaatgcgatgccatggcggagcactattaccgcctgcgggactacgcgcttaaccacgcagaatgtaacgccatcatgcacatcattgactga

SEQ ID NO: 445234 - DNA, 819 bp, Serratia marcescens
atgcgcttagccagccgttttggtcgcactaaccagatacgccgtgaccgtcccttaacccgtgaagaactcatgcagcatgtccccagcgtcttcagtgaagatcgccacgagtccagaagcgaaaaatacgcttacatccccaccattaccctgctcgacaatcttcagcgtgaaggctttgaaccctttttcgcctgccagtcacgcgtacgcgaccctgaccgccgggagcacaccaaacacctgttacgtctgcgtcgggccgggcagatcaatggccagcaggtaccggagatcattttgctcaactcgcatgatggctccagctcgtatcagatgctgcctgggctgttcagagccatctgcaccaacgggctcgtctgcggacagtcgttcggtgaaattcgcgtaccgcatcgtggcgatgtggccgggaaagtgattgagggggcgtatgaagtgctcggcatttttgaccgggtggaagagaaacgcgatgccatgcagtcgttacacctgccgccaccggcacagcaggcactggcgaacgccgcactgacgtaccgctttggcgaagagcaccatcctgtcacagcaacacagatactggcgccgcgacggcatgaggaccgtcagaacgacctgtggaccgtttataaccgcattcaggaatcgttgctcaaaggtggtctgagcggacgcaccgcacagggaaaacgcacccacacccgcgcgattaacggcatagaaggtgacgtaaaattaaacagggcgctctgggtgatggcggaaagtctgctggagacgctgaagtag

SEQ ID NO: 445235 - DNA, 249 bp, Serratia marcescens
atgcataacactgacagcccgttgctgcccgatgacacgtttacccgcaggcaggccggtgcagtggtaacggcgtatcagaacgtcgccatagaagatgaccaggggacgcattttcggctggtcattcgcgaccacgaggggcagttgatctggcgggcgtggaattttgaagccggtgccggggaatggcttaaccgttatctggagagccacggtatacccaaaaacgcattcaccagagattaa

SEQ ID NO: 445236 - DNA, 222 bp, Serratia marcescens
atgacattactgaaaatcgtgctcaacgccctgcgtcaggtgctgacatggtgcgccagtagccgggcacaacagtttgtggaagaccactttcgtgaagaaggttacgacgaagacagcattgatatcgccagacaagcggcaaccctgctcgcaggagccttaattacggccctgatggagcaggtactgcaactcatcgccatacatctgacccactga

SEQ ID NO: 445237 - DNA, 513 bp, Serratia marcescens
atgaccgacatttcgacactcagccagcgactggcgaccccaacgctgaacttcgtgctgctcaccgtcgccacctgcggcatctggccgctgctctggctgtaccgaaagcagcagattatcagcgacaccaccggttacccggtaagcagcgatatcttcgttatctggctcgccgtctgttttggtctcagtcgacagttcggcgtgatggcctcaccggacctcgccggctacgacacgggcagtgacacgctgctggtactgagcgccatactgtcattcgccaccggcgtgatgtatatcgtctgggcctttaaggccagaaccgcactgcgacaccatgcgctgaacaccttccggtttgacctcagaatgaacgtcttctggaccgtcattttcaacgtcttctacatcacctggtgcatcaacgacatgccccaggcgctggcgaaacaccggattattcatggtcaggcccccgtgcagccaggatcttcgtcaccgcagtaa

SEQ ID NO: 445238 - DNA, 471 bp, Serratia marcescens
atgcgattcatgcacgccatcctgtctgcaggatcactgacctttgccatcacggcacacgcagttcccaatatgtggagcagcggcttcggaatgggcgtcaccgagtacatcatcaccagcccggaaaacgtcatgctgaatctcaactgcaccggcaaccctgacgaccagaatatcttgcaacatcacgtcatgctcaccctgcctgacggcagcggtgccgattcacaggatgagaaaaccgccatcaccgtcgtcacggatgaccagccgttcccgctgccgtcctctctgggctggcgtaacggcgacaacgcctggctgtcgttcattgatgccatcagaaagtccacctcgtttgagatttacgtcaacgacaaaaaggtggggcatttttccccttcagccggaaacgtccacaaggttctggcggatatgcccgaatgcacgacactgaccgccgggtaa

SEQ ID NO: 445239 - DNA, 267 bp, Serratia marcescens
gtgaaacctgtcgcagcccctctgctgctcgtcaccctgctgttgtctgccgcaaccctgagcggctgtggcgacaaaaatgaacgcgagtttatccagggatgcaaatccggcggcggtaccaccgccgtctgcggatgtctctggaatgacctcaaaacgaaatacacgcacggggagctggagaaaatgaaccagcagtacggttacgtccccccgcgtttcatggacaacatgctgagtgccgctcagcagtgcagaaaataa

SEQ ID NO: 445240 - DNA, 726 bp, Serratia marcescens
atgcaacgacccgatgaagaggcccgctacgaccggctggccgtcagattgtcggtcattatcagccggttaatgaccggagaaacactgtcccttcagacgctgtccggtgagtttggtgtatcgatacgcaccctgcgtcgtgacctccatcagcgtctggtccacctcgacattatcggggagaacggcacctatcggctcagtgagagcgccacgcgtgatcactctccgggggccgtttcctttgcccgcagtaccggtatcgcacgcataatcccgtcgcagaaccggcaactgatgcacctgctgatgaatgaaacaggctcctcgccctgctttatctggcacgactcccccccggcatggacgcacgctgacagttttcatcgcctggccgaagccatttgccatcaccgggtggtcagcctgctggtcggcggtgtccgtcacgatgagcaggagccttaccgcctgatttaccggcatcagcactggtatctggtcgtctgctgccgggggagcctccgggtgttccggctggaagaaattatctcggcttcactctcagagcaaaccttccgccgccggagcgaaatcagttcgctcattactgaagagggatttatcagcgcactgccccactttcgctttatcagcgatgtcattcacaccttcagggaacaataccctgagcccccatccagacctaaaggagtcaaatag

SEQ ID NO: 445241 - DNA, 297 bp, Serratia marcescens
atgcattgtccgaattgcggttcgcaaaacatacgactgcgccatgtgggtaaaaagacgggtggggtgattggcgcaacagccggaggccttgccgggcttgaaggagcctccgccggtgcgctgataggttcagtcattccggctatcggtacgatagccggcgggctcattggttttctgtccggcgcctgtgctggcgcggtggcaggctctctggccggagaacaactggacggtaccgtctttgatgaatacagctgcacgcaatgtgagcatatcttcagtgcaccgtaa

SEQ ID NO: 445242 - DNA, 495 bp, Serratia marcescens
gtgactcaccttaaaaaacagatactggaaaatctgaaagaccggtggaaaatcatttacagcaaaccgctgccgttaaaatggctgccgaatgaagaagtcgcggtattatgggcctggaacaacctgcaaaaagttcagcaggagaaagccggtaatatcggcggactctatatgagtttatccgcgcccggattaacgacctggttcacgccactgagtcattctgagcgcaatttagcgctacgtgccgcgctggatttatgggacaatgcgccggatacaaaacggttatttctgctgaatctcaacaaagcctggaaccagcaaaaattacgccagtcccgtactgataaaaaagcacttaacacatacctgaagaacgaaactaaaatgcgactggactttatggctgaacgcagcgggattcgtatcagcgatatgctggaaacgctgattaatgaccattaccgaaaaaccagtggtggtgagtaa

SEQ ID NO: 445243 - DNA, 387 bp, Serratia marcescens
atgaaagcagacgtacagtatgagtttcatcattttggtatcccgttgcaggatggtaatactgcaggcaagttcagtgccagcgcggggatgtataccaccgataattcaggcaagtttcgggtacagtggcatcgtttcactgatgactcgccgctccatccgttgctgaaaaccgttccacacgtggcgtttaaggtcagtagtctggctgaggcgattgcgggcgagacggttatcctggggccttatgaacccatcgatgattaccgggtggccgttattgatgactgcggtgtaccgattgaactgattgagacaacgctcagcgatgaagaactgtggacacgtgcagcgtccggccagggaagcttatatcgcacgtaa

SEQ ID NO: 445244 - DNA, 1827 bp, Serratia marcescens
atgcgactgaaaagtgtggctgttaaaaattttcgctgttatgcgcaagaagtcagcgttgagtttgatgacctgacaacctttgtcggacgcaatgacattggtaaatcgacgatccttgaagcgctggagatcttcttcaataacaacgtggtatcgatcgaaaaaggcgatgcctgtattcacagcggacaggacaacgtggagatcacctgcgagtttaccgatcttcccccttcccttacgctcgactccggcgcggaaaccacgctccaggaagagtttctgctaacggggatcggctcactgaaaatccgtaagatctttaactgcagtaacaaaaagccgactgccgagattttcgtgattgcaaaccaccctgctgctgccggttttcagaatctcctggaactgaaggaaaaagaacttcagaccagggtgaaagaactggggctcgacgtttcgcttaagggaaatcccgggatgcgaaaagccatatgggccgcctcagccgatctgcaactgacggaaacgttgcttcccgtcagcaaagccaaagaagacacaaaacgcatatgggaccaaatcgagagctggttgcccatgtttgcacttttccagagcgacagaagcagccgggattccgacgatgaagtacaaagcccgatgaaagctgccattacggctgcactggcggaagtccaggacgacattgccaggatccagttgagagtccagcaaaaggctgaagagattgcccgaaacacacatgaagcactgaagaccattgaacccggtctggcaagcgaacttacccctgaatttacgcctcccacgccggcaaaatggcaggggctgttctccgttggtctcaacactgacggagggatcccgctgaataaacgtggcagtggcgtccgacgtctggtgctggtgagcttttttaaggctgaagcggaacgacgacttaaatccagcaatcgtcgcagtatcatctacgccattgaagagccagaaacctcacagcatccgaattaccagcggatcctgattgagtcatttaaatcgctgtctctggaaactggctgtcaggttatccttaccacgcacagtccgggctttgctgcagagctaccaggggacagcatccgctttgtatcccgtgattccgctaccgggctgccgaccattcaggccggtgctgatgtttttggcatcgttaccgatacgctgggtgtcacaccagacaaccgggtcagactgctgttctgtgtcgaaggaccgaccgatgtcgccgcctttaaagctctcagcaaagcgttacatgcagaagacaacacccttcctgacctggagagtgatgaacgtgtggcgtttatcgtactgggtgggggaacgctcaagcactgggtgaatgaaaattatctgcgcgccctgaaccgcagggaaattcatatctacgatcgtgatgttcctgcttatgctgaagcggtggatgccgtcaacgcccggggtaacggatgctgggcagctcagacactgaaacatgaagtcgagagttatcttcatcccgatgccattcacgacgcctttggggtaatgatcgccgtcaccgaccatcctgtcgccggtaaggctacccctaaagtatttgcagaagcctattcgcaggctcagcacttcgacggtgtgatgaaagataacgccgccaaagcccgcctggcagaacgggcgttccctttgatgactgccgcccgtatccgcgaacgcgatcctgagggtgaagtcctcggctggatgcgcaggatacgtgacatgatccagtga

SEQ ID NO: 445245 - DNA, 570 bp, Serratia marcescens
atgagttacacctacgagccttactggcagcaacgcatcgccgataccttcgattgcgcacttaacgcttacacccgcgtactggccctgcgcgttgacctccggctgccggatacgccagcggccaccgatgcagcggttatctcccgcttcaccgatgccctgaaagcccgtgttgacgcctattttaaacgtcagcaacgccaggcgaagcgtatctggccgaccacgctgcgttatgtctgggcgcgggagttcggcgaaatcaaagggaagaagcactaccacgcggtgctgttgctgaaccgagatacgtggtgcgggccgggggattaccaggacccggaaacgctcgccggcatgattaaacaggcgtggtgcagcgccctgaaggtggatgcgcaggctcatgccgttctggcccgcttcccgaagcacccggtgtcctggctgacgcgcggtgatgatgctcagttgcaacaggcactggcgcaggccgcttaccttgccaaacgcgaaaccaaagagaccggtgacggtgagcgtaacttcggctgcagccggggctga

SEQ ID NO: 445246 - DNA, 243 bp, Serratia marcescens
atgaccacaccgaatacgaataacgccagcaccgcaacccccacgctgctttgcgcagaagacccgctcatcgatatgacctttattaccacctgcaccggcatgacagacaaatggttttatcagctgattagcgacggcaaattcccgaaaccgattaaattagggcgcagctcccgctggttcaaaagcgatgtggaatcctggatgcgccagcgcattgctgattcccgtggcgcctga

SEQ ID NO: 445247 - DNA, 426 bp, Serratia marcescens
atgatgtatgcaaaatcctttatggccctcgacggcaaggggcgtcttactggggccagaaccgcgcagaccgcgccctgtgaccactatacctgccatctgtgcggcagtgcactgcaataccatcctgaataccagactgcgcatccatggtttgaacaccggcaccacgcgctgacggagaacggccagcagcactgcccgtatgtaaaccccggggtgagggagacccgccatatccggcaactgcaatggtatgtaccggaagcccgtcccctggttttctacgccgactggcactgtcacggttgcagcagtgattaccacggcgagtgttactgcatgacctgccggacgggggagcacagctgtgcgctcaatgatgctgatagccggatagcggaggtgacggcatgcgcatgctga

SEQ ID NO: 445248 - DNA, 468 bp, Serratia marcescens
atgcgcatgctgaagtgttacctggcaaatgaccgcgaagggcattttgtgacagccggggaggccatgagtgcaccaggacagatatggagctgtgcgtcctgtggctgtcgcctgatactgcatgcgcagacgtatggggagccaccgtggtttgagcatgaccagcagaccgtggcccggcatgtactgatgaactgtgcgcatctggacccggaggtgaaggccgaagcccggcacaacaaactgcgcagtattatctgcgggctggatgcgccggtgatgtcgcttgcctggtactgcgtgtggtgcggcgaccattatcagggcgtgaagcattgtccccggtgcctgaccggtatctacagtatcgaagaagcgaactggcagatgaattactgctgtaacacattctccgtacatggacgctcccgtcttgccaagccttcaattcatgatggctcgtag

SEQ ID NO: 445249 - DNA, 528 bp, Serratia marcescens
gtgcgacatgttgatgccactacccctgatgggttctgctggttgacgcctcaatcggaaaagcggactgagcgtgctccagggataacggactttgccaaccacgctccaacctgtcttgccaccacggcattaacgcctgagcaatcggtggggggaattccttcaggttgtcttgtcgcggaggtgctgacccgcctgggtcgcgtaatcgacccggaactcgcggtcatgggccagcaacgcccagatgatccgcgaattcttgttggccagtgccactgccgccacattcgcatgacgatgtttcacccgattcaacagccaactatcctgcctttctggctgtatgggcaaggatggcgcgtgcgccatggatcagcagcgtacgcagggacgtattgccgcgtttgctcatgtccagcagcacggattgttgtttcgtccgtcttgatcgccacaaaacgcatattgggccgcgccaccgcttcgcagatcgcctcggcatcggttaggtcgttgagatag

SEQ ID NO: 445250 - DNA, 1002 bp, Serratia marcescens
ttgaaactgaccttcccacccaatatccgtacattttctcagcgtatggcaggtgctatcggcacccttctattgattactcatttgtctggctgtgcatcaagctatgatagtggtctagtgaacagaaatggctattcaatctggatatcgaatgaaatgcagcgatatataacatcacctgattttgtaaaaacctgctgggggaccaataaccccggatattactgcaaaggcattatgattaatgggaatgaagatggcgtaaattggacacaaccttatgatcccgccaaagataataaattatcattttcatactggacttatcctatattaaaaagcaataaagtcagagggagttataagtcggtgggtatagcactgtggcctgcgggagaacttcgtaccgatggttcagcttacgaagaaaacttcacttgtggttttcctcatgatggaggtactattaataatctaggtgaatcacaatgtggtgcttatcacaagccgcgttgtcaagatattgggatcttcacggctgatgagttcatcgctgataattggaaatcgcgctgtggctttgccctaaacgacccggagtatgatactctgagtgcgtttacggccataatggaagtagaaaaaaaacacatcgacacacaaggacaacctagtaactatgatgaattcttattaaaaccgtggaccggcactgacttgagcaaaatacccttgatggcattcttcgtcaactgggtaaccctccatgacgatgacgattttttacccactatagacgatgcacgcaaactccaactagacttctataataaatcaaaaatatttgcaccgattgttgtcattactggtgatgattgggcacatccgacattctctggtgatcctaaataccaatcaccagaaatcccactaaacgttcaggtatttgcggggaccaaaaacgattattccacatccgcattttccaagcataaatga

SEQ ID NO: 445251 - DNA, 624 bp, Serratia marcescens
atgaaacgcaaatacctttccggggaagaagtcactcgcctgttgcaggcagtatcaacagatatacccaaaagccgcgactactgcatgataagcatggccttttggcatggcctgcgcgtcagcgaactgctgtcactcacactggaggattatgaccccctcgcacaaagccttcacattcgtcgcttaaaaggcgggctgagcacgacacaccctctccaccctgacgcacagcaggccttacagcgctggttgcaggagcgaaaacgctggcccggtcaggaattgcggtggctgtttttatcgaggcaaggcggaaaactctcgcgccaacgcttttaccagttgctgcgcacttatgggcagcgcgcacacctccccctccccgttcacccccacatgctgcggcacgcctgtggctatgccctggcagagcgcggcaacgacacgcgattgatacaggactacctggggcatcgcaacattcgccatacggtcctgtacaccgccgccaatgcggcccgcttcatccgtgcctgggatggcattcagcgtcgtccatggccgccgccagcagacaacaacggacgggaagataacggcaatcaaatggcgtcatga

SEQ ID NO: 445252 - DNA, 501 bp, Serratia marcescens
atgacgagaaccgtctattttcaggggcagccggtcgcgctgctgggggcatttccggtcaagggacaaaaagccaagccgttttcgctggtgtcaacctcactggagaatgtgttgctcagtcagtttgcggggatgcgcaaggtgttgtccattttccccagcgtcgataccccggtgtgcgccgcgtccgtgcgtgcgttcaatcagcgcgcatcggcgttgaacaatacggtggtgctgtgcatctcggcggatttgccgttcgcgcagggccgtttttgcggtgcggaagggctggaagcggtgagcatgctgtcgacgctgcggggtgagcggttcaagcaggattacggagtggctatcggtgcgggcatgttggccgggctgacgacccgggcggtggtggtgctggacggtgacgacaccgtgctgtacagccagtgcgtgaacgaaatcaccgatgaaccggattatgaggccgcgctgtccgtattgtga

SEQ ID NO: 445253 - DNA, 669 bp, Serratia marcescens
atgggatcgctactgcaattggtgcaagctatcgggctgggcctggttctgttactgccgctggccaaccccctcaccaccgtcgccctgttgctgggactgtccggcaacctgtccaaagcccgtcgtcaccagcaatcgcgcatggcagcggtctacaccttcgccatcatgatggtcgcgttttacgccgggcagtgggtcatgaacaccttcggcatctccattcccggcctgcgcatcgccggcggactcatcgtcgcctttatcggctttcgcatgctgtttcccgcgtcgccggcgcccgtcctcgcacagaccgaacacgccgacgccggcaccaatatcgcgttcgtgccgctcgccatgcccagcaccgccggtcccggcaccatcgccatgatcatcagttccgcctccagcttctacgacaacccgttcggttttgccccctgggtgatgctggccgcccccgtcgccaccttcctgtgcattgccgtcattctctggctctgcctgctcagcgccggcaccatcatgaaactggtgggcaaaagcggtatcgacgccatctcgcggctcatgggctttttgctggtctgcatgggcatacagttcatcatcaacggcatccttgaaatcaccaccacccacgccgcagcactctga

SEQ ID NO: 445254 - DNA, 753 bp, Serratia marcescens
atgatgagaaaacacgggttgagttcgcttttggcggcggcattgatgctgggcagtgtctcgggtgtgcaggcggctgacggcacgggcggcgtttcattgggtgggacgcgcctggtgtttgatggcggcaaggatgcggcatcaatgacggtgaccaattcctctgtcgcggatgtctggttgatgcgtttttgggtgtcgccgtatggcgaaaagtctgatgacgccagcgccaaggacaaggcgtcggtgccgtttgcagtcaccccgccgctgtaccggctggatccgaaaagcgccgtgcagctgcgtatcaacaaactggtcgatacgctgcctcaggaccgggaatcggtgttttacctgaacaacctggctattccaccgaagaagggcgagaagagttaccaaaaagcggtgcagagcggtctgcagtttgcggtgaacacgcgcatcaaactgttttatcgtccggccgcgattaatgatgccaatgccgtgaaggcggcgccgggaaaattgacggtcacgccatcgggtaaaaacctggtggtgaaaaacccgacaccgtggtttgtgacgatgtcgcaactggccgtcaatggcaaggccgtgcagacggacaaggacaccatggtggccccgttcggcgagctcagcctgccgatgacggtggcgcatggcaccttcagttacagcaccgtggacgaccggggcatgaccacgccgaaaatcgataaaacattctga

SEQ ID NO: 445255 - DNA, 2913 bp, Serratia marcescens
atgatggggcgtcggtcgggaacgcagggcgggcaggtcgtgcgaatgaaggtgcctgtcggcgtcttcggggtgttgctggcagcagccggtgtgccggagggggcggcggccgacggggcggggatgcccggcgtgcaggcggcatcgaccctccagggcgcacaaggtgccacctccgaccaggcgctgtcgtttgacagtgacttcctgagcatgggcggcggcggtcagggaaagcacgttgatttgtcgtactttgcccacaagggcgggatgcagccggggcgctatgccgtccaggtcaaggtcaacggcaagatggtggatgacggtcggctggtgagcttccgctctttccccgaccagcccggcaagctgtatgcctgcgtgagtgcagagcaggcggcgcagtggtggggcatcattgcgtcacgccgcgcagcggacggtccgtccgggagcggtgacaaggacaagaaggtcgggagcgtcggtgagccggctggggctgcggcggtggggcctgataaagacacgcccccgtccgcggcgacttcctcccaggccgtggacggcaccgcccctgtgaccatggggacggccggccctgacccggtcgacaagggggcggctgtcaagtctgacgctgcgggcgacacgcctggcgcgacgtcggcggcgtccggggaggcaacctgtccggtcggcggcgtgacggccatggtgccgtatgccaaagaagagtttgattttaacaagcatctgctttccctgacggtgccgcaggcctcgctgggaccggcgtcccggttgcgtacgccgccgcagatgtggaatgaggggatgccggccatcctgatgaactacaactacagcggcagtcagcaaaatagccgtggcaagaagagtggcagtgacttcctgggcctgaacggccagatgaacgtgttggggtggcgcgtgcgcaacgacatgacctggcataaaagtcaggggcagagtgcgcagtggaatgcctcgcaggtctatgcccagcacgactttgccgcgatgggcggcggtcaggtgacggtcgggcataccacgtcctcgggcggcggtgtcgactcggtgcagtttaccggggtgaaactggattcggacgaggcgatgctggatccgaagttcaccacctacagcccggccattaccggggtggcgaactcgccggcgacggtgacggtgcgccagtatggcaaggtgatttaccagcagaacgtgccgcaggggccgttctccctgacggattttaaccgcagcggtaacggctcggtggatgtggaaattcgtgaggcggacgggcagacgcgtcacttcacgatggcgcaggcgcaaaatggcggcctgctgcgtcagggcggcctgacctggagtgcgtcggccggcaaggcatcgaacggcaccggctatgcggatgacaagtttgtgcagtctggtgtgtcgtacggggcctgggccaacaccacgttaaacggtggggcgctgctctcgaaggactaccaggcggtcgccgtgggcaccagcgtgtatgccggcgcctggggtgcggtgagttacaccctgaacaccgcccgcgccaatttgtcggtggtgccgggtgagcagggctcgccgaccggggtgtcacatgcggtgagctggtcgcgcagttttggcaatacgtcggtcggggtgtcatggacgcatgcgcagacgcgtgattatcacagctacgcggagttgctggccatgaagccacgggcgcccgatgagacgcgcgcgcagagcaatgggacgcgggacagttacagcgtctcactgtcgcaatcgatgggggtatgggggagtgtgtcgctgagcggcagtcgttccacctcctggggcagcgattcggtgcagaacaacgtgtcgctcagctacaacaccacggttaaagacatcggtatcggggtgtcgctggggctgagtaccaccaacggcagtgacagtcgatacgacgatggcaatagcggcaatacgaacgcttatcgcttcagtggcagcgagaacaggacggacagaaccatcggggtgaacatctcgctgccgcttgggaagtggctgaacgccaacagcgtgaacgggacgtactcgtactcccgcagtaacggttcggtgagtcagcaggccgggctcagtggctcggcgctcaatggggcgctctcgtactcggcctcgcaggggattagcggctcgaagaccggcaataccagcgtgggctacagcggacgttatgggtcgatgaatggcggttacagttacggcggcggaagcaacagttactcctacggggtgagtggcgggttggccctccacccgcacggggtgacgctcggcaagcagctggcactcagcggggggaatgccctggtcgaggtgccgggggttggcgggttgaacgtggggagtgcggtgacggactggcgggggtatgccctggtcagtgggctgacgccgtatgacctgaaccgtatcaacgtcgacatgacgaacctgccgggcaacgtggagctggatgcatcgagcaagaacgtagtgccaacgcgcggtgccctggtggcggtgcccttcaagagcaacaaggggtatcgcatgatgctgacgctgagccgggataaagacggcgtgccgttcggttcgacggtgtcgctggtgcaggctgacgacagcgcgctgccggtaaccggcatcgtgggtgaggacggacaggtgtacctgtccgggatgccggcgaaaggtcaggtgctcgccacctggggtgacggcaaggacaatcggtgtgcggcggacttcagtctgccggacaaggccgatgaggaccgtctggcgacgttaacggccgtgtgccgctga

SEQ ID NO: 445256 - DNA, 1059 bp, Serratia marcescens
atgaaaagagcgcaaggcggttacgtgcgactgaccgggctgcttctgctggtgagcgcagcggcgcaggcagagggcccggcggcgcaaaagagtgcgccggtgccggtcacgttcggtatccgggcgctgacgccggagacgccgattaaccctctggtggcctttgtgtcacaaggggtcacgctgccggaggtggtttgcaacgcctgtacggaccaggacagctggacgcgggaatggacggtgtcgcacatgacgctcgaccgcgacaacagccgggcggagcaaggctggtacgtgtttcacggcgggctgaacgggattgatgtcagtgtgcaggtggcgccgctggcgcgtaaaacgcagcacggcagcgggatgcagttaaaggaaagtggtgagctgacggtgggactggtccgaacgggtcgggacaccggggcggggctggttgatttgccggcgacggagtttatccgcaccacgacgttcacggggccggacgggcaggtgaagtatgtccagcaggatgccatccgggtctcggcggacctgcgggtcccgacctgcacgaccgcggcgggcagcctgagctttcagttgctggacatcagtcaggtggggctgcgccgcacggtggtgcctggcgggttcacggatgaatcagcgtccttgccacaggtggtggtcgcgaattgctcggagaatacccggcacctgcgtattcggtttattccgcagggggcggtgacggactcgcagcaggggccagccaccattctggtggggaaggatgagaacggccaggagaccggtacggggtttttgatgaagtatgacgccagcgcctttggccgtacgcagcagggtgtggtgcagtgggaccgcaaccagccgctggtccttgagaacccgtctccctcggacgcgggtaacgaattgacgcaggggattacggtggcactgcaggcgttttacgcccgcccgctgaacgataaagccatcacggccgggcaggttatcgccaagggattgtaccaggtgtcgtatgactga

SEQ ID NO: 445257 - DNA, 726 bp, Serratia marcescens
atgtgcggcagatacccgtggcgaacaaaacgaaaaagcctgtgccgacacggtaccagcgcagcaggcctgctggggcgtatgctgacggggatgctgccaggggtggtgctctgtgccgcactgggcgctgtattgaaggataatgtcgctgatgcggccaccgagacgttcctcgcggcccaggacatcacggtcagcggcaaggtcaccgcgccgtcctgtacggtgaaactggaaaacgaccgcatgacgttcagtcgccagcaggataaaagggagactgcgtcacagacgcttctgttgaacctgagtcagtgtgaggccgatggggtcggggtgacgttcaaggcggagcactggcccgataatccggtgcggggcacgctgagtggggcgacatcacgccagcgcgaacagggctggtactacacgctgagtccggggacggacagcggcgaagacgggggaagcacctggccgatgcgtctggcggaagactcgccggcactgcaaaacgataaacaagccggtgacgataagcacgaggtgtattttagtctggcggaagtgaattactggtatggcttgaaagcgccaatgaaagaaggtgacgtacgggttattccgtttcaggtacaggtgcatcagagcgtgacaaaagaaaggttgtcgtcggatgaggcgctggaatcaacatttacgatgcagatatcctggcgatag

SEQ ID NO: 445258 - DNA, 816 bp, Serratia marcescens
atgtctatcgtaatgaaaaacaaactctctgctaccgcactggctatcgctaccgtcatgggcatgggctatagcgcgatggcttctgcggctaccgcagattttacagcgcaattaatcgtgagctcaccaaacgtttgtgaaccagtattgactccgccagcggagaccacctgggccagtacatggacactggcaaatgcgacggatacatcaggcaccattgatgtgactaagtaccccaatgaaccacacatgattaaggtggctctgggcgctggtgctgcagaaacctgtgacctcaacggcctggttgtgggtgctaacgcaactggggcggacgtcacccctgtagccggtcagccaggttaccttcaggtggacactaaagctggcggcttctggcgctatgttccaacacttgcgcaggctcacttctacaccgataacgaatgggccacattagacgccagtgacgtcaccgctactctgggggcacaaacgcatacacaatcccccactgctctatacaccaaagggactgacatcaaaggtgaagcagcatttggtgccgcggacgcgctgggtgtgagtgacaactattttgtctccaacggcatttcacccatcacaacgaccaaagatgtccaagtaaaatcggccaacaccaccgaccgcatgaagagcgcggagattggcatcagtgcggtgatcgccaaagaccctgtcgacgccagtggcacggtcgacacggcgctggtaacgaacgacgcaagcatcacgatgccattcaccatcgaggttggataccgttaa

SEQ ID NO: 445259 - DNA, 774 bp, Serratia marcescens
atgaaaagactcgcactcatcccgacgttggcattcgcggcgttgaacgcccacgccacacccacggtcgatctttctacgaacttaacgttcgcgttgccaacttgtagtttaacccttgaaccccaagacaacacgatcatcgtgcactacaccaccaccggtgatcccacggcagccggcactttcgacggcgcacacacccccgcggcatacctcgtaaagttcgatggttgcagcgccgcgcccgccatccggttcacattgccgagcccgaccggtcaagccggcaggatcaagaaggtcgaagcccatggcgtcagttgggcgcagaattcatatcttcacaacgccctcggttacgagtctgacgatgcctccggcgacccggtcgacccggtgaacttcacggcgtcggtcagccgctcgaacggggtattacccaacgcgttcatcacaaccaaacagccaatgattacaccagatccgaattattattacagcacaacgccgcaagccacaacgtattcaggatacgagctcgggcaaacagtagaaggggataacaaccgggtattcacagcctccggatacgacggatcgttaacagtattcaattacataccggcagcaaccgccaaatccgttctcatccaaataggtgcgatctttgctaaatccggtccaaccgtggccggtgccgttgataactctgcattggtagacggactgaactacggttggacgggcacccttaccgttacagcagtctga

SEQ ID NO: 445260 - DNA, 351 bp, Serratia marcescens
atgaaacgtttgtcactactcactctccttacgctcacggcgatgggggcgcatgccgccgaccgtatcgacatgacttcgagcctgcaactcaaaatgccgacctgtaccctcagcgtcacaccgctgaactcgactatcgcggccacgtacaccgtcacccaggaaaacatcgacggcaacacggcgggcacttatgctttcccgaccgccacggcggaatatctcgtctccaccgacgaagcgtgcgccacactccccgcgttcaattttgcgatgccaacccccccccacgaggacgggccgggtagacaagacagtcaccgcaggcggcgtagactggcgcactaa

SEQ ID NO: 445261 - DNA, 876 bp, Serratia marcescens
atgctgaccggcgttctggagacccgactgcccgttcacccgcggtgcgagcatatcaaggggcacggcggtggccgccagagcaccgggcgcgtcgaccggcacctgaagacgcacggcacgcggtatgtctttcgtaccgatatcaagggctattacgccgccattgataagtcccgcctgtacgaccagctcacccgccatgtctcccacccggttctgctggccctgctgtggcagtttttgcactacagcgtcgaggagggcggcaacttccataccccgcgcaagggcatcagccggggtgcggcgctcagcccgttactggcggcctttcatctgtacgaactggaccgtcagttcgcgaaaaatacccgcgtgcgctacgtacgctatatggatgattttctcatcctggccccgacccgctggacgctgcgccgtgcggtacgggacctgaaacattttctcagcaactatggttttacgctccatccagacaaaacccagctcggtaaaaccgaaaggggttttgactggatggggctgtggtttaaacagggcgggatacagtccattgcaccccgcgccgtgagtaaacaccgtctgcagtgtcgccggctttatgagcacatccgtcacctgaacaaagaccttcaggccgcccggatggcgttataccgcagacggtgggttagagcgctgcgcccacctagcgccctgttgtcagagtgctgtaacggtgagagtgccagtccaaccgtagtccaatgcgttaacgatagccccctggtcgtatacggccccgactcgcggcccgccagcgtcaaacattgcgcctatactgatggtcatcgacgcgtctgtttgggctaa

SEQ ID NO: 445262 - DNA, 1362 bp, Serratia marcescens
atgcaccggttacggagtcaggctgccgtgccttgtcggccgaccccctcattgcgaccgcgttaccgcaccgtcaccctgatgttgatggccgccctggcgggtgtcgccctgccggccggcgcccaggaggtgccggccgcaggggcgggcctgcccctgcaacccgcgaccctggcggagggggtggcgccggcgggcaatgcgcccgcggccggcagcgccgcgccggccgatgagatggccaccatggtggccacgctgcaaaagcaaatcatcgcccagcaggcgctgctgcaagtgttgcaggcgcgtctggcggcaggcagcgtgccggcggccgacgccgcgccaccgtcggccgccgtgacacccgccgcgcccgcgtcgggtaagcctactttgggggtgtcgaatgcgaaagctgccccggcgacggcgtcgtctgcggcggccactaccccttctgagactgccgcttccacgtcggcgaccccgcccgcggtcaccggtcaggccccctcggtgaacggggggcagacacccccttccggcaccgggtctgcgccgggtgcggcacaggacggtgcgctatccgtgtcgccgaccgcgtcggcgcctgaacgcgcagcgccgtcggtgacggcaccggcggttgaccccgcgcctgcgcatgcgcctgacctcggggcgacagcggtccccgccaccccgaccggctcggatatcaccctgtcgacgcaggcgcagcgacaagcctacgccagcggtgcctctgtgtggcgcgaaatccaaagttccatcgcctcgcagcacgccctcggcatcgagctcgatgcgcgctatgtgatggccgggctgcaggacatggcgctgaaccagccgctgaaaatgtccgccgacgagatggacagcaccatgtcgtcactcaataccgactacatccgccgtgccaatgaagcgcggcagcatcaggaggcggaaggcaaggcgttccgtattgccttcagcaagcagaaggggagctacagcgacgccggggcctggtatcgcattgatgaccgtgggcagggacgtcacctgaaaacgaccgacatggccgtactgcaggtcaccggcaccctgccggacggcacggtgttcgatgccagcggtcagcaggggcgcacccgaacggtaaaggtgggctctctgctgccgtcggtggccattgggctgcagaaggtcgccccgggtggccgattgacggtcgtggtgccgccgcaaaaggggtatggcgatgcaggcttgccgccgtccattcccggcggcgccaccctgatttttgacatcaccgtgaaaggcgtcagccgcggggagtag

SEQ ID NO: 445263 - DNA, 273 bp, Serratia marcescens
atgcaaaaacggatagctcgatggctgtgggcctggcggcgagcggttgccacgcgctggcggccgaactggcggcgggggtgccgctggttgcgccatcattggcgcgcgctggacagggcactgctgcagagtgacaagcggaccgcgacccgtcggggcgtatcgcgggacggggacagcgtcggcttcattctgctggtgtttctggtcgcgttggtggcgtggatgttttttttcttgcattacgtggccggcaatgtcgggcactga

SEQ ID NO: 445264 - DNA, 525 bp, Serratia marcescens
atgagcaaacaatcaaaaccgaacccggccctgccgccggttaagacacctgtcgcgcaggcgcaggcgcaggcgcaggcggcaccagatgtgatgccgccggcatcaccccggcaaactgccgcggcgaccgaaggtagcgtaccggcctgccaacgcaatcatgacgcgtttcaccggccgccctgtctctcgcacctgccggtcttgccactttatctgatggtggcgcactggggatggtgcacgggcaacgtgctgacggcggctgcggtgggtgaggcgttccgactggagtcgagacggtcgcaggcggtcatgcgctatttcgcgcgttatgagacggacgtgtcctttgtgcggccctggcgcggggcgatacgtatcacggcgctgccgccggtggtcgccggtcgacatgccgacgccggtcgggcgcgggtggcgcgcaaggggcgcatacaggaccagcagtcgctgcgtcgctggtttttgcagcgccccaatggcgcgcctgaggcgtga

SEQ ID NO: 445265 - DNA, 405 bp, Serratia marcescens
atgcacagtacggatggtctgcgctggtatctggcgctgggacacgggacggcctccggtgcctggtggggctgggttgccctgtgcgccctggtgggcagcagcgcgctggtctggtggtggcatcgggggcgggtgcgtcaacgcagcgaccggctatgggacattctcccgccgattgggctgatgctgctgggctgcctgatgctgtttgtccccctgtggtcagggttggatgtctggttgaacgacgtggacgacaccctgctgtgggcgttcatgtcggatgcgcccgccgcatcggggccgatgccgcaggtgtccatggcgtcgggtgggcgctgcggcaccccctgcaatgacgccgatatcaacgggcgatgcgcctcatgggaggcgcgttga

SEQ ID NO: 445266 - DNA, 852 bp, Serratia marcescens
atgatgcgcggcccgaaggcggcgatgtgtgtcgtgatgacggagtgtgccctgagtgcggttggcctggagacactggtgcgcacgggaggcacggcggcggtgtgctggcgccgctggtcggcggcagaggcgatgctgccgttgcccctgaacgcaccgttccaggtggtggggacattgccggaggaggtgggggcactggcgatggcactgatgcggcttggcctgttgctgcgtcaggcgaagaccgcgtcggtggcgcgccccgtgcgggtggtcttgctgtcggccctgccggcgcgctgggtgatgcatacgcttgcgcgcctggtcggggatgcgggcactcactggtccctgcaggttttgccggataccgcatcgacggcaagggtgcaggcggcgataaccgccatgccgacgcagccgcatgccagccccgggctgagcgggctgacgtaccgcgaccttgacgtgctcatgcagacattctggcggcggtcatcacgggagggcgcctccttgcccgccgggagtataccggatgagcgtgccgcggtactgcgcacggcgctggctgccctgggagagtgctccctgcgaggcgggtggcactggcgagcaaggcgcgcgtggttacccgggtatcctccgccggattcgcgctttctgcgagacggtgacgtggtgcgttatacccggcggggcagtcaggcggcgcaccggcagcctgcggcagaccgcgcgccccttgatacgggcgcgacggcgaacagttcacggggaccacacccacattcagacgcacgcaagacaggaaaccgtgcgcgcaacgtcagcgaggtatga

SEQ ID NO: 445267 - DNA, 714 bp, Serratia marcescens
atgctgcaagacaaccgggggcaatgtgcccaggaacacaggctgattatcgtcgatccctgcgcctttggtcgcgaggggctcaaggccgcattgtcggatgcgcgctcggtgagcgagcccgacatgctggcggcggcctcgctgccagcagcacagcaggtctggcgagccaacctgtcgatgccgggcaggttgccgccggccgggatacggggcggctgcctggtggtgcggctgccggccgatccgcgaaccgccctggccctgctgctggagttggggacgcccgccgtgcgggcgacctttgcccgctgggtgacggtgctgctgacgccggtgccggccacacgggtgcgagagctgttggcggcgacggggggcgacctcgccatacgggtggtggacgaccgtcagcccgtgtcgcgcttgcgccgcgccgtacgggcggcatgccgcgcgtcagcctgcgcctgggacgacatccgacacgtggccgcacgcccggccggcccggtcctttccgagcgggagtgccgcgtcttgctctttaccctgcaaggcgtcgcgatggctgacgtggcccggcggcatgccgtcagttacaagacgctctacagccagcgccatacggccttgctgaaactcggcgtgagggggatgtgcggcttgttgtccctgttttatgacgcgccgcaggacgcgcgttcatga

SEQ ID NO: 445268 - DNA, 489 bp, Serratia marcescens
atgagcgaacgggggcctcgggagggtgggttgcaggacgaaagcgcgcaggcggcttacgtcatcggcctggatgcgctggcgtcgctgtatcaccggctggcctcggagggcgcattgccgctgtcctgggcggtgcagggcatgctggacgccgttgccggccaatgccaactggacaggcaggcccgtcagcgcgtcaggtcgcgattgacgtccatgcgcgcccttcctggtgacgacgaacacggcaccggggcgatacgcgtcgcgtcgtcagagggagccacagacgaaggtctgttggaaaaacacgtgaataacataacgggagaggaagacatgaaaggggatttaagtcgtgcggaacggcgctggcggcgactggtactggccgtcttgctgccgctggcgattatcggtgcggtgttgctgtatgcgatgagtaacgacggcgtggtgcggttgctgcaggccgcgatgcggtaa

SEQ ID NO: 445269 - DNA, 291 bp, Serratia marcescens
atggcggtgatacgggaggccgtgaaggcattggataacagcgtgacgacaacgaatggggtcgacaagacggcggaggcgctggcggccgccatgtttgcgcctggctcgtcacgggagcgtcaccgactgctgtcgacgcaggccgcgcaactggagcgcaatgggcagtatgacgcggcgatgcgcacctggatgcaggcagccaatcaggcgttgtacgacgtcgaacggcactggtgcgagtcacgggcgcagtggtgtgagcagtgtcttcagcgccagggttga

SEQ ID NO: 445270 - DNA, 459 bp, Serratia marcescens
atgacaacaacgggtagcaaggcggggcatggcgcggcggtctcggggagacagtcgaactacggcgattatcgcttgccggaggggctggcggtaacgccgtcggcgccgctgtatcaggcggtggccttctgggggtggcaattggggcgcgcattcaaccgcgacgaactggccgaagcctttcatatctcggtacgtcgggcgggggatgtgatgtcttatatccgccgcgcccgctctgaccgaataacgagtcgtcagcattacgtgcgtgtgccgggcggcgtgcggatgcgttacctgcacatcctggccgagccgcaggtggacggcattccggtggtagcgacaccggttcacctgacgcctgatgagccccctgacgacgccggagcgacgtcgttcgcggcactcaagcgatggtttattggtggggcgggcaggacgacgtcgtga

SEQ ID NO: 445271 - DNA, 252 bp, Serratia marcescens
atgtccggcgtggtcgacggcatgccggatgcactgcgctgtccgccatcgccgtctgaacgggtgtgccgccgcgcgttatggcgccgctggcggcgttacccgcccggcggccggtggggcgttatcggcgggctggcggccattgcatgcctgctggcctggcattggggcggcggtcccgatgcgctgggcgactggatagcgggcaccgcccgtgcggcgctgacctgggcacggtcggttcggtga

SEQ ID NO: 445272 - DNA, 147 bp, Serratia marcescens
atggcggcgcacgatagcgaggaaacgacaaaaaaggggcgaccgggtcgacttttgcactggacctggtggggcgtcgttctgggcagcctgacggtctgggggctggtgattgcggccattttggcggcgttctggtctccctga

SEQ ID NO: 445273 - DNA, 828 bp, Serratia marcescens
atgagagcacgagtgcggtttaccctggcggcgaccaccctggttctgggcgcggcgctgtcgccggtcagccaggcggcgttggcggattggggcaccgaggtgagcgtgggggcgggcctggccgtggggccggcctatcagggggcgtcccactacgtggcgcagccggtgtatgacctggaaggccatgtgaaaacggacaactggggcgcattcacgctgggcgtcgtccgcggtgctcgttgggacctgccgttgccgtcgccgtttggggtggcgctgctgatggattatgactatggccgcaaggagcgcatcagcgcgctgggcagccatgatgacaccttgcgtggcatgggcgacctgggcggctcgctggaggccggtctcgagctgagttatcagatgaacccggtgcaggtttacgtgaaggggatgagcgcgacacgtgagcgtcattacggcggcgaaaatctgggtcggacggcgtatgtggacgttgggttgaaacgcgattacgagattaacgaccaggtgacgttgctgggcaacgtgtttgcgacctgggccaacggcggctatcaacggggttacttcggcgtgacgccggagcaggcctcccggacgcggtttgaggcgtatcacctgggggcgggactcaagcagttcacggcaaggctggcggtgaattaccagtggtcgccgtcgtggtccttccaggccgggggcgaagcgtaccgactggcgggcaatacggccgacagcccgttggtggacaaggcgctggcggggatggcgttcatgagtgcccgctaccgattctga

SEQ ID NO: 445274 - DNA, 564 bp, Serratia marcescens
atgggaccgtatgccgacgtcctgagtgcgctgacggtggtcataaaagcagggcggcatatggcgtcgggtgccgtggcgtgcacccttttgctgtatggcggcctcttgttgcccgccgatgcaggggcggcgtcccctgaggcctgcaaggccaatcagcttgacgccggttttattgaccgggaagggctggccggtacgcagatggttttgcgcaacaccagcccgagagcctgccgcctgaagcgctggccggcggtggaatttgaaggggatgacggggagccgttggttgtcgaacggcgccttgcgccgttgcccggccacgtcgcgacaggggacctcaccctggcgccgggagcagcggtgagcgccacattggcctgggaaacccgggatatcgacaaggttcacaactgcatggcgccgttgatggtggtcgtggatataccgggcggcgccttgcgttttttgtttgggcgacaaatgtgcgcggccggcggttcgctcaccgtgttaacccagggtgcgctgatgccgcaggaaaaggggcgtcggtga

SEQ ID NO: 445275 - DNA, 825 bp, Serratia marcescens
atgataaataaaaagcgtcaatacggtcgcccggtgtttttacggggcggtggtctcatggccttgctggcgctggccggcagtgtacaggcggcagataacagcgcggccgtgacggcgtcggtgacggtgcttgataccgaaagttgtaccattacggtatcgccaacctcgcatgccatggccatgacctggtcacgcaatgccgaaggtgtggtgtcctataacgtgacgagctcgaccgagccggtgaatgtgaccttgcgtgcgacgggcggtaacacctgtacgttgaacaaccttaccctcaggacggagatgggcagcggcattgtgccgggaccagactcgggaaaacaaaacttcaccttcaagaaaagcgttggctcgcaagggggattttggcgcttcatgccttatctggcacgcgcacagttctacacggatgagcagcaagcccaaccgggcacggggaaaatcacctggaacggtcccagcgaggctccgtataatcatatggtctttggagatacggccaccatcaaggggacagaggtattggacatggagtccatggggggagatgtcgtgttcctgaccgaccagtatgtcgaggatggtggggcgctgttgattgataaaggggtaaatgaagggacatttacctcttccgtagcgggtgagaaataccgctctgccgtactggggtttggggcgttgatggccacggcgcctgaaaatgtgaacgggacgcgggcaccggagctggccgcggggggagaccaggtcacgatgacctggacggtgtatatcgatcaggcctga

SEQ ID NO: 445276 - DNA, 174 bp, Serratia marcescens
atgaaatcggctcagcggggcctctccgggataaacaacagccaacagaaggagggcgacatcagcctgctatcgggctggctgggcgcactcgacatgctacgcacgtgggtgactgatactggcgcaacaccggtgcagcacccctattcggcgtctttcaacagcgagtga

SEQ ID NO: 445277 - DNA, 435 bp, Serratia marcescens
atgacaacacacgaaaattcgcacgggacatcctcgcagaatggatgcaatgacacggccctggatgccgtggctgacactgcgctagagacggcggtggatgccctgtttacggccgttgccatggtgaggcaggttctccatacccgggccgtggctcgggatgcggcctgcccgctgacgccggacacggagtgggcacaagaggcgtacgtcagtggcatggtcctggcaacgcaggcgcagcaactgctggccgtgcatgcccgtggcggggcacatttgccgccgtattggctggcacagggggtggttgataccttggcagggacagtgcggctgacggcttcacagcaacgcgaggggcaggcgagagctcatgctcgcacggcgtgggtcatggcacaggggcgagacgatacccttcgcgagtag

SEQ ID NO: 445278 - DNA, 708 bp, Serratia marcescens
atgcgtacaaataccgcattgtggacaatgtggtttacttgggggctctggatattaagtgaaatatacccgggcgcgagtgttatcaaatgggccgctcttttggtgactggcggtatgctgattttattttttcgtcccttattactaaaaaggaccctgtgtatgcgtttgttgaaacgaggaaacaacattgtgaatgtgtctgcccagactaaagcatcggttgataaggtgaccaatacacccgccgaccttacgacactccccttattacctcctgatgcgcaggaagggataaaaccgataagggcaagaaaagacacgtttatttctcctgaggcgaatctgtcaggcaacctggaagggcaaggtaatatcgtgattgaagggcggctggatgggaatgtcagcagttcgcaccaggttcgtgttgaatccggtggtttggtcgtcggggatattcatgctcagcacatcgttgtaaacggaaaggtggaagggagattttatgctgatgccattacattgcaatcggaagggcatatacgaggggatatttttactgatgcgctaatcattgagaaaggcggtgtttttatcggccagtcgcagttaaaactgcaggagcaggtaacggaatgcaagggtaacgtcgcgaaactgaaggtccctgacatacaggatatatcactgctcagccagtga

SEQ ID NO: 445279 - DNA, 822 bp, Serratia marcescens
gtgtcaatactttcatttttgtttgcgcctgcggcggacgacattttattttttgtgatgatattgtttaccctggggcttgctgcgtacctggggcaaacggcataccggcctcagacggtggatgacagtggtgacataacgttggtttccggggcggtcctatccttgtcggggttgttgatcgggtttatgttttcgctttctatcagtggttatgcttcccgaggaaaggctgaggttcgggaagcgttggccattggtcatgtttggcagtattcgacgctgcagccacaagaggtgcagaagaagaccgacacattattgcgtgcgtacctggatgaccggatacgttttttcactgaggactcggggcaggggcggcgcacatggttgcaattatcccaggaaaaacaacgccaactgtggcaattgattgtgtcggaagcgacgcataacccgacggctgtcatggcgtcggtgttgactgcctacagtgagttatacacgtcgttgcaggaaacgcaggcggactggcgtcgacaaataccggatgcggggtggggcgtgctgattgtgtttgcgacctgtgccagttttctctcggggtaccaataccgtggcagggcacggcggcatgtttttttcctgttgcttccagggttgacggcattggcattattcatgattgctgaaattgatctcccaggcgaaggccttattcgggttactccagacgacttgcatcaactggcttcaatgctggctcgagcctcgggagggaaggatgatccgtcatctgttgttcatcacgtttattga

SEQ ID NO: 445280 - DNA, 765 bp, Serratia marcescens
atgtctaaatgcacattacaaaacacaaatggaaacataaagggcataaaactcacttgcatagtaataaacatcaaaagaagcacaaacaaaataaccctcattgtattttcgtttaaaatagccatgagcattatttcgtttctttcacagataagattcattctgatgattacattaaaatctctgttacaacatgccttgctgatgactttcggttctttgttgctgactgcttttactgtgcaggcagaaaccaccgtcgtattcctgcgccacggtgaaaaaacggaggcacccaccggtcagctgacctgcaaagggtttaatcgtgcgctggcactgccatcagtactgttgacccgttttggccagcctgatgcgatttatgcggctgcaccaaagcaaaacaaaaccggcagttcactgcgtccgttgagtaccatactccccaccgctatccgggcagaacacccggtgatcctcaaataccatgccacggagacggacgggctggtcagcgatcttctatccaccagcaacagaaaacagtgggtgtttgtctcatgggaacacaaaaacctagtggtcgccgcgaagacgctggtcaaccggaccggcggtgatcctcagcagatcccgtcgtggcccgggcacgatttcgatagcctgtatattgtcaaacttaacgatcagggccggtttgtgtcattcagcgaagaaagcgaggggctgaacgaggtaagcgatcgctgtcagcaatga

SEQ ID NO: 445281 - DNA, 504 bp, Serratia marcescens
atgagtaaaaatacaggcacctcctctgtcgcgccgaaagaaagaatcaatattaaatatgttcctgcgaccggcgggcaacaagcagaggttgaattacccttaacgctgatgatcgtgggtgacctgaaagggcgaacagaagaaacgccgattgaagaacgacagacggtatcgctggacaagaacaatttcaatgccgtcatgcgggaaagcaaaatcgatctcgcctttaacgtgccaaatcttcttgaagaagaaagcgaagatgatctgcctgttcatctgaacattgcttctcttgctgatttctccccggacaaccttgcacagcaggtcccggagttacgtaaattgctggagttgcgtgaggcgctggttgcgcttaagggaccactgggaaatatcccctcattccgtaaccgtttgcaggatttgcttgcaaaccctgatgcccgtgaacagctgcttaaagagctggatctcattaagccagaaaaataa

SEQ ID NO: 445282 - DNA, 1479 bp, Serratia marcescens
atgtctgctaccgaaaaacaaacccgcactgatgatgcccgggcatcttcctcactgcttgacgagattatggcgcaggcgcgtattacgcctgttgacgaaggctataacgtcgcgaagcagggtattacggcgctgatatccaacatccttgacagtggtgatgccgccgaaccagtcaacaaagctctggttgaccgcatgattgttgagctggacaaaaaactcagcgcccagatcgatgaaattctgcatgcccgtgagttccaggcactggaatccacctggcgttcggccaaggtgcttgttgataaaacagatttccgcgagaacatcaaaattttgatgttacacgcgactaaagatgagctgcttgatgattttgaatttgcacctgaaatcacgcagtccgggttctataagcatgtttactccaccggttatggccagtttggtggtgagccagtcggcgcggtgattggtgattatgtcctgacccaaagctctccggatatcaagctgatgcaatacctgagcgccgtgggcgcgatggcacacgcaccctgtattacttcggtggcaccgacattcttcagcgtggacagctataccgatctgccgtccatcaaagatctcaaatcagtatttgaaggcccggcctacaccaaatggcgcgccctgcgtgagtcagaagatgcccgctatctggggttaaccgccccgcgtttcctggcgcgtctgccgtatgacccggtggagaacccggttaaagggtttaactatcaggaaaatatcagcgccagccacgatcactatctgtggggcaatacggcctacctgatggggacggcgctgactgacagtttcgcaaaataccgctggtgcccgaacatcatcggtccgcagagcggtggcgcgatttctgatctgcctgtccacgtgtatgaagcgatggggcagctgcaggccaaaattccgacggaagtgcttatcaccgatcgccgtgaatacgagctggcagaggaggggtttatcaccctgaccatgcgtaaagacagtgataacgccgcgttcttttccgctaactcagtacagaagccgaaggtgttcccgaatacccgtgaggggaaagaagccgaaaccaattaccgcctcggtacgcagctgccgtacatgttcattattaatcgtctggcgcattacatcaaagtcctgcagcgtgaacagattggctcctggaaagagcgtcaggatctggagggcgaactgaacaactggatcaagcagtacgttgctgaccaggagaacccgccggccgatgtgcgcagccgtcgtccgctgcgtgcggcacagatcacggtgaaggatgtggaaggggaagcaggctggtatcaggtggcgatttctgtccgtccgcacttcaaatacatgggcgcgaactttgaactctccctggtgggtcgtctggacagggagtaa

SEQ ID NO: 445283 - DNA, 432 bp, Serratia marcescens
gtgtcttctctcgcattatggaacagaggaagctctgccagtctgttcgatcgtatcagggaagagagcaccgacatccctcctgtacacgacacagacaggctggtcggctcgataaaacgccagctcgaacgtgtgctcaatacccgatgtgggagttgccgcagtgcgccggatctcggcgtggtggatctcaatgatgccacgcagactagcactgatacggaggggcgtatacgcgaagccatccgtcactgtatccgcgagtatgagccccgtattgtcggtgttgaggtttttgcggtggataacaccaccgcggtccccggtctgaccttccgggttaacgcttcggtacggctggatacgcgggaacagactgcctcgtttgatatccatatggacagtaaccgccactacagaatggtgtga

SEQ ID NO: 445284 - DNA, 1767 bp, Serratia marcescens
atgtcgctggaacactattaccgggatgagctgacctggctgcgtttgcagggccgtcagtttgccggggcacatcccgaactgacacgttttttatctgagcagacgaccgatcctgatgtggaacggctgctggagggcttcgcgtttctgacggggagcctgcgcgccaaaattgaggatgagttcccggaactgacgcacggtctgctcaatatgctgtggccgaattatctgcgccctgttccctcgatgaccattattcagtttacgccggttgagggggcgctggcacagcccgcgtttctcgggcgggggtgcgcgctcgacagcattgttaacaatgaagcggtgtgccattttcagacatgccacgatctgtggatctttccggccagccttgagaacgtcagcgcatacagcggtacggatgtgtcggcgatcaccctggagatgacactgcaggtgccgatgacgctggagcaactggatctcagtaagctgcgattttatcttggcggtgatgcctggacggcacgtgagctctatttctggttatcggaccggctggcctggattgagctggaaattgacggcacgcgttttcgtcagcctgccagcctcctcaggaccagtgggtttgcgcgggaagaggcgttgctgccatatcccggcaatatctactcaggctatcgcatcctgcaggagtacttctgtttccctgaaagttttctgtttttccatctggcgggcggcgactggcctaagcagccgctggctgtgtcgtcatttaagctgcacttttgttttgaacgtccgttgccgcctgcactgaagatccgccaggatgccttcatgctgaactgtgtgccggccatcaatcttttccgtcatgacagcgaacctgtggcgctaaccggacagcagacagaatacccgttacgggcgagctacagtcatcctgaaagttacgaaattttctccgtggataaggtagaaggctgggtggaaggcccggatggtcgtgcccggggtggtacgcgggtgtatcagccttttgaaagttttcagcaccagattgaacgcgtaaacgggcgtctggcgctgtattaccgccttcgggttcgcgaggccgtcagcggtgagggctttgagcattcattgtctttcgtgcggggcgacgaaacggaagtggccggaaaggatgaagcggtctctgtcacgatgacctgtaccaaccgggagcgtgcagcgcagctgaaggtgggcgatatttgtgtaccgacggacaccacgcccaactttttcactttctgcaatattacccgccccacacgctcgctgcgcccggtactggacggcagcctgcagtggatgctgatttccagcctgtcgctgaactacgtctcattgctgagcccggatgcgctgacgcaggtgttgcgcacctgggattttcccgcgctgtatgacaagcaggctgaacaggcgtcccgcaagcgactggcggggatcgagcgtattgagaccgcgcctgtcgatcgcctgatacgcggtatgccggtgcgtggtctgaaatcctgcctctttgtgcgtcagtcggcctttgcgggagaaggtgaactgtatcttttcagcaccgtgctggcgcattttctctccctctatgccagcgtgaacgcgtttcatctgctggaggtgtacaacctggacaacaaggagtgttaccgatggccggtacaggcaggtcagcactcgatgatgtga

SEQ ID NO: 445285 - DNA, 999 bp, Serratia marcescens
atggccggtacaggcaggtcagcactcgatgatgtgattgcccgaggggagattgcgcagtttgctttcttcccgctggttgaattgctccatcggctggaaaacgttgatcccgaatctgaccaggatattcatcctgaacaggagcgggtacgctttgctgccacggcttcactgggctttcatcccggcgacattgtcagcctgcgtcaggacgacagcgggctgcaccatcttgaagtggctttcctggggctgcatggcagtcagtcgccgatgcccggctattaccttgacgaactggcgtgggagtatgcctggcaggagccgcgtctcgggctgtttctggatttcttccatcatcgcctgctgacccttctgcaccggatatggcgtaagtaccgttatcacgtccgttttcaggacgacggacgggacgggttctcccgtcagatgtttgcgctggtgggactcggtaatgaagccgtacgcgacagcctgcccgtcaaccgggccaaaatgctctcttacgccgggatgctggcgagtcccagccgttcacctgaggtgatttccggtctggtgatgcactgtttcgacctggatagcgtgacggtggaggactggcagatgcgtaaagtggcggtctgtgaagagcagcaaaaccggctcgggcagtccggcgtggccctcgggcaggatttcatttcgggtgagcgggtcaatgactgcgccggaaaattcgttttaaaaatcaataacctttcatttcgtgattttctccgttttctgccggatggcgatcagcatcagccgctggtgcgctttatgtcatttattctgcgcgatcagctggcatgggatctgagcctcggttttgggcatcagcaggcaaacgggatgcgcctcgacagtcatcagggcgcgagcctgggctggagcagttttctggggatgccgcctgaggtggcccgcgtcacgatatgcgtgcaggagtaa

SEQ ID NO: 445286 - DNA, 1212 bp, Serratia marcescens
atgagcaacagcacacaacagctttcattactggtacttaacagcgcgcagctggagggagactctcaggttcagcattatttcgggccggaaggggggacgctgggctcatcggatcaggatgactggcagcttcgcgaaagtattggctcggttctgccggggcatgcgcgtattgagatgattgacgggcatttttgcctgcacgaccagagcggacacacatttattaatggtttggggtcaccggtggggggagaccggctcgtcaggctgaatgcgggagatgaactgaccgtaggaccttttcaaatccgtgtttccctggggcagagactacacgctcctgcgctggatgaactgatggataaccgcccacagcagagtatggataaatggcttgaggacactcagtacgacgccggaatgacgcatacggtaacgaaggcatcccgggaggacgatcctctgggggcgctgcaacaggacagccacagcgtgtcgtcgctgttgacagaaaatacgctccaggcggcatcatcagggccggcaggcgaattctccggaggaaaagagacagtgaaccaggcatttattgaactaccggaggtgggacgtagcggccttacgcaggacgaggggatggcggcggcactggagaccgtgctgtccggcatgggcggaaaccttgcgatgaccggatccacgaccgccgctgagatgttattcgatatgggcagaaccctgcgcgcgctggtagaagggttgctggcactgcaggccgaacagggcgcacttgccgacaagctgctgcgcccgattgaagataatccgctgcgcctgggactggattatcacggcactctctcgctgctctttgccgaaggacaaagcccggtgcatctgtcggcgcctgccgcggtgacggaactcctcagtaatatccgcctgcagcatgcggccagccagaaggcgaccagcgtggcgctgcacagcgtgcttgaggcgttttccccggaggggctgctggcccgttttgcccactaccgccgtggcgggcagggcgaaagtgccggatgggagtgggaaatgtatcagcactatttcagggagctgacctcatcacgccagcagggatttgaaaaactgttccgccaggtgtacgcccaggcgtatgaccgcgcggtgcgcgaagggctggagccgctgtga

SEQ ID NO: 445287 - DNA, 519 bp, Serratia marcescens
atgcgaagcgttgtcctgatgttgatactcacgctatccctggcgggatgtaccaccatgggcaagatggcgaaggtggcgatgaacccggatatccaggtcggtaaccacgacgaccagccttccacggtctccttcagtctggtgggggagcaggacatgaaccccaatgagagcggtgaggcgtcaccggttgaatttcagatagtcatgctgtctgaggattcccggctgcttgccagtgattacgatcagataaccgccgacctgccaaaggccctggcgaaaaactatctcgaccaccaggactacaccctgctgccggggcagtttaaatacctgcctgccgctgaactggataaaaagacgcgctatatcggtgtcgttgcccgctacgctgatccggacattacccagtggcgcaaggtgatcccggtgaaaagcaccgggcggcattaccaggtgctggtgcacctgcgtatgaatgaagtggacctgcaacaacaaacagaagaataa

SEQ ID NO: 445288 - DNA, 1338 bp, Serratia marcescens
atgtcgatccgtaaccgcgttatctggcgcgaagggctttttatcaagccccagcattttcagcagcaacagcgtcatgtggattacacgctgcaggcgcgtctgagtgccatcagcgattatttcagtggcctgcagtcactggacatcaatgaagagtacctgaattttgggcgtatcgcgctggtgggcgcccggggtgtgatgcccgatggcacggtgttcaatattcccggtgatgatgcgctgccgccgccgctggaaattacggatgatgcggtgacggggcagaaggtttatctggctattccgctggcggtcagcggggtgaatgaggtgcgtcagccggaacagtctgtcgccacccgcctggaagcgcaccgctatgaggtgcgcgatcttcacagcgacggcggggatattaccgcactcgatctcgggcgggtgagtccccgtctgatgctggagcgtgacgatcgcagcgcctgggccacactggccgtcgcccgtattcaggagcggcgtccggatggcggcctggtgctggaatcggcgtttatgccctgcagttcatcggtgtcggctatcccggtgcttaaacgttttctgggcgaatccgcaggactggtggccgaacgtgcccggaccctggcacagcgtattgccgcgcccggacagcagggtgtcgccgatgtcgccgagttcatgatgctgcagttgctgaaccgcatgcagccccggctttcccatcttgcgcgcctgggcacgctacacccggagcgtctgtacgaaacgctggtggcgttctgcggtgaattgatgacctttacggacggatcccgtctgccgcctgagtttccggcctatcgtcatgacgatccccgacagggttttgaaccggtcatgcacgccctgcgtcaggcactcagcacggtgctgtcgccgcgcgcggtctccctgcaactgagtaaacaggcgtatggcgttcatcttgcggtcattgctgaaagcgaactgctgcagagtgcgatgttcgttctggccgtgcgagccagaatgccacaggagcaactgcgtaagcagctgttacagcaggtcaaggtggcctcaggcgagaaaattcgtgagctcatcagcctgcagctccccggcgtgccgcttcagccgctgccggtggcaccgcgccagttgccttaccacgcgggttacagctacttccagcttgaccggcaaagtccggcctggtcagtgctgatgaccggaaacacgctggcgttccatattgccggtgagtttcctgaacttgatatgcagctctgggctattcgcagccagtaa

SEQ ID NO: 445289 - DNA, 777 bp, Serratia marcescens
atggcaactgatgcaatgcaccacgacggcctgaaaggccttcttcatgaggatgcgggcctgacggacagtgatcctgattatgcgttccggatgcggggtaacagcctgaatccgatcgttgacgcggtcacgccgctgttcggcatggtggcccgcgtgcgtacgctgagtcgccatagcgatgtggccggtctgtatcagacagtggcaacggaaatccgtgcgattgagcaggagctgcgggggctcgactatgagaatggcgtgatcctgtcgtttcgttatgtgctgtgttcctttattgatgaagcggtgatggcccatgaatggggacaccagagcgtgtgggccgagaactccctgctgtcgcagtttcatggtgaaacatggggcggtgaaaaagtgttttctgtccttgataagctgcgggacgagcccgtgcgttatcgcgacgtgctggaatttattctgctgtgcctgctgatgggttttcagggacgctatcgcctgatgccggacggcaaaaaaacgctgcaggagataagccagtctcttcagcttcagctgaacccggaacccgtcactcagccgctggtgttacatcttgattttggtcagcaggccgccccgtatcgtctgtcccgccaggtgtcactgcgcaccgtcgcggtcagcgcctgcctgctgatggccggcgtttttctcttttttcatcatctgctcagcaatcagacgcaggacgttcttcgtcagttgagtgaactcttaaagtga

SEQ ID NO: 445290 - DNA, 2592 bp, Serratia marcescens
atgatccgcattgatttgcacattcttgttgaacgtcttcatcccgtctgtcgccatattctggaagaggcggcggccctgtgcgtcagccagcagggcgctgaaattcgtgttgagcacctgttactgaaagcgctggagacgccgttaagcgatatccgcctcatcctggatcatgccggtatcgcccatgaagaggtgcgggctcttctggacgttgcgggcatggatacctccctggcaccgggctatccggcgttttcgcccctgctggtggagctcctgcaggatggctggctgctggcttcggctcagatgcatcatccgcagttgcgcagcggtgtcgtgctgctggcgctgctgatgacgccgggacgctatgtatcacccgccgtctcccgtctgttgtcggggattaaccgggaacggctgacgcaggcgtttgatgaatgggtgaagggctcggcggaaggtgagcgtgacgctctggtggaaaacgcgcatgcacaatcccctgtaacgggggagctgctggctcgctttacgcataacctgacgcaggatgcgcgcgacgggcggctcgatccggtgctgtgtcgggatgatgaaattgacctgatgatcgacatcctgtcacgccgtcgtaaaaataacccgattatcgtcggcgaggcgggggtgggtaaaagtgcgctcaccgaagggcttgccctgcgcattgttgccggtcaggtaccggacaagctccgggacgtggaactgctgtctctggatttaggggccatgcaggcaggtgccgctgtgaaaggggagtttgagaagcgctttaagggggtgatgcaggaggtgaaggattcaccgcgtcccgtcatcctgtttattgatgaagcgcatacgctgattggtgccggaaatcaggcgggtgggctggatgtctcgaatctgatcaagcccgcgctggcacgcggtgagctgcgcacgattgctgccaccacctggagtgaatacaagaaatacgtagaaaaagatgcggcgctctcgcgtcgctttcagttagtgaacgtcggcgagcccgatgtggcgcaggcgacggttattctgcgcggactgcgtagcgtctatgagaaagcgcacggggtcctgatcgatgaggaggccctgcaggcggcagcgtctctgtcagcgcgctacatctcaggtcggcagttgccggataaagccattgatgtgctggatacggcctgcgccagggtggcgattaacctgaccacgcctccccgtgaagtcagccatctgcagacccggcttgaacagcgcgggctggaaatcgtccagctcaagcgccagtcgcgcattggccttggcgatcaccaggcccggctcagtgagctctgtgctgaggaacaggcagagcgtgcaacgctgataacggaagaagagaactggcaggcgcagctcaggctggtgcaggcgattgtcgcactgcgcgagcaattgttgacgacagacagtgaaggcgatgacgaatcggtggccacactgcgcgggcttgagcaggagcttgacgcgctgcaggcatcatcggtgcgggtgtctgcgcatgtggatgcccggcaggtggcttcggtggtggcagaatggaccggtgtgcctgtcaaccgtatttcgcaaagtgagctggacgtggtgatgaacctgccggcctgtcttggcgacgtcatcagggggcagtcgcttgccattgaacatctgcaccggcatctgctgacggcacgtgctgaccttcgtcgtaccgggcgtccgttgggcgcatttttgctggtgggccccagcggggtcgggaaaaccgaaaccgtggtgcagattgcggagctgctttttggtgggcgtcattacctcaccaccatcaacatgtccgagtatcaggaaaaacataccgtctcacggctgattggttccccgcccgggtatgttggctttggggaaggcggcgtgctgaccgaggccattcggcgtaaaccgtactcggtggtgctgctcgatgaggtggaaaaagcccatccggacgtgctgaacctgttctaccaggcgttcgataaaggtgaaatggccgacggtgaagggcgggtgattgactgtaaaaacgtggtgttctttctgacctccaacctggggtatcagaccatcgtagaccacgctgcggatcctcaggcactccatgacgcgctctatccggagctggcggcctttttccggccggcactgctggcccgtatggaggtgatcccttatttgccactgtcgtccgacacgctgagaagcattgttctggggaaactggctcatctcagcacgctgctggcgcagcgctttggggcgaacgttgagaccgacgatgcggtgactgatgagattttgcgtcgggcgacccgcagcgagaatggcgcccgtatgctggagtccatcattgacggggcactgttgccgccgctgtcgctgaaattgctgcagaagatatccgcggccgaaccggtatcccggatctgcattggtgtcgatgccggcgagtttgtgtcagtggtggaagggtga

SEQ ID NO: 445291 - DNA, 360 bp, Serratia marcescens
atgctacaggcgctgcagttcgcagaatccctgatccagccggacaatgacggcgccctgggcgactggctgctcgccaccctccgtgaatgctggcagcctcagggcgttatcctgggactgtgtgattacagcggacgtttactggcgtgtaccgggtatcatcctggcggagcatttcgtctggagttgccggtggatgacttcggccatccgctggccggtgtggtacatgacaacgctccgcatctctgggaaaccctgaacggggggggcgcggacagagcacgcgggttttcgcgacctgctgatgaccatgaaggcaacgacaggcctgctggcactgcctgtctgcgatga

SEQ ID NO: 445292 - DNA, 1230 bp, Serratia marcescens
atgaccatgaaggcaacgacaggcctgctggcactgcctgtctgcgatgaaacgcaaaaaattaccggggtgctcggattctttgatgagtcggatgcccttcagcggtggtctgacagcgagttacccggacatattctccggttgtttaccctccagcgcagccggttgcatcagatgcagcataatcagaaagaaagccagtgtctgcgcgattcactgcgcagggtgacggctgagcagtcgcagcacgacaggctgacgcatctgctggaaagccgtctggtcggccagtcggctgtgatacagcagcttcgggagcgcatacggcatgcggcggcacattccctgtcggtgctggttgaaggtgaaacgggttccggaaaagaggtagtggcgcagctggtgcatgaatgctcctcccgtgccgggcagccgctggtcgcgctgaactgtgcggcagtccccgaaaacctgattgaaagtgaacttttcggctggcagaaaggcgcgtttaccggcgctaacagccataaagaggggctgattgcacgggcgaatggcggcacgctgtttctcgatgaggtgggcgatatgccccttgtcatgcaggccaaactgttacgcgtgcttgaaacccgtcagtaccgcccgttggggggtgataaggagcagtattccgattttcgggtggttgctgccacgcattactcgctcaggctgcgcgttaccgacgggcattttcgccaggatctgtaccaccgtctttgccagtgcgagatcctcgttccgtccctgcgtgagcgtcctgaagatattccgctcttgtgccgccattttattgcgactttcagccagcgcgacgataaacatcctggtgacatcagcctgacgtcgctcaggcaactgctcggctattcgtttccgggcaatatccgtgagttgcgtaacatgacagaggtcgcctgcgcacaggccgcagacggtcagatgattgacgtacaggaaccactttcggcgccatctgatattcgttcacaggcgaaagcatccgaacctgatgattacccacatgtccgggatttacgtgaagccgttcagacctttgagtcgggtgttattcgctcacgtctggcgttttttagcggggatcgtcagcgcgtggctgagagcctgaatattccgcgccggacgcttgatcataagtgtcagaagctggagaaggcatga

SEQ ID NO: 445293 - DNA, 555 bp, Serratia marcescens
atgatggggatgctgacgttattgccactactcgccgcgctgacggggaagtcggttgccccaggtggtctggacaagtgccagtcggaacaggatcccacgttgcggctcgcctgttatgacgccctggcgcgttttcatcattccccggcacaacagcaggtccgtgatagcggatttcagttgacgaccgatcctgtaaagggcgatggcgtagtgatccgcacgatcccgtccgccggggtaatcacggtgtcctgccagagtgggatcacccgactcagcgtgcgacctgccatgccctggcagggggatacggtgatggcggatgttgacggtgaaccggcttccggtaactggtttgtgcgtgaccaggggcaactgctggagtttgcccggggtctgcctgccattgacgaactgcgtcactggttcgggcatcaggcactgacgctctcgaacgctcacggccagtccatccgtctgccgctggacgggctggaaagtgccatcaggccgttgcgtcagcagtgtcgctggggaggcgcgtcatga

SEQ ID NO: 445294 - DNA, 1398 bp, Serratia marcescens
atgacactccggcatccctggagccagcgcctgctggcagtgttgtctgatgagctgacggtaagcgcggtgagcgcagacgatccgctgtgggaaaaaacagagaccgaactggtgaaactgggttcgcttgctcacagtgaggtgagtctggatgctgtggcgcttgactgcctgacgctgctggaaacccgtaccaaggatatgcgcgtactggtgcaactggtgcgctgtcttcagcatccggcgaccaccgcatcatggtctgctgcactgatcctgatgaatgactggctgtcggcctggtggacgcgggcatggccgatcagtcaggcacaaaagctgcgcctgatggtccagatggttcgccgttttgagggggcacaggcacgcctgtgtgagcgggcaacggggagcgaactcgaagaggtgatggtgctgattcagacgctggcacggacctggggagcgctgatgcccgatcaggacagcttgtttgatgggttactcagcaccctgcagcgtgccgcgcgccacctgcaggcgcagagccaggacaatgcagagtgcctgccttctcccgcattaccggcggcagcgtcaccagagcctgttacccgcaacgatcgcatgaccctgaacatcgacaatgccgatgaacgggcatggcagcagacgctgcttaaggtggcagaccgactgactgaacagcattcgggcgaggcggtgggataccgtcttcgccgttatgccatctggcacaccatcacgtccgcgcctgttgtcagcagaggaaaccggacgccgctggcggcggtatcacctgatcgggtgagtgaatatgaggcagcacttgcccacgccgataccgccctgtggcgtcagacagaaacgagtctcaccctttcgccttactggtttgacggtcactggctgtcagcgcagatggcgacagtgcagggatttgccgacgttgcacaggctatcagggatgaactcctgcacctgctacaccgtttgcccgcgctgagaacgctgacgttcagcgatgacaccccttttttatcgtcccgttgtgaacagtggctacggacagcagagacgcagagtgaggggaccggaggtgatgtgaatgccgcgattggtgcctgccgcgaagagcagggactgaatgcggcgctggccctgctggaagacaacatcaggtcgcaaagtgagccccgcgaagccttttacgccggactgatgctggcagagctgctggaggctgaggggatggcaaatctggcagagctgcattaccgccagctctggcagcaggcgcaacggttgtctctggaacagtgggaaccagggctggtgaaacgtctggagcgtgccgtccgggcgcgccattaa

SEQ ID NO: 445295 - DNA, 3498 bp, Serratia marcescens
atgctgaaacacattattggttttttgcgccaggggctgcagaaagtcaccttctcctggctgctgcttgcggcggtgctctgggtcatcatcctggtggccgtctggtggggcggacctcttttcacgtttaatgacgtgaaaccctttgcttctttctggtctcggggattatttacgctgggatggctgtggcttgcctgcattgtcatgctgtggcgggtctggcgccatatgcacaatgcccgtcagcaacaacgattacaggagaacaggcaaaaagatccgctgcaggcgtttgttgatggccagcaacgcttcctggacggctgggcgcaggcactgaaagcactgccaggccaggggtccgtgtacggtaaaccctggtacatgatgctcggtctgccgggcagcggcaaaagcagcctgctgcaccgtgcctgcccgccgaataaactccatgcgcgcctgcacaatgaattacgttccctgaaggaagggcagaaggtggattgctggctgggagacggggcggttattgtcgatcctgacggtgatctgttactccagactggcggggaaacggaaaacaaggatgagcagcattcccggctgtggcggcatttgctgacctggctgaaaacgcaccgtcggcgccagccgctgaatggtctgatcctgacgctcgatctcggggagctggcgaggatggggacatccgcccgtcatgccagcgcccaggtcctgcgtacccggttgatggacgttgccgatgagctgcatacgcggctgccggtgtatgtggtcctcacgcacattgacatgctgcacggcgcgggggattttttccgccagctggatgcgcagacccgacagtcactgctgggcgtgagctttagccctgacacgggggagacaaactcatggtccggcgaactggatacattctgggatctctggctcagccagcttaacgcggcgctcagtgccaccatgctggaactcccggcgcaaacgtctacggcagatgcgtttttgtttatacgccagcttgcgggactgaaatcgttcctgcagacgatgctgtcggacgtgctggctggggaggaaatggctggtttcccggtacgggggatttatctgagctcggtgtaccagcagggtgtgccttttgatggcttctcccgggcaacggcccggcgttatcgtctggcggaagcggcatatccggccgcacggggcgagtccagcgtctggtttgtgcgccagctgtttacggatgtggtgtttccccaggcacatcttgcgggcgaaagccgtttacatcagctgtatcgtcgtcgccggatgtccatcggtaccggcctcatggtgctgatggcttcacttttcagcctgggctggtaccactattaccagactaaccgggatgcggggcgtcaggttctgcggtctgcccggcagtttatccatgcgcgtgaaaccgtcggacaacaggcctttggcacggcgctgctgccccggctgaaccttatccgcgaagccgccctctcttacggtgattatcgcagcaaaaatcccctttttgccgatatggggctgtatcagggagggcgtatcggtccgtatgtggaaacgtcttatctggcgttgctgcagcagcagtttctgccggctgtgctcgaagggcttttgcaggatttgcagcaggcacctgcggccagtgaggacaaaatgtcggtactgcgcgtcatgcggatgacggaagatgcctcgggtcgcagcattccgctggtggagcagtatatggcgtggcgctggcaaaaggcgtttccggaacaagggcaggtccagcaacagctgatgcagcatctggattatgccctcaggcacaccgactggcatcacgcgcggggacaacaggatcctgatgcgattgccgcctggaagccttttgtgcagcctgtcgctgacgcacagcaggagctgagccgtctgccattatatcagcgggtgtatcaggggctgatggtgcgggccaccgcgacgttgccgccggatttgcggatacaggatgaaaccggccagagttttgacagcgtgtttgtgctgagagatgcgcatgccggtacggtgccgcgcctgttcacctggtccggctacagcgatttttttcggggtcagaataacacgttgtttgatttgaccgggctggatgcgtgggtgctggggcaacatgaacaggttcagctcagcggggccgatcgcagtgaaattcagcgtcaggtgagcgatcgctacattagcgactataccggccactggcagaaactgttatccgcgctggatattcagccctttgattcaccggagcaggcgctgtcggtactgaataccattaccggtgatgaacagcctttccagcatattgtctccctgctgagcgataacaccgccgtccgtccactgaccggaaaaggggctgcacaacagcgagatacccttcaacggatagcgcgtccgtttacccaactggacgataccctgaaaaatcgtggcgataatgcgccacttatccagggcgtaaaccagaaacttgtcggcctggcacagtggctggagcagataaacagtgccggcgatccgggtgctgctgcctttaaggctctgcagttgcgccagagcgatccctataaggatccggctttcagcctgcaacagtatgcgcgggggctgccggccccactggatcgctgggtcggtcagattgcgacacaggtcgctgacgtgacgacgtcgctggccatgtcatcacttaaccaggcatggactgagcaggtactgaccccgtttaacgacatcctggctgaccgctatcccttcaacccgacctcttcgcaggatgcgtcactgtctgaagtgacccgtttctttgcccccggcggcacgcttgatggcttttatcagtccagcctcaagccgctgctggacagcggcgtcctgaaacaggatgccggccacggccatctgcaggcgctggtgaaccagcttgaccaggcgcagcggatcagggaggccctgttgaatactcagggacagccggaagtgcactttgtggttgaaccggttgaactgaccgccagtaaacgccgcagcgtgctgaatcttgacggccaactggtggagtacagccacggacggcggcagaaagtgccgctggtctggccgaacgccctgcgtgacggggcggagagcaaactgacgctgataccggatgacggagcccgctcaccgcgaagcctgggctttaccggcccgtgggcgatgttccgcctgctggatgccggcaaccggacgcaggtgagccggggttcatttgatgtgcgctttggcgtggatgacggcgccatgacctggcgggtctacagcgacgcagatcacagtccgtttgcgacgggactgttcagccagttccgtttaccggaaacgctttattaa

SEQ ID NO: 445296 - DNA, 1428 bp, Serratia marcescens
atgcatgacactcaacaggcgctgagcgtggggtgcgatccccgcgtgttaccggaatacgaaaggctgcgtaatgaaatcaataaactcagccacgcgtcacgtccggaagtggactgggcactggtgcatgagatggcggaggctatttttgaaaagcagggtgtggatctgcagactgctctttactttacgctggcccgtgcccgtctgcatggcctgagcggttttaccgaaggctgcgagtttctgagcacgcttatcgtgactcagtgggacaacgtctggccgccgatccatcagtcccgggcccgggtggaaatgcttgactggtttatcgcgcgcgtgagcgatgtggttcgtcagtacccggtcggccatgacgataagcgcctgatttaccgctgtgagcgggcactgcagctcctgagcgaaaagctgcatcacgcggggctgttccgggtgccacggattgagaacctgctgcactttattgaagggtatacccgcctgtttgacgaatcagaaatcgtgattgtatcgccggagcaggacgcgctgaaaaaagagatgcaggtgccgccggtggtgtatttccggtctgaagaagcggacggcagtgtgagtccggatctggcgcagctcccgaccggcagcatcattgtgggccgggaaaaagggtcgctgaagccgacggtgctgaaaatcaagtctcataagcctccgcgtccgtcgtggttctggtttgtcagcggaatgatgagctgcctgctgccggtactgatggtggccggctgggttcactggaacacgcagcagtcctcccggcaacacgatgccacggcgatgctggaagcgaatgcgctgacctggcctgtggccccggatgccgccaggctgagtgatgtccgtctggcgctgggggaacaggctctgcgtgacatggagccacaaataagccgggattatcaggcgcagatggcgcatgtgcagcagctctcgccgctgtgggcctatcagtatgccgacgggctgcgacgttccctgcgtatgctgtacccacagtctctggcggtcagtgcgatggacagccagtggcagcagatgctgaacacacagcgtggggtgacgccaccggtctccggctggccggatgccaccgcacgggtggatgcgctgctggcagagctgcagaacctggaacgcctgcacaaaacggtcaccatctcttacctcaaatcctcgctttacgacatccgtaaggacatggatcgcgatacgccctttagcgtacgacttaaccggctggaagccctgcagcgggcaaaccagaccgtcagtcaggccgagctggatgccctgcagtcaacgctcaaatcgtacagcgtgcgactgtatcagctgcagccggcaccgcgggacttgtga

SEQ ID NO: 445297 - DNA, 1392 bp, Serratia marcescens
atgatgccgcgtttttatcgcacattacgcctgatggtgctggtcgttaccggggggctgagcgcctgcagcgcgccgctgtcgtcgcttccggaagctgcgctggagcagaaagcacaggccggggatgcgcaggcgcagtacgtgctggccggaaagctgtcggcccgtggggaatacgcacgatcgctggctttgatgaaacaggtggccagtcagtcggcggcctcggatgtgccgcgctcaacccgggcggatgcggcgcgtcaggccggggacgggtaccacaccgggctgggggagccgcgtaacgacgcgcttgcccgtcagtggtggacccgggcgtcgtcactcggtaatgcgcaggccagtatgaaccttgccggacactgccaggccgcacatggcacatcgcctgttgcggagtgcatcagtcagtttgagaccgcggcccgtcagggcaatgcgcaggcacagctgatgctggcccgctggtatcagacgcagcctgagggtgaaaaaacggcgctgtcctggctgcaaaaagcagccgcgcagagggagcctgctgccctggcgttgatggcccaccgtcatgaaaccggcaacggtgttgataagtcagaggatatcgcccgccgtgagtaccgtcattctgccgctctcggcaacccgcaggcacagcgctggctggcggagcacagtgaaggcacggaaagtctgacgtggtatcagaaagcggctgaaggtggcgatgtgactgcgcaacgctggctggcacaggccagccttagcggcaacggtgtggcgcaaaaccagactgaagggatgctctggcttaagcgtgctgccgataaaggcgatgcccgcgcacagtacctttacagccagtaccagagcactgatgagatgcggcttcactggctgacgctgtcggcgaaaggcggcgaccttcaggccgcgcgtgcgcttgccgggtggtatgaaaaacagggcgatgaggtgcgcgccagaagtgcctggcagcagctggcggcgcggggcgatgcggaaggtcgctatcactacggcgatatgctgcgtcttggccttggcggaccacacgattacacgcaggccttcacgcaataccggcttagcgcgatggcaggaaaccggatggcgcagtaccgggcaggtatgatgagccaggacggactggggctaccacgcaaccgaatccaggcttatgcctggtactcgctggccgcaacggaaaacgccaaagatgcggtggatgcactgaatgcgctggaagccctgcttaagcccgatgaaattaaagccgcacagaagctggcccgggagtggagcctgcgtatcgctcagggtcagaacgaggtggctcgctga

SEQ ID NO: 445298 - DNA, 519 bp, Serratia marcescens
atgccaacaccgtgctatatcagcatcaaagggaaaacccagggcaacattaccgaaaatgcatttaccgcagaatctgtcggtaacatctatgtggaaggccacaaggacgaaatgctggtacaggaagtgaagcatgtggtcaccgttcctaccgatccgcagtctggtcagccatccggccagcgcgtacacaaaccactgaaattcaccgtcgccctgaacaaggctgtcccgctgatgtacaacgctctggcctccggtgaaatgctgccggaagtgaagctcaactggtaccgcacctccgtggaaggtaagcaggagcacttcttcgcgaccaccctggaagacgcgaccatcgtcgatattaacctgcatatgccgcactgccaggatgcagcgaaatcggacttcacccagttggtcgaagtctcgctggcctaccgcaaaatcacctgggatcaccttaaatccggctcgtccggcagtgatgactggcgtaaaccgatgagtgcataa

SEQ ID NO: 445299 - DNA, 1971 bp, Serratia marcescens
atggcggacggtacgggactgcagtttacagtcaggatggagaagttatctgccagcacgtttgcggtggtggaatttgagctgaaggaggtcctgaatgcgccatttgagcttagcctgaaactggcgagcccgcagcccgggattgattttggcgacgtgctggaccagccgtgcgagctgatggtctggtacaacggcgagctgcagcgacgggtcagcggtatcgtgagtcattttgcgcagggggatacgggattccggcgcacccgttacgaggccattgtgcgacctgccctgtggcgtaccgggcttcgcaccaactgccggattttccaggtgaaaaagccgcaggacatcatcggtgaactcctggaggaagcgggcattctggactacgccttctcgctgcgccaggaccatgtcgcccgcgagtactgcgtgcagtaccgggaaagcgatctggactttatcacccgcctggcggcggaagaggggatgttcttctggcatgagtttgaggcgggaaaacaccgggtggtgtttgccgaccataccggcgcgctggagaaaaaagacaccccggtgttcttcagcctggcgaaccaggggctggagcagggggcgtatatccgccagttccgctatgccgaagcggtgcgaaccacggcggtggagctgcgggactacagtttcaaaaatccggcttacaaccagtcgaacaaaaaaatcagtcacgatctggctcatcagcgtgagccgtacgagcactacgactatccggggcgctacaagcaggctgaaagcggtaaagccttcagcgcgtaccggctggatgcgctgagggctgatgcggtgaccggtaacggcctgtcaaactgcgcagaactccgcccgggactgcggtttatgctggaagagcatcagaacgaggcctttaacacgcagtggcaggtggtgtccgtgaagcatgagggaaaacaaccgcaggcgctggaagaggaaggcggtgacaagcccaccaccctgaccaacgaatttggggttatcagaggagggacgtcctggcgtgcgctgatgccggaacgtccgatggtggacggcccgcagatagcgacggtcacggggccggcgacggaagaaatctactgcgatgaacacgggcgtgtgaaggtgaagtttccgtgggatcgctatggcaacaacgatgatctgagctcctgctgggtccgcgtcagtcagggctgggcggggggccgctatggcatggtggcgctcccgcgcgtgggccatgaggtggtggtgagttttctggaaggggatccggaccagccgattatcaccgggcgtacgttccatggggtcaatctgacaccttatccattaccattgcataaaaaccgcatggttctgcgttcagacacggttcagggtgatggctacaacgaactctcctttgaagataccgcagggagtgaagagcttctgctgcgcgcccagaaaaatatggcgttacgggttcttaattcaaaggacgaacgtgttgaatacaaccgaaccagcagcattggtcatgacgacgaactggtggtcgccaatgaccgtaaagtaacggttgagggaaatcaggaccagaaaatcaccggaaataatctgctgaaaaccgggggcaaccagggggtacaggttcagggtgacctcgctcagaagatcaatggcgctttcagcacagacagtaatggcgatttgacgttgcagagtggaagcaaactgacactacgggtaggaagcagttttatcgttattcatgaagggggcgtggatgttaagggcagcaccatcaacctgaactctggcggtagtccgggagatttactgctccccgcagaaccggcgatcctgaaagcagcagcggcgcagggggctttgtttgtagaacattgtccgatggaggcacaaaataatggatga

SEQ ID NO: 445300 - DNA, 819 bp, Serratia marcescens
atggatgatgttattacctgggcgattgtggacgcggcggcggaaccagaggtcttcactatgctggacacgctcgatccgcctcatgcttgtctctatgccgaaccggtgtcagacgacatcctcaacgtggcaccgtttctgatactggcgacacaggatgtgctggcatggctcaaagtgcgtcgaccgccctgggggatgctgctggaaagccaggccagtatgaccactctgcgtcagcatctgcgcaaatatctgcatgttctgctgccaggggaaaaaacaccggtttattttcgcttttatgatccgcgcaatatctggcctttgatatcggtcttgtccccctgggagctgcattcatttctcgggccgataaatgcgattacgacgcactggcagggtgaggagcggcgtgagcacttcactgagttgagaaaatcatttcattcacagagtgggtcgcggcggaaaatgctgcagatatcccaggaacaactggacaagctgacggctgtgtttgaccagcgttacgtcgacactctggtgtccaggataagcaactggtcagaagcaggcagcgagccggcagatgcagcagcgacaggcgaaatatatcactggctaaagcaacagggtattgacgatgagagaagcatactggggttattccggttgtttcatcagcggggatatctgtcgctggctacgctcccgcctgaataccgtacagcactgaatgaccctaatgaaaccggagccttcaaagctgaatccctgctgctccgtgagatgggttgtttacctcaaggataa

SEQ ID NO: 445301 - DNA, 216 bp, Serratia marcescens
atgcgacacaacatccagaaaattcagcggcctgctgacaaagggatagcctttgcactcaccgacctcgaggacataatcatttctgggaagcacatcgcggacatcttttgtcatgacataatcgacaaggaaatcaacggaatcctttccgttaaaaaaatcagctttcttttcgtcaaaatgagccttatataccgttccacctttatgtaa

SEQ ID NO: 445302 - DNA, 528 bp, Serratia marcescens
  misc_feature (28)..(37): n is a, c, g, or t
atgagatcacacgttggctggaagaatnnnnnnnnnnaagatgagatcacacgtttgctggaagaatgcagaaaaagcagaaacgaaagtgcattctgggtagcttgcacatgcttagtcacgggcgctcgatgggatgaagctgaatcattgacaaccaagcagatcagaaacctcaaagtaagttttttcaaaaccaaagggaaccgcaatcggacagtaccagttagccaagagtttttcgattcactaccaaaacctgaaaaggctggtcgactttttaagtcctgttattcggcgttccgcaaagccgtagagcgtgccaacctagatcttcctgctgggcagttatctcacgtacttcgtcacacttttgcatcacacttcatgatgaacggcggaaacatactggtgcttcaacgaattctggggcatacagatataaaaatgacaatgcgttacgcccactttgcccctaatcatttgcaagaagctacacatctcaatcctctggagtataataaatga

SEQ ID NO: 445303 - DNA, 957 bp, Serratia marcescens
atgctaaagaaactattttcagtatgtattgcctgggtgttgttgtatggggtgggatacgcgcgtgagcttatcctccctaaagaaatattgccagatgagtatattgcagaacgagatcaatatggcaatttcattgcagaagaaacctcccgtttttattccatgggtccggatgaatgttcagggcctgcctatcggtgtcgggggattatggtctctgcatttgaaagtgataatgattactggatgcagtcttatccggctctcagcaaaatatcattgtcttactggacaaaacgtacgacaggcaaaacccgttataataacgcggcctggttggggacgggatttatgctctggccgtccgaggtggctgaccgcctttcgggtggacatgtgtttgaaccggaatatacctgtgtatttgcggctgaggctctgactggcgaacatctgcataatggttgtggtggtgatggtgggcattcctggcctaaatgtcaggcgctgggcatagagaatttgcgccagtatactgaccagtttggtcatgtccggttaaacgcctgtggttttgctctgggaataacgccggagagtgaccggagggcgttcgacaatgcgctgtcattgcagctgagtgaggtcagcatttatggcggaacattctataacgaagtactgacaaaagggtggcgtgatgacagccctgaaaaaattccgctgttgggcttcttttatattcaggggcgcaacaggttacaacctcatggttatctggggatagtgcagaataatcagatggctttctataaaaagacggatatatttgtccccgtgatcagggttacaggtacggactgggaacatgtcagatttgaatacaggattgcagaccagtctgcggatattcctgaaaaggtgagggtgaatgctgatatgtcgataaactaa

SEQ ID NO: 445304 - DNA, 642 bp, Serratia marcescens
atgtatctcagggaaaaatttctgcaggcgttgattcattctcaacctgtgcagttatatcacaagggacactgtctttatggtgctgatgagccgttcagggggctgtttgtggttgtgtcgggggcggtaaagcattaccggctgacggaggaaggggaagaaccgattaccggtttttgtcttcctggagaatggtgcgggctgccggatttatcatcagggcggtacttagggttcgcacaggcactggacacctgttcggtttgccgttttccgcagaccttgctggctgatgtcctggcagaaccgcatggaagacaggagatgtataccctgatgagcactgtcatcagggaaaacaaaggccggtattatcagattagcaaggcccgtgcagatgtgcgctttgtcatgttcattctggatttatcccgccgttttagccggtatggggattattcacgtgagttccacctaccgatgacacggggagatattgccaattatctggggctgacacccgaaactatcagtcgggaaattacgcgtctgggacaatgtgatctcatccatttcaataatcgttttattactattaggtctccggcgaagctggaggcatggtattgcagggggtaa

SEQ ID NO: 445305 - DNA, 852 bp, Serratia marcescens
atgaaacgacaccccctgaatgggaatgcggagaatacccgtcacggggtgatccgcctttgtaataaagcggtacattatcttgagccattctggcttcttgctgcactcggtagcgtggtgcttttatttgcagaatccgcgatgccggttatccctctgacgggatattcactgttgagctatcagagcggtgaatatctgtttacctttattttcagcgccgagtatattttgcgtttatcgggtagtcagcatcgcatacgctatattttcagcttttttggcgtgatagatctgatcacgctgttaccactttatgttctctggctgtggccggaaattgcggttgagtacctgacggtcatgcggttgctcagggtattacgcttactgcgggtggttaaagtgctgcgttattttgattctgcttcactgatatgggagaccctgtacagcgcccgcaggaaattattgttgtttctggggatggtcatgatcctgttgtgcctttcgggtggaatgatgtacgtcattgaggggccggaacatgggttcaccacgctcctggtgtcagtttactgggctgtggtgaccatgacgacagtggggtatggcgatataacgcctcatacaacagtggggcggatgctggcttctttactcattctgaccggttattcaatgatcgccatcccgacaggggtgatgagcgcttatatgacagaaatcatgcagcgtcgtcgcagacatcgcagttgtccgtcgtgtcagaatacagagcacattgatgatgcccgcttttgtcaacgttgcggcgcatccctggacaataatgatgctcagcattga

SEQ ID NO: 445306 - DNA, 1158 bp, Serratia marcescens
atgctgctgatgacggggctggtattaacctcctgtcaagcgccagtctccacaccgcccgcaccggtcagcatgctcagcgattcgtcagatttgatgacagattatggcgagccgcgtgtgaagcgtctggcagaaaagctgcggaacagccgccgcgaaacgacacacattctggtgatgggggactctcatacggcggcagactttttatccggtcaactgaggacgatgctccaggtgcgttatggtaatggcggtcccgggtttgtcagtccggtaaaggtccccggcaatcgttacagccatgtgaactacagcaaagcgagcggctggcggcttgaaaccagccgcaagacacaggacgccgcatttaccctgggcgggatgattgcatcgccggcagcgccagataacgtttcgcgtattacggttaccgacggcgaaatggcgctccgggcacaggccctttacctttcgaccggtaatgcgacattacgggtagggggtaacgcggtgtcactggtagagactcacggagggtgggcgctgtctccggcggtgccggtagccccttcattttctgtctctctgaaaggaaacggcgctcagctggccggtatctggctgacggctcgctattcccgtggcgtgattgtcagcgccctcggtattaacggggcgcagatctcaatgccggataaatggccggcagactggcctgggacgctgaaaaggctcagtccggacctggtggtactggcatacggtaccaatgaagcgttcaatgcggcgtttgtcgagggcatctaccgccatgacctgatcctccagatacgaaaaatccgccaggcggtccctgaggcggccattcttctggttggccccggaagcagtatccagcataaggatgctataggttgccgacagcgtcagtctccggtcctgaaaagagtgattgggatccagaagcaggtagcaaagaaggagcataccttgttctgggactggtttgcgtttatggggggagattgtgccatcgaacattgggcggcgcagggtaaggcccggtcagacctggtacatttgcaggcagccgggtacaaggaggttgctgacgggctgtgggaagggttgaggccggtacttgagcagtga

SEQ ID NO: 445307 - DNA, 1158 bp, Serratia marcescens
atgcacacttctgattatatccggacgataaacacggtcctgaaatccaccgttattctgctgacctgcctggtcacgctgacctggctgaaccagcggtcactggagcagtactgggcgctgcattttcatcaggacagcccctgggcttcattccgatccccgtggtgggccaggggcgggaaggtgaccgacgccgccgtatcggctgaaaacgcctgcttccgacagctggctgtgggcaaggagggacaggatggtggtattcagacgcagaagcccgcctctctgccgatggtggctgcgcctcagccggtggtggcagtggcggttaacgtcacgcccccggtgcggcatataccggagaatgaccgccagctcagtcgtctggtgaccgtctcacacactgaaaatgacggtggtataccggagagcggggaaaccgcatccgtcatgccagtaccagcgttatcctctccttatgaccatcaggggaaagcccttctgcctgccggcaaaaaagtgctgctgatcggtgattccatgatggaaggggtggccccccgcgtacagcagatgctccggcaggaatatcacacgcaggggataaatctcagcaggcgcagtaccgggctggcctaccccggtttttttaactggccggtgacgacaggtaatgcactggagaacgatccggctatcgggctgctggtggtgttcctcggccccaatgatccctgggatatgccggtggccagaaaccggccgttcctgaagttcagaagcgaggcctgggaggcggaatatcgccatcgcattgagcaaatcctgaaccttggacaaacatttcatattccggtcatctggcttctgccgcccaacatgcgtaaaagcgcgctgaaccagaatatggcctggcttgatacgttatatacctcagaggtcgatgcggcgggcgggatcgtcgtcagtgtgaacaggttgtttggttatccggatggcgttttttcccccacagcggatctcaacgggaaacgcgtgcacgtcagggccggtgatggtattcactacaccccggccggtgaaagcctgattgcaaaagcgattattgcgcagatccattttgaacagcagccggaggtctctgatgaagagtaa

SEQ ID NO: 445308 - DNA, 1392 bp, Serratia marcescens
atggcgaatttattttcagttgaatttttgctgggattctggacattcttcattatttactgggctgtgagtccatggggcagaattcagaatgtgatgttgttactggccggctattatattgtctggctggcgggtatttatcccttactggtgctgttatcgtggagtacctgtgtgtatcttctggtgcagatagccggaagcccccgatacggtaggcgggcggggcctgttttgctgtgcttactggtcgggtatttttttgtctttaaatactactcccccctgaatgacctgatgcagacttttccaggcttcctgcatgtgccgttttcgctgccggctgtcagtattctgttgccactggggctgtccttttatcttttcaatacggtcagcctggtgctgtccgtcgcgcgaagggagatggcaaagccgtcgataatggacctccttctgtacctgaattttattcccacgcttatcgccggtccggtcaaccgggcgacggaactgatgccgcagataaccgccagccgccgcactctggtcgactacaaacgggcgttgtatctgattgcgctgtcgctggtgaagctttttctgttgagctcatggctcaatgacacctttgtccttccggtatttaccctcccggcggggcagaacgggtgggactctttgctggcggtgtacggctgggcatggaatatttacttcaatttttcaggttataccgaccttgtaacagggcttgccctgttactggggtttcgtattgccaggaattttgcccatccctatctggccgggtccgttaaggcgttctggcgggactggcacatcagtctgtcgacctttattcgagactatgtgtattttccactgggcggaaaccgtaagggggccatatggacacagataaatgtcatggtagcgatggtgatttccgggctctggcacggcgcgggtatgacgtttctgctctggggtgccattcatggggccgggcttgtggtgcacaatctctggcaccggtgggggaaagtcaggcttcccggtttgcctgcccgcctgctgacgtttcattttgtctgtctggcgtgggtatttttccgggctgacagcatcagcgatgctgtgacaatactgagcaatattgccggcggcacgctgtcctcgttgtccccacagcagtgccgggcgttgttcctctttgtggggattatcgtcctgtaccccgcgctcgttgacatccggctgaccatcatagatcgcgtggctgatttacgctggtacacacttccgctggtcataattccactgctcgcactggctttcttccttgcaccttcgggtgtaccggggttcatctatgcacacttctga

SEQ ID NO: 445309 - DNA, 468 bp, Serratia marcescens
atggagattatccgtaaacactatgcgaagggtgttgaggctgaagagctgacccgactgctgccgggcagaagcgtcagtgcgatatttgctcgggctgaagcgatgggggtacagagcgggcgattctggcgtgaagacgaactgcgtattctgaaagcacagtacccggtggttggtactgaagtcatgcaccagctgccgggcaggaatgaggttgccgtcagggtgatggcgagaagactggggctgaaaaaatcccgtgaaagtcaggccgggtttcgcccctggagtgatgaggaatggacgttgctggagaaaaatatgcatctcagtgttgcagaacaacagtccactttatttcccgacagaaccaacagggcagtagaaaaagcccgggggagactgttacgtaaaaaaagtcagggaaagaataaccccgcgttgtcattgccgatcagcagctga

SEQ ID NO: 445310 - DNA, 567 bp, Serratia marcescens
  misc_feature (521)..(530): n is a, c, g, or t
atgactgataatacgaaaccaggcttatcaacagccaataatcatgatgagattgatctaagtcgcttgttgggaactttaattgatcaccgctggctcatcatcgggattactgcgttattctctgttgccgggatcatttattcactgttcgcgactccgatatatcaagctgacgcgatggttcaggttgaacaaaacgtcggtaactcgttggtcaacgacctatcccaaatgctgccgaacagtcaaccgggctcttccacggagatcgagctgataaagtcacgcatggtgacgggcaagactgtcgatgatctgaaccttgaaacggtggtgcagcaaaaatacttcccggtatttggtcgcggctgggcccgcttgacgggaaccgaacctgccaaaattgcgttgtcccgcctcaatgtgccagccaactcagacgatcttgagctggaattgacggtgatcgacgcaaagaactatgtgttgagcaataacggcaccgagattatcaaagnnnnnnnnnngcgctggaaagcggccatggggtttccttgctggtaa

SEQ ID NO: 445311 - DNA, 135 bp, Serratia marcescens
atggtctcgacgatgtgggtgaagaagaagccattgaagctgcagcaggtcctgcatttgttgaaacccttgaatattccgagcgtgttaaaggaattttgcattaccgaaaaggtgctgtttctacgcctatga

SEQ ID NO: 445312 - DNA, 681 bp, Serratia marcescens
gtgacgctgaataccagacaggtcagtttttacatggctcaacgtaataaaggtcttacccaggaggccgctgcggccaccaccggcatctctgttcgctccggacgacgtattgaaaaagggcagtggcaatcatcaggtgagcgacactggcggacacgtcaggatcctctggaagcggtctggctcagtgatgtgcttcctttactcgcttcccgtccgcagatctcgccgacaacggttctcgaatatctgcaggataaatatccgggccagtatcccgataaggtgcgccggacgctgcagcgccgtatccgtacctggaaagcctgccacggtgaggaacgggagatcatgttccgccaggagcatcaaccgggaatgcgggcgctgtcagattttacccagctgaaaggcacggttatcaccattaacggctgcccgctggaacacaagctcttccacttccgccttgaatggagtcgctggagctggatgcgggttgtcaccggtggcgagagcttcaccgctctggccgaaggactacaggaggctctgggtcaactgggtggtgtaccagcagagcaccgtacagacagtctggccgcagcatggaaaaacctgagcgaggaaggccaccgggatcagacagcgcgctatgccggtagactggccccatga

SEQ ID NO: 445313 - DNA, 213 bp, Serratia marcescens
atggcagtcacggtcgaacaccacagcccttccgggcaggacatgaccacagacagtgaagcagcggtaaccgaagccatgcggttgctggcccgctggttatacgactggctggaaagcgaatacggctggcagacctctcccgccattgttgacgacgacatcatcgacgctaaatacaccttcaccgcatccggtcagcgcttcggctga

SEQ ID NO: 445314 - DNA, 393 bp, Serratia marcescens
atgagaattttacctgtatccgcaaaacgggcggctgagatttgcccgtcacctggtgtgtcagcagtggctgtgtggctgaccctactgacgtacctgctggaccagcactacggtctaacgctgaacgacacgccgtttggcaatgacggcgtgatccaggaacacattgacgccggtatttcactgtgtgacgcggtgaattttatcgtggagaaatatgacctggtgcgtactgaccgtcgtggcttcagcgcagaaacacaatcgccacttatcagcagtatcgatatacttcgcgcccgtcgtgccaccgggctgatgaaacgtagcggttacagagccatcaccgatatcaccaccgggcaatattcactggagtccgggcaatga

SEQ ID NO: 445315 - DNA, 192 bp, Serratia marcescens
atgaagcgaataaccgttctggttcaccacatcaatcagttcggccagttcaataccgtcgatatctacggcgatccggcccatgttgagggccagtacgttgatggcgtcagcttcaatgttcagactaactttcattgcccggactccagtgaatattgcccggtggtgatatcggtgatggctctgtaa

SEQ ID NO: 445316 - DNA, 1347 bp, Serratia marcescens; identical to SEQ ID NO: 441698

SEQ ID NO: 445317 - DNA, 1134 bp, Serratia marcescens; identical to SEQ ID NO: 441637

SEQ ID NO: 445318 - DNA, 675 bp, Serratia marcescens
atggggccgctaaatgtgggtgatactaaaaaattatccccggattcatcttgcgaggtgaagataagcagggacactaaagatggaagtatagaaatcagcaaattcagaataagtgttaataataaaggtgatatgaccgctggcgaatcattaaattataatggagggagatataattccaaaattattgaggggtatacacatgatgagaaagattatggattatataaactcagcagtaactttattgcagatgacttacctcaatggtcttgggctaaggctacatttgtaacagaaaaagatctgccaatgatccgtaaagcatatgaaaagatatggtggatgatgcaacatcgtgatattgacggccttaaagaaattgcgaaaatctcaagctcagaaatggcttctgcagagggcacaacgactggaattatatttgtgtctactgactttcccgctcatgtgctcgatagttcattaaaaccagtgccaattgactggaatcattataaattaatgacctacaaccatgggcgattatttagaatgggggtgggcttctatcagaattcaccgcttcgatttaaaaacgataagggggtggttgtcttttcttataacccatatttttccattattaatgggcaagttgttttagttcgttga

SEQ ID NO: 445319 - DNA, 303 bp, Serratia marcescens
atgattcgccatattttatttattacgtttactgatagtgcattgccggaacaaatactggctgtcagaaccgcatttctgcagatccccgatcggattcaaggggttacaagtgtggagtggggagtaaacgacagcccggaagataagaatgcggggttttctcactgtgtgttaatgacgtttgcggatgaagcagcacgccagcgctatctgccgcattcggcgcatgaggatctgaaagcgatatttcgaccgatattgcgggaaattatcgtgctggattataccctgatcccctga

SEQ ID NO: 445320 - DNA, 162 bp, Serratia marcescens
atgagttgggataatgattcattgtggtcaaaaagtaaggtttttttgggctatggtgcgcaatggggcttgagttactttcacggtcaactatctcacactttagtccgtgcttacttgctgagcctgataaagatcaaaaaaatctccttgcagctttag

SEQ ID NO: 445321 - DNA, 2880 bp, Serratia marcescens
atgcagcaggtgaacagcaatgaacgggatatcgccctggttggcatggcctgccgtttcccgggcgccgaggacatcgaaagctggtggcataatttgatcaacggtgtcgaatccctggttcgcgtcgataacgatcgggatgatgccgtcgacaagggatatattcccgtcgccgcgcctgtggccggcgacatatctcgctttgatgcaggattcttcggtattagcgcgcgcgatgcgctgctgatggatccccagcagcggctctttttggaatgcgcctggcacgcgctggaaagcgccggtgtgacaccgggggaacttgaggataccgggctgttcgccggctgtagcagctctgactatttacgtcaggcgcaaggatccgagctactcgataaactcaatccttcgccgttcgagcggcaaataatgagcgataaagattacctcaccagcagggtggcctggcatctgggcatcggggggccggtgtgcaacgtgcaagccgcctgcgccacttcgctggtggcggtatacgaagcggtccacgccttgcgcagcggccgttgcaacctggcgttagcaggcgcttgtaccctaaggatcccgcaaaacgacggctattttgcgcagcaaggcatggtgttttccactgatgggcactgtcggccattttccgcagatgccagcggtacggtattcggcagcggcgtcggtgtggtggtgttgaagcgcctgagtgatgcgctggcggccggcgataacgtcgtcgcggtgatcaaaggcgtggcgatgaataatgacggcgcgcgcaaagtcagttttaccaccaccagtttgcatggccagcaacgcctgctgcgccaggcgatggacgatgcccggttgacgcctgaggattttcgcgccatcgaagcccacggcacgggcactctggccggcgatcccatcgaattcgaggcgttgaacggcgttttccgagagcatacggcacgacgggggttctgcgccatcggcgcagtcaaggctaacgtcgggcacctggaaacctgcgccggcatggcgggattgattaaggccgccctgcaaattcagcatggctggctcacgccgcagatcaacgttggctcaccgaatccggaaatggcattggcggagagtccgtttgagtttatctgttccgctcaacggtgggatcgcgaggatccgcgccaggccatcggcgtcagcgcattcggtattggcggtacgaatgcgcatgtcgtactggcgaggccgcctgtcatgccgccggtgcgaacagcggcctcattgtcctccaccgtcgtaccgatcagcgcacagtcagaacaggcctggcatcggctggtaaaacgctatctgcagcgaccgcacggcgaaaacgacgaacgcttggcctggagcgcgcaaagcggaagaaagtcgctgcgctatcgcggcaccttgcagatagacgatcggggcgcgttgagcgtgaaagaaaacatgatggatacggggaaagggcgcttgtcgatagttttccaattccctggccagggaagccagtttatcggtatggccagcgatttgatggcgcaggacgcgaccttcagaaaactgatgaacgacaaactgcagatagtgcaaacgcaagccgcactggatctctcggcgttatttaccggagaggccgcgcccgagtcgattaacgataccgcgttgacgcagcccgcgctgatcgccgtcgaaatctccgtggccgaactgctgatgcattacggcgtcgagccggattgggtcattgggcacagcctcggcgaaattgcggcggcctgggccgctggggtgttctcggtgcaagaggcgctggttttcgccgctcatcgtgggcgtctgatggccgggttgccgtccgggatgatgttggcggtagagctgagcgttcaacaggttcagccttggttgagtcatcagctatcgctggcggcagaaaacagtgatgacggctgcgtactgtccggcaccgctgaagccattcgcgcttgcgaacgccagatgcgagaccgaggcgtgcgatgcaaagccttgaatgtttcacatgcgtttcattcgaccctgatggatcccattcttgacgagctggccaatattgcgccgccgccgcgtgaatcggtgacgggggtacgttacgtctcagccttgctggcgaccgaagtcgaatgttcggcgcttgacggccgctattgggcgcgtcatgcccgtgaaccggtcaattaccaccgcgccttgcagcagctaccgcagcgcggcaagacgttgtttatcgaagttgggccgggttcgacgctcacggcgttggttgcacagctgaaatccgccggttctgtgaccgcggtgcgaaccttgccgcgtcgcgacgaagcgcagaatgaaggcgccgtatggatccaggcgctgcaaaaaatctggcgcgccagcgtcaacgttaactggcgccgcctgtggcaactgccgccttcgcgcatcgcattgccgatgtatcccttcgatccggcgcactggtggttgggcgaacgggacaggcaggggccgcaagccgagcgaacgccggcggcaacaagccagtcagatcctcagatggcgcgtatctggcgcgtttggggggatgtgaccggcgtgaaccccgattctaaccactgtgacttttttgacgccggcggacagtcgctgatggcgctgcgcctgctggcgatgttggagcaagagtttggcaaggcaatagggatggccgattttcttaagcggcctacgccgtggggcattaaacaacagttggaccaggctggagcattcgagcaagattctcattaa

SEQ ID NO: 445322 - DNA, 1287 bp, Serratia marcescens
atgcaaacccaattttttaatgtgaccgtcgaacaatgcgcctgccagcagacggcgcccgacaacctggtgaggatcatcgcctccggccagacgttctttttttaccgtgatgacttcagcgacagcgaaaatctgctggccacgctcgccgccggcgatcgggtgaagattggcgctcaccgcctgcgtgacggcagctactggctgcactggctgctgcacggcacgaaaggccggctggaacccgacagaacgctgaaatacaagctgaaatatttcgccctgctggtgctgggcgcggcgctggccggtggcttcccggccgcctttttcatcatggaccgggaagactcctggctgaccatcgtcctgttctttatcgccatcatcgctggcctcatcggcatcggcatggtgctgttcgtcggttcagagctcttgctgatcgggcatcgcggccgcaggcgtctgctcagggcactggatcgcgtgctgctggggcaagacgtcacgccccccgattcgctcagcctgaaaatccccggcatcagataccgggccgtccgcaaagacgccgtgccgacgaccgcaccgctgcagaccgcacttccccttccggacggcatcgaggcctccggcatcgagacggtcaacgccctgcactatgagctttaccagacagagtatcggcaacgcacttattccgtggatacctacgcgctgcaactgcagggggagcactatgcgctggccgttcgttcggtcaacgtctggagcaccaagctgcatcccgtttttcgccgccggcacccgctctttatcgcccagggcgacccgctgcagattttgtaccgccaggatgacgccttgccggccctgcgtctggtgcaagggatcatcaatcaccgcgatcgtcaggcctacctggtcgccggcagcggctactgcagtgaagcggatctcacgctgtccgcacgtgtgatcttctcgtgtggcgcgatcatgatcgctttcatgctcggcatgtttctgtgggacaacctcgagcaacagggcttttattgggaccactgggccctggcacagatcggcagtgaactgccgccgctgctgttcttgttgctgatgtcggtcagcgggctggcattgatgattgaagcgttcggacagggctgccgccgcttcctccccggccaacgccgcgcttttcaggtttatcgatatctgaaaaacctgcgccacaggcggtatcagcaggctcaggtgacggagctgaaatcatga

SEQ ID NO: 445323 - DNA, 1176 bp, Serratia marcescens
atgatgctgccgctctataaaaggcccctgatcattctgatgctgtttcttttcagcgcgctgggcttctattttctcagccccgaacagcgctatgcgccttggcaatggaacagcggcgacgcagcgttgccgccggtggccgattatgacttcatcaagaattatcaggcgggtgacggcgcgttgttggtgaccaataaaagggtcgaggtctacaacagactcggctatttcaactggtcaggagactatgtcagccaactgctgttcgccggcccgcgggggctgcggatgttgggccgcctgcaagaatcggtgaacgatgcggtctgcagcggccaacgctgtgtgttgtttctcaccgaaggacggcggctggtcgacttgcagcggggctccgtcggtaaactgctgccctggcaagaggctgacaacgacagtcgccccactctggtcagcggcaagctggcggcgctgcgctccagcgacggattatatttcgtcggcgccgagggcatcttctacagcccggactttggcgcccattggcggcagacgctggatctgccggcgctgttggaagaacggcaactgctgggacaggatcgcgaagagagtgatgcctcaacgctcgcttacgccagcgcacgtgcggcgatgcccgaaactttcaccgccgtcgatggcgaccgcgtgctgttctggatgaaccctgtcgccggttccggcgctttgcacatcgtcgttaacggcaaaaccggtgaagtgacgagccagcattggctggcggtgcgcgtgaaggaaagcgcgcaatctccggacggcggcatctacctgatcgcccaaacactggacagagggctgtatcagatcctgcgccatcaacccgacgggcagctgaaagtgatgctggagaccggttacaagtcgctgtatcggctgtgggcgggcaacgacaagctggtcgcccaaacggataacggcgacggtcatctctcgctgattttcgatctgcgctcatccgaagtgcgctaccggcagccgctggactatgtgtacaaagggttggacgacgcacgccaaaccgtgatcgaaccggaaagccactatggcgatgacggggagaccccggcgctgccctacttcgttcgctatcgatccaccacgccatga

SEQ ID NO: 445324 - DNA, 783 bp, Serratia marcescens
atgaaaaaaatactctttttatggttgttgttgcacgtgccgcaggcggctgccagttgggtgatcgatgcgcaatactcgccgtctcaaaagagatttatcgtgaaggtaattcggtgggatgagtacgatcctgcgcggaatccattaaaaaattgcaggtttaccagtacctgtaaactggcttttacgtactctgaccgctcacattatatagatccttttggctacatggatatgccagaggcgtcagatctaaatacgatgggggaattagcccagctatttgcacggaaaggttatctcaatcgggaagttaaatcacaattcggcctatacgaggagccttgtctgggtttggcttatccggtatatagtgccgggtcgatcccttatgttcctttgccaggcggcgagtttgaatgctttgcaccacaaatagatccaacctattgcagcattgccgatgcttatatcgagctgaatcacggcacgataaacactaactcagttaatgggagtgttgcagcgaagcaatttcgcgttgcctgcaataaggcatttagcttggctatcatcgctgtggataaaaatggttccgtctctcttggtggtggcattatcagccatcttaaaataaatggtgtcgatattggttctggttatctcgaccggattggccctgaagggaaaaccctcacgctgacgtcaacattaagcggatacagaggcggtaccggcgattttcaggggtataaggtcattatgctgactcttccctga

SEQ ID NO: 445325 - DNA, 843 bp, Serratia marcescens
atgtatggattgaaattaaatacactaaagttatcgtttaatcctgagaatgtattacatgatatcctttgcgatttaagtaacagaaattacaacagcatggatatctccgtaaaagaactaatttcatcaataaattcatcaaaagaaaaaaccagtatagaacaagaaaaaaacgaaggctatatatggagtgtttttttcactctatttataaaggtggcatcattttggcgtgagattgaaaggaaaaattattatgactcttgggttagcttacaagatgctatggatactcttagacaagtaaaaaaattctactatcaagaatccataataatagatttttttgaaaaacaacttttgtcgcttgagaagctatatccttatacaatattttccagtataggcttcattgaggatggacatgaatgtagcatatgcaaaaatgatatggatagtgataaatgtgaacatctgaaaggagagttgtattctggagaggtagcgtatgctatagtaagaaaaatagagagacttgatcatttggctttggtatatacgccgctagacaaaagacttgtcgtaggcataaatgactcacatccatcattcagtgttttttcagatttaatgtctttttttgataacaaaaacatgaaccctgtaaactttaccgaagccgttactttggactttaaaaagaaaaacccacaatgggttaaggctcctagaaattcgatgtgcacttgtggtagtggattaaaatacaaaaaatgttgtattgcaaatgagtttgtagaacaaaggcatgtagaattcaggccttttaagttgatttga

SEQ ID NO: 445326 - DNA, 2124 bp, Serratia marcescens
ttgttcgtaaatattgacttcgacgataaactggaagctgccagtatttcgttggtaggttgggctcggccgcttgtcgaattcctcgcacggtattttaccatccagaaagacatgcttcgtctggactactcccacctatcaactgagaacctcaggtttacggatacgagttggccatataattcgcaaactgagcgtgagcactttagggccgaattcgtggctgcggcacagcaagggcagatagcgctgaccttaaaaattctcggacacggatccacggggatcgagaagtcgtcctctatcttggacccaaattcttaccagcgcgctcaggatatcttctggaatggcatacttaatggcgatcccccgagcttacgtgaaatcattgtggcggaaatcgagccacgtgcgatttgggttaaatggttgctcgctaaccgttcatattctcggaataaatatttggacgatcagcagatcatgaatgcgttggtggtcaatacgcccgaggaagattgcatctatgttcttcaactagtcgaccctcatcagggggcgaatgcttgggctttcgaacaactggtccagcagtattggcatcgtgtacgcgactacttggaaaaaaatatcgacatgacgtcggaccattcaaaccgcgaaatgcttgagttcgtctcctctctatttgcgcattcgccgactgtgcacacatcccggtgggcttgcgaactggtttttgaacgagcagacccgtcagtctttcctaggctaatccaacattgccgggcgatattgccggaggatgtacgtaatctgttcctacgctggaacatctgtctgaagaaagagaagaatgacaatatcaaggattgcgttgccaaggccttctctagacttactacattgaccgtggacactataccctcggacctcgcacttgcggcggcttggcacgggtttggagacccagcgcggtctagtcagcaaagcgtcgttgccagcctcagagaattgccagcctcggcatgggatcaagaaacgctgtggacccaactgggcccggccgcccgcgaggcctggcggcaggatctgttcgatcaggtgaatgaggaacctgagttagcccaagggctcctcaattttgcctgcctttggctcgagcagacggcattcgccgaagtcgagccagtgcttttgcgattgatggatgacgaggagcatctggcgtttgcgaatcggcttgttggcactcatgtacggcaactacaactaaggggcaagggactagtacggtccaagcaaggagtactggatctggaggggccagttggccggggcgagggtgctactacgttgcctagcataggagcccaaacttggctgagcgacccttccgtggagcgtgtcatccatagggcgcttagccatattgaggaagcattttgtcgcgaatatccgaagacctggggagaggacgaggaggtccatacggcgcgcctcctggctctgacacaggaggcgattggcaacgcgagcagccagctgcgccaactctcggttacgacgcgggcgacgtatccgagcctgacagtgaaggtgcgtcaacccagcaagcgagaggaaggggcgaacacacccgccggggctccgctgggggcagacgtgctgttcctgagccgtatcgtggacaaggggaaaacagtggtccagcgtgcgactcttatgcaggtgaaaaagcgcaaaggcactaattcgggaccggccttcagttcgacggtaggcatcaacctgaagcagtgcgaggacatactcaagcagtcagaacacgcctactacctattcacgactccggcctcgcctcgcccggttctctgggttgccccagcacggctcgtcagaaatttgacccaattgcacacgagcaaatctacggttttggcgatgcaggtgcgcgacgccagctgctcctacgcggatttttttctgcacgagcttgttggcctgtgggctggcgacgagcatgaggacatcatcgccgtcgccaacggcaatcctcagcttgggcgaacacctcgccacattgttgaaatcgaggttcgccgccaatctgattaa

SEQ ID NO: 445327 - DNA, 1620 bp, Serratia marcescens
atggcaattacttctaccccatctaacaaaggtggccctgcagctaggcaaggttttaaatatcaggatcatgttgccgtcagctttatactaaaaatgctccaagatagttcttatctgcagatcgaatgtgagacagcagatgacatagttgcggtctctcgcccaaatacagaattcatttacgagtatattcaggtcaaaacgacagagggagacacaaaatggaatctcactgaagcaacagctttggaaaagggcagacctgatagctcactttttcaaaaatctctgaaatgcgacacgcgactcggcatcgctcgtttccggattgtctctaagagagatatatcaaaaccactgcaatgtttcctcattgatatcggcaagcgagtgcttcctgatgattgtacggaacgtggggttaagctagttaaaaaattccctaagacgatatcagctcaaaagagagattttaaatattgggctgaaaactttgtttggcaagtctgtggtgagactgcatggcttgaagctatgaacgtccgtgtgttatcagaattagcagagcaatatggcgtagtgcctagtcatcggcagcagaaagaaatatacgaacacttccttaactgggcagatgacgctgcgaccgctgatgttaaaacccaaagtcagatgaaaatcatagcgcgaaaagaagcccttgagtgctttagcaaattactcgatgcggttgaagcctcttctacaataactgctaaaccttataaatctaaaccagagccctttttagtggagtttcatagcgtagctgaaaccgctcttctacgctctttagcgggatttgatgttgagtatgattttggtgaatggagatgtaaggaactagctgaacacttagtggagtggcttcctgaattctgtttacgtgctagtgagatagctaatttccaagtacatcatgcaaaaacaatcttagctaaatcaattagcactttcacacaagcaaaaatgccacgtgataaactcatcgccgaacttattttgcatacgattttgcgatgcagaaaagacagtgagccgatagcatgtaaggttttctatgagtcggaaggaaaactatcagaatttggtaatgcccatattgttcatcaggctggtaaagccgatgaattatggcttggcctttctaaaatgatccctactggaaagatggacgatacgctaaaagaaatttgtagtgtactagacactaccatttctaaagctgtattgagctccgagcgtgaaattataatcacgctgcgtgaacctcaccaccacttacctaccgcggagcaattcagtaaggcattaagtaagcattcgcctgctcaagaaatgctcaaaattatgtgtttccctatacttcttgcttacgatagtgatgtacttggaagaggatatgcctccgattacattaatcatttaaagaatgagatcatggctcactatagcgagctaaaaagcagattacccccaaaagtcttacaggtgaaaatagctattttccttcttccaatagaaaacatccagagattagtcatcgagtttaactcgctttgtaggactggaatttga

SEQ ID NO: 445328 - DNA, 2145 bp, Serratia marcescens
atgaattacgaaattacaaaaaagaaaattcatttgatcgggagcaagggtatctccacaactgaaattcttgtttcgataagtaaaattgtcaatagaggtattcccgagtgggaaggacgtgatttagtaatacgagctttggataaaattgatttttttgatactgttgaaaagtcactattattaagcatggttcgttctgtagggttatatccatatatcaagccttatcttgatgaagtatcggatgatgaccgcttggcatatgaaatacatcgaatagataatgttgaaccaggaatggtatttcaccgcctccaagctcatgtatacaacttactgatgcaacgtaagaatgttgttcttagtgcatccactagtgtaggtaaaagcttagtcattgatgcgattttagctagtaaacagtacagtaaaatagtagttgttgtgcctaccatagcgttaatagatgagaccagacgcagaatggttaaacgattcagatcacattgcaatataatcacccatcctagccaagaggctactctttctttagcaaatgtttacttgctgacacaagagcgtgtacttcaacgtggcgatttagatgatgtagatttctttgttattgatgagttctataagctggaccttgaaaatgattcagatgagaaaaaccgttcaattgacctaagtcttgcatttcacaggcttgctaagcagggtgcgcaattttatttgcttggaccaaatattcaaaatattcatgggcttgaagcctacgaatataattttattccatcaagtttctcaacagtttcggttgatgtgtatcactacaatctttcgtcgaaaggagatgcacgtaaagaaaaactgcttgagctttgttcgcaactatcttcccctacgctaatctattgccaatctcctgctagtgcaaataaagtggctcaatttcttattaatgaggctaatcttcctcgtgtggaaaatactcaggatgttgccgattggattggtaaacattatcaccctgattggaatatatcaaaggcaatatcgctaggtgtaggaattcaccatggtggagttccacgagcacttcagcagtactttgtgaagctgttcaacgaaggggctattaagttcatcgtttgcacctcgacaatgattgagggtgttaatacttctgctgaaaatgtcatcatttatgaccgaagggtcaacaatactccatttgatttctttaccttcaaaaatatatctggtcgagctgggcgtatgaaccgttacttcatcggaaaagtttatatgcttgaagctcctccattagagaaagacttaagcgttgaatatcctgtaggttctcagaacgaggattcacctatgggcttgcttctcaaattagaacctgagtttttatctgacctatcccgtcaacggttagagcaagcctattcaacgccacagatttcggctgtaacattgatcgaaaaccgccatgtaccaatagaggtgcaagtcaaaatcgcagaacagattttagaagatcaacatgaacataagcatcttctttgctggaaaggtaatcctgagcagaatcagcttgagtatctttgtagtctcgtttatgagcatctacctcacaatctcatggaatacggcattttctcggggctccaactggcttggcatataaatgcgctaaggtcacagaaaaacttcactgaatatcttcaacaagcgattgatgatgattggcataaccgcacacccagcgaggcaataggactgcggctaaaattaatccgtaatgttatcagctaccgtttgccaagggattttatgtctatcagtagaatccaggcagatgttttaggcaggcgaaatcttgagtttggagattatacctttatctcagagcaacttgaaaacctgtttcaagatcctttgattactgctctggatgaatacggcatccctatacagatatctactaaaataaaaggaatgatacttccatctgataacttaaatgaggtgctcgctaagctaaggaagctggttgtaaaaattgacgaaatgcaattaagtaaatttgaaaaaaacatcctacgttgggctatagccgaaatgtga

SEQ ID NO: 445329 - DNA, 1095 bp, Serratia marcescens
atgcatcctttccaagacagtctccaggtatggttttctaggaaactacctgaacatgcatttaatcaatgctgggaaattccatttgttttatcaagcgacataggcttggtgcgtaaagaaaatcaagatcgcgttgcagctctccacactgggaaaaagtcagttaatccgctctttgctatagcagtggttgatgggatgggggggatgcgtgacggaggggtttgtgcttctttggcactctcaggatttttctatgcattaatccaatatcgttctttagaaataaaagatagaataaatgcagcaataaaactagccaataaacaagttttcgatatttataatggtagcggcggagcgacattaaccgcagttttatttgattctcaaggaaatcgcttgtttgtgcatgtgggtgatacccgaatttatacctttagttccaatgctcaagtacaacggcacacaactgatgattcattagctgaagctgttgggggaagtgggagggaattacttcagttcgttgggatgggagagtcaatgcaacctaaaatagcagagctcaccgatgcaggtgagttttgtgctattacaactgatggtattcatggcatcgaagaaaaaacactgaataaactttttgtcaattcttctgatataaaacaaattgcagaaagattatgtaatgtatcaaagtggtgtggaggtcatgacaacgctacatccgcaatattgaacttgaaaaatatagcggaatctttatcccactatgaagttaatggtattagaatttgggatgctcaaggggacttaactacactgtggttgagggatggggatgttggaattaattttttacaggggcagaatgtaaataatttagttgatacaggcgaagggattttatcgtctaagcaagtatctgaaaaattaaccaatcaacaaaaaaagattaataaagatagagcttctaaaaaaagaacggccaataaaaagaaagcggatagtcagcctgaaaaaatacaactagatatcgaaattggtaaatcaggagagaaaggagaattcgatgttgatacagaatag

SEQ ID NO: 445330 - DNA, 1047 bp, Serratia marcescens
atgttgatacagaatagatacagaactcttgacacgtctgatagaggtggaatgggagaagtgttatattgtgaggatatgcacctgcaacgacaggttgtattaaaatatcttcaacctggtgtagatgggcggcgactgttagatgaacaaaaagcattgactaaagttcgttctaaacatgtagttcagctttatgatattgtcacaattaatggtgtcggtattgaatatccggctattatccttgagtatatcaatggtgaaactttaattattggtaactattctgctgatatcgaatacttaaaactaatatggcagatatcttgtggtttagctgagatacatgcacatggtataattcatcgcgatattaagcccagtaatataaaaatagataatgagggtgttgttaaaatccttgatttcggcctttcaaggaacgatgctgatgcgcaaacaaggagtattattggaacaccagtttttatggctccagaactttggggtgatcagacaatcgcttttgattcatcaatagacgtctacgcttttggtgttacttgctttgctcttctctctgaaaacgtactcggtaatttagccgaacggccgccagttcaaccatcattggctgatttttcttttccattcgcaagtttgcctcaagaagtatcacaaatgctacatagttgcgttgctaccaataaaatagataggccaactatgcaagatgtcgctgagttattagaaaaacaactacttaaagataaacatcgcgcaactgttgtattgaatggtgtagtccatatcttagacaataataatagaagaattacacttaatgcctcgattggtagtcttacaattgaatacaatgggcttgagttcattgttgctcaagtcaccggtgccgtttttattaacaatactcaggttcgagtgggaaatgttgttccagggtgttgtgttcttacatttggtacaagtagcggaagaacatttgttactttcgatgtttctaaccctgaggtgatgccatga

SEQ ID NO: 445331 - DNA, 1071 bp, Serratia marcescens
atgaatgcaggcgatgttatttcagaacgttatagaatcgaacgtcatgttggtcgaggcgggatgcaagacgtatatttagcgtatgatattttacttgaaactcacgttgcacttaaaactccgcaacttggtcaaccagatacaaggtttaaaacaagtgctataatttctgcccgggttaatcatcataatgtcgcgaaaacattggattacatcgaggagaatggttctttatttctaatcgaggaatatgtgcctggagataatctagaaaaacgattgaatattttcggagcaatagaccctcatttggcagcaagaatatttttgcatgtctccaagggggtggcagcttcgcaccatgctggtgtagtacatcgtgatttaaaaccgagtaacataattgttgagtccgatgttaatcttcatgagttaaagctaactgatttcggaattgcgactttgaccgaagaagtctttgaggaggctgcacgtggaggtgatataacacgttcaacctctggtacgatccggggtgcacttccttatatggcccctgagatgatgtttagacaacctggtgaaaatcctggtaagtcagtagatatttggtcgttgggagcaatgatgttccaaatattaactggaaaggttcccttcggtgtttatctccaagccgctgttaatgttcagaacagaaatagagaaccttggccaggattcatgttagctaatcctcaatataaaaatctttcgttacaactccaggctatagtagaaaaatgccttcagtatgatatagcggatcgcccttcagcggacgagatagtggaagaaatatctgaactgtgttttatcggtgttgatagggaattggggactgtttctaatcttatccaaaacggatatagtggatttattgacggagacagtggtggtactacattctttagtcaggaaagcgtttacggtcaaataaaccgcgcaactcgaagtaacaaagtatgttactccagtttccccggctccccgcgagatcgtgctcaccctattattgtgcttacttaa

SEQ ID NO: 445332 - DNA, 561 bp, Serratia marcescens
atgaacggtcaacgtattggctacattcggattagtcactgtgaactgagtcccgaacagcaactggaaaaaacgctggtagataaatctttcattgataacgcgtcagtcaaggacctacaacgcccagagctggatgccctgttctcgacagtgcgcaacggcgataccgtggtggttcagagcatggatagattggcacgcaacctgagtgatctccaacgtcaggtccacagactggccgataaaggcgtcaccgttgagtttgtgaaagagagtttaacgtttaccggtaaagattcatcagcggataagctaatgctgtctgtcatgggtgcatttgccgaattcgaacgagctttaattcgtgaacgccagcgcgaaggcatcgcgctggccagagtgcgcggcgcttaccggggtagaaaaaaattgctgtcctcagagcaacaggctgaattgcggttacgcgcgacaaacggcgagacgaaagcgcagcttgcccgcgagtttggcatcagcagagaaacactgtaccaatacctgaaaagatgcggctaa

SEQ ID NO: 445333 - DNA, 285 bp, Serratia marcescens
atgtggccctttaagcgaaaaaaaacgagtggcgaggcgccgccagtgcaggaggcgccaaaatcaccagggattgcgatcagcgacgaaatgctcgccgaggtcggacacaaaaagcggcgtgagttcgagaaatacgaaccgccggccggtgttatccctgacggtatccgcagtgcgattcttgcgatggatgcaacgccatacgattcactgaacggcagctatcccgattacgttttcggcggcttccctggctatccctatttggcgcaactcgtctag

SEQ ID NO: 445334 - DNA, 273 bp, Serratia marcescens
atgcgcatcctgttcccggaaaccgaatcagcaatgaccggtgaggccggcgacggcatcgggcgtggtgaccgcaccagtttctacatcgtggacgaatccgcgttcctggagcggccttatctggctgatgcgtcgctgtctgccaccaccaactgccggcaggacatttcaacgccgaacggaatggccaactccttcgctgagcgccgtcatagcggcaagatcgacgtgtttacattccactggcgtgatgaccctcgcaaagactag

SEQ ID NO: 445335 - DNA, 342 bp, Serratia marcescens
atgcccattccattcccgttcgacttcaaaaaaccggattacacccaggtgtttgaatggcggatggagcgcctgcagcgcatcagggccaacccggaaacactgccagctattcgtgagttttatcgcaccaaccctgcccagttcatcattgattggggaatgacggttgacccgcgcaacgtcgagcgtggcttaccggcgcgcatcccatttctgctgttcacaaagcaggaggagtggatccagtggtttgtagagcactggcgggcatcaaaacccggcatcacggagaaaacccgcgccatgggcatgtcgtggctgacggtggggatggcgtag

SEQ ID NO: 445336 - DNA, 294 bp, Serratia marcescens
atgggttattacgtcattagaaaatcagagaaacaaacacctcggccttattatttcgtcttgcatgctaacaatggccaggcgattgcaatgagcgaaatgtatgccaccaaacagggtgcacaagctggcatcgcttctgtgcagttaaatggaccaactacagatattcgagatggtagccgccaggaatcccggtggcaggtgttgattgttcatttcccggttccggatttcagaaaaagaaaaggccacgcattagcgcagcctcgaataggtgccgatgtcacttga

SEQ ID NO: 445337 - DNA, 651 bp, Serratia marcescens
atgttttctccagaatggtttcgccgatacgagcttcttcgtgaagaggatatagataactcaaatacggaactcaacccggatgaaatttctactgattatgggtggattgaggttgcttgctcacctactaaggccgtatttcagttacgaaaagctggtttagaaagtgctttaggtgatctaaccagctctatttttgcaatgtttgagcatgctgaaacacaagccattggcatcaatacgttatatatctatgattttcaagataaagaacaatggaatgcaataggtgatgctcttgttcccaaagctctctgggaagcaacaaacaaatcgaaaattctgcaagataatgtagactatcactatggtatgcgtaaattaatattatctgttgaagacagtcagacagatattgaacgattatacaaggaagcaataaacattacttacgcgccactacataagagtgaaagtataaatcatggactgcaaattcaatacaatcatgaccttgttctatcagattctaaaaacggcctggactttacgaaagaactaatcgaaatcatccctcaacaaatatctgaagcaattaagcatgatattgagagccacgaatcaatatttaatcggatactatcatga

SEQ ID NO: 445338 - DNA, 594 bp, Serratia marcescens
atgaacaatgcattctggacggatatagaaacatctgttaatgagaatattgtagactcgataagaacagctccaaataaagagattagaaaatccaacaaagtagaacatgctaatcagggtattatggaaaggatatctaagaccctagagttcccagcatttattagcagaggggaaaacaacaagtccctctcaatagaagctgaaactcagatacctgaaataacaacaactcaacctgtagttggaaaaacaaagagtcaatcacgagctgttttgagaaaaatccaagcccgggcaaaagagaaaattgtatccttagagaaagtacttgatgcttatggcgttattgataatttaaaaataaataactcagagtatgaagtccatgctaggatttacaatctaagcaaccatgagattttagatgaaatagttttttcatcttgtgaattcagtgttagcgatcgacaaaagctagttgaaaatgcagtattctactggtacgtaggaatggaaagaactttgtttggtcaagaaaggcgagtatctgaatttagattgagaagagttttcaattctaataaataa

SEQ ID NO: 445339 - DNA, 1104 bp, Serratia marcescens
gtgtcatcagttcaaaattttcaatgtgagacaatagttttcggtaaaggtattggcgagtcaattattgttagattatctagaaatgaatggatgataatagactcttgtttcaacgacataagaaatcctgccgcacttgactatttaaaagaacgtggagtcgaactttctgaagttaagcttgttgtgataagtcatttccacgacgatcatattaaaggattaagtgaaattattgaggagtgtcagcaagcgaaaatagtaattagcgcagctttaaacacaacagaatttaaagcatatattaatgctctaagctccaatggcgaagacatggccaaaacaaaggaaatcaataaaataatggatttcctgccttctcttattcaacaacaaagactagcgtttgcaaaaagagactgtattttattcagaagtgcatctggcattgaagttagatcgctttctccatgtgacaatgatattgcatattctaatctcgactttgcgaactctttaaaaatcgcggctaatattaaagaaatagttagctcagcgaaattagttaatccgaatcactattgtgttgttacaagagtctcatctcctgcatcaggtaataacgaaatattactaggagcggaccttgaggtttctaaaggcgctggttgggaatcagtatgtgacgcgattgatagtccaaaaccgaataaaatcggactatttaaattacctcaccatggttcagaaaccgggtttcatgaaagaacctggattgaactaataaaagaaaagcctatatcagtattaacaacttatgatcgttcttcactacctcgaaaggaaatgatcgacttatataaggagaggtcatctcatatatattgcacatcagaacctaaatcattaaaagagtcaggtaataacattaataaatccgaccgatcgaatgtgacgagcgctgtggaaaaaatactttctaaaatgggttccacagttaagttctccaattcggttggtaagtttgggtatgtatcaataaatgactgtctaacagccgaacctaaagttacattatctcacgcagcaacaatcttataa

SEQ ID NO: 445340 - DNA, 828 bp, Serratia marcescens
atgaaacaaaatccattttcattttacgacttccttgggtacctgatacctggtgccttatttttatacatactctatttcggaggggagcattatcactggggtatggctaccgaggctaggggatatctttcccagaacaataattcacttggtgaattattaaacttcttgccattagttatattatcatatgtggttggtcatttcttagccttggtgtcatctttcatggttgagaaatactctaactgcaataatgggtttccatctcaatatctgatttctggaaaagggaaaggatacttttataatgctggttttctgtcaaaaacaggtagggttatgctttggtttgcaattttgccaatatctttaccagatgtttttacgcactggaaattcagacaaaataaagaaatggatacgcgtcttaaacctattgtttttaatttctgtcttgaaatattgaataagagatttaagatgaacacatctggtatgaataatgatactggggtggatggggatagctttaggttgatataccattacgcattcgaaaactctgaagcacacgcgtccaaattacaaaattacgttgcattgtatggttttacaagaaatatagctatgatatttgttattgttttttggatgctgattttcctaaaattcgggatggatgtcggtataggatttactccgatctttacctctgttgttttggcgtttgttttctataagggatttgtaaagttttacaagaggtatactttagaagccatgatggcagtatgcgccattgcaactagagagcctaaataa

SEQ ID NO: 445341 - DNA, 705 bp, Serratia marcescens
atgaaagggcgagaaaatcagagaggcggttcgaggagaaccgagaaaaaggggaacctcggcagcgtaaggcgggaggcgttcgcggcgggccgccgttggcggtccaaaacgcgggcgttttgtcgaaccctgtcggggcttctcacccctctcggcggtgcgccatgcaaaaaaaaagcctggacgcgaatccaggttttctctttgaatttggcggtgagagagggcttgattcgctgcgctcaccctacgggccgccgttggcggtccaaaacgcgggcgttttgtcgaaccctgtcgaggcttctcacccctctcggcggtgcaccatgcaaaaaaaaagcctggacgcgaatccaggctttctctttgaatttggcggtgagagaggggttgattcgctgcgctcaccctacgggccgccgttggcggtccaaaacgcgggcgttttgtcgaaccctgtcgaggcttctcacccctctcggcggtgcaccatgcaaaaaaaaagcctggacgcgaatccaggctttctctttgaatttggcggtgagagaggggttgattcgctgcgctcaccctacgggccgccgttggcggtccaaaacgcgggcgttttgtcgaaccctgtcgaggcttctcacccctctcggcggtgcgccatgcaaaaaaaagcctggacgcgaatccaggctttctctttga

SEQ ID NO: 445342 - DNA, 228 bp, Serratia marcescens
atgaagagagcaattgcatatatcgtattgactctgatctactttgtcgtgctggctgaagtggttttcaggcgtctatcagaggatacgtacttaaaggtggcgaagatctcaaacccattaggtttaatgagttcatcgtttgactctctaattgtcatgctcattttattatcgatcgttctttcttgggtaacgatgcgtcttatctcaaagcatagagattga

SEQ ID NO: 445343 - DNA, 207 bp, Serratia marcescens
atgtgcgagaacactttgttgacgttatccatcgactgcagcagcgtggccgccaccaccgccgccagccccacctgccgcccggcggacaggtcggtgccctgggtcacgatcagccccgccacgcccagcgcgatgatgatgcgcaccgaagactgcgtcaggatattgctcaggttcatcaggctgaggaaagtggggtcctga

SEQ ID NO: 445344 - DNA, 1065 bp, Serratia marcescens
atgaaaaaaaataaaaatatcgcaattgtgggtggcggcggggtaactgcggtaatgacggccctggcttgcgccagaaaaggaatttccgtcgatttcttccttgatgacagtgattatgatgactttaaaacctcctttggaaatcattgtctgtggcgacgcattcacgagaataatcaacgcctcagccgtttttccacgcagtcacaatggatgtgggaaaagtttattctgtcctccagcggagagtttggcagaaaagagaaaatgattcgtattatcgaaagatcagaagtcgctcatcttgcccgcctttacgaacagcatgacttgccctatgaggtgcagaattgtggtgatgatggggccatcaattttccctctttcattaactgcaaaaacaaatctgtttttgtgagttatgactccattctgctaaacacggcagagattttttcctactttcaggatgagctggcgttctttaccagtgtcaatgtttttagaaacaaaaacattggagacttaaacagcattgaaagtggtgtgattttttttgatgaaaacaagcgtatatatgacactattataaaattcacaaatggctataagatcaatgagataagttcaatttatcaagtttgccctgccgtgaatcgggtatttagagattattatctttcccactccgtgggaaatcttctctcgccgatactgataacggaaaaagagtacaatctatgggttgtcccttctgttgatgggactgtcattagagtgggggctgatgtgcatgtcccgcaatccgctgacttgctgatgcgaagtttagatattgatgcttattgtgatcgcaggaagttggacattatatccgaatcattgtttaccattatctcttccttttcctatgcggaaggaaccttggcggtcgtaccctgttggacggcgagtgaggataataaaaaaatcgtggttgttgaaagtgtagattcttattacaacgcgtcgccaattatttctgaggaaattacaacgctgttagcgaattccttcaactaa

SEQ ID NO: 445345 - DNA, 537 bp, Serratia marcescens
atgaataagcatatgcagagatccctactgcttgccggcattcctttggcaatgtccgtcattgccacagctaccgcagcagacggcaccataaactttaccggtaatgtcaccgaccaaacctgcacagttgaagcaggcagtgccaaccaaaccattccaatgggcaacatcagcgctaaggcattcaagaccgctggcgataccgctctgccgacaaaattcagcattgccttagccggctgccctgaatcggtaacaaaagcgtcggtaaaattcgacggcgcatacgcacaaggcaattcgaccttgttgtcactcaatgcggagaaaggcgtggccacgggtcttggcgtagccatctatgaggccgatggcaccacacaaattccaatggcttcattttctacagcgcagagtgtgcaaaaagatatcagcaatgtctttacctatgtcgcgaaatacatggcgacatcagacaccgtcaccgtcggaccggcgaatgccacgacacaattcagcatctcttataactga

SEQ ID NO: 445346 - DNA, 681 bp, Serratia marcescens
atgaagcagagtaaatattatttgctggcaatattatttttttcatacggcgcttcggcaagcgtaacgctaggcggtactcgtatcgtatacgaagaaagtaaaaaagaagcgaacatttcagtcagcaatcaagataaaaatagccccgtacttattcaaacatgggtggaaagtttctcacctgacgataaaaaagaggttccgtttattgttacgccccccttatttaggttggaggcagagcaagagaacatccttagaattatttattccggagataacctgccgcagcataaagaatcaatatattggttaagtgtaagatcgataccatcaacccaaaaatcaaaagagaacaagttactcattaccgttcaaaacagaataaaaatattttacaggcctaaacatctatcaaaagatgaagccattgacgcctacaaaaaaattcgtttttcactgaaaggaaaaaccttagaggcaaaaaacccaacgccattccacgtctctttttactctgtaagcatcgatgataaagaagtgaaagaggccgacatgattgcgccgcagagcaccaagaagtggttattgccaaaagaaattcatggtaaagaaataagatggcaagcgatcaatgattatggaggaataactcaggcgataagcgcaccattatag

SEQ ID NO: 445347 - DNA, 2448 bp, Serratia marcescens
atgataagaaataataccactcataaaacatcggtgtggttcttttgtgttctttcttcacctgcggctctcgctgaagattattttgacccctcggcattaaacagaaatcatcagactattgttgacttatccaaatttaataacgcgagtcatcaactgccgggcgattactgggtagatatctatgtgaacaacgtgttttttgccaatcaaaaagtgtctttctatcatgcagagggcattttgcaaccccgcatccatcgcagcgatctcgattcttggggcgttcgcatggataaaataaaaacagtcaatgacagtgaattggcggcatcccccattagtgaaattattcctggcagccaggcgacatttgattttaacaaacaaagattggatttaaatatcccacaggcatacattgaaaatcatcccagagactggattaacccctcactttgggatgatggcatccgcgcctttttgttagattacagttttagtggtaccgagacgcggaaaacgaaaaataaagataatcaatacttaaatttgcgcagcggtttcaactatgatgcctggcgctttagaaactatgccacctactcaagccaaaacaacgccaagtggaaaagtattaacacctatgccgaacgcagctttagggacagtaaaaacacgctgaccattggcgatagttcaacatccggcgacgtttttgacagttttcaatttcgcggaatgaaactggcaagcgatccgagcatgttgcccgatagccagagagggtttgccccgacggtgagaggcatagcgcaaagcaatgcagagatcactataaaacaaaatgactatatgatttatcaaacatatgtgcctgcggggagttttgagataactgatatttaccctaccacttccagcggtgggttacaggtgatcatcaaagaagcggatggctcagaaaggagtttctttcagcctttttcctccgttcccattatgctcagggaggacatgaaaaaaaatgaactcacaatcggagaatatcgctctgcgcgggacgatagccaaaatgctaagttcctacagtcatcagtaatttatggtcttaaagatgataaaacgttctatggcggtgccattatttcagaaaaacaccagggaatctctttcggccttggcagcagtctgggactgctgggctccctctctgcagatgtcacgcatagcaaaagccggttggccacagggcaggatcgtaatggacaacaatatcgtatccagtatgcaaaaaatattgaaacaacgggtaccaactttacgctggccggctatcaatactcaacgtcaggctacttaagcttttcgcaactaaatgatatgaatgccaatcttaaaagaaagtggctgacacgcggcgtaaaaagaaacaagttggttatcaatattaatcagcccatacgagactttggcagtttatatatcaatggttaccaacagagctattggcacagcgacgccgttgaacgaaatgttctaatgggattctccacgaaccaatttggggttagctgcaatattgggttcggctacaatagcagccgctatacggacagacccgacaagatcgccacgctcaatgttcagatcccgctgaacaaatggcaatcaaacagctgggtaaattatacctcaagcaagagcagcaaaggaaaactcaatcaacaactggggttaagcggaaccgcgctggaaaataatcagatcagttataacgtttctgcatcccaaagcagcaatcgccctggcaacagctctgtttattatcgcagcagatatggcgaaattggcgccggatacagctttgataaagatatgcagcgaataaactacagtctgcgaggcggcgccgtggctcatcgcaacggcattacattgtcccaatcgctgggtgacactattgctttagttgaggtgccgaatgcacgcgatgttgaagtcatcaacagtaccggcgtaacgaccgattggcgaggttacgccgtggtgccctatatcagcagctatcataagaatcgaattaatttaaatccgcaatcctttgatgactctgttgaaatagaaaaaaatagccaaacggtcatcccgacgaaaggtgcgattgttgttgccaactttgcctctcaaatcggcaatcgcattatttttaacgttgcccaccagagtacaacgattcctttcggcgccgttgcgacattgcttaccgaccgaggaaagacgggcatcgtcggcaataacaacacggtttatatgagcggcatgcccgactcaggaacaatagcgttgagctggggagcagaaagaggttgccagggtaattacaatattgcccctaacacccctgcctcaagaattaagcgtattaacttgcagtgtgaataa

SEQ ID NO: 445348 - DNA, 231 bp, Serratia marcescens
atgcacgatgaaggcccaacactggcaagcctgcttaagcacgggtgccaggtcacacacttcaagaactcacgcggctggctggaaacgccggacggaagattttttaagcccgaaccggcgaaggttcaatttatcaaaggtaaaaataaaccgtttatttatacccaaagaataaataaaggattcctgcttgcactggctgaattatttaaaaaactaattaagtaa

SEQ ID NO: 445349 - DNA, 213 bp, Serratia marcescens
atgactagacgtgatcaatatagcttcattttgcatgttcttttacctgctatcgaaaatgaaggtttaaccattaaaacccgccgtgatggcgagttaaccctttctgccagtgggtcagtaaccaccaattttataagcaatctgcgccagcactgcattgaagagttgcagcgcccttctattccagcttcccattacggagtcctgtaa

SEQ ID NO: 445350 - DNA, 468 bp, Serratia marcescens
atggatgagattcagtttaattactttgatattgagcacgccatagcagtacatgatcacatcattgaacgctctggcggtttacaaggcattcgcgatcgaggagtactggagagtgtcctcgatcatatccaaaatgattggtactacccaagctttgagtcaaagctcacacatttgtttttttcagtgaacaaacttcacgcttttactgatggcaataaaagatccggaatatttctctccgcattcttccttgaaatcaatgggtttgagcattgtgtaaagctctttgtccaagaaatggagaacattgctgtttgggttgcggatggcgctgtcagcaaggatttactacaacagattattcatgatttggttctatgtgaggaattattagaaagcactaagctggaactggcaatggcgataatggatcatcaaaataacattcatgaaggcgattaa

SEQ ID NO: 445351 - DNA, 1014 bp, Serratia marcescens
atggctaaggatctgacaacctccgctcacgacagacaaaacattctcaataattcgtatgcactcaagcacgccgaaaagcatcttgctttgggcgggatcgaatttgatggcgagatagtgtttaccaaaaatcaattggttgagatttttgatgttagcgacgcaacgatagaaaggtacctaaccagcaacattgatgaattaaagaacaacggatacatcattctaaaagggaaaattttaaaggaattcaaagaggtggcagatggtaccctcatgaatgagggtaccaaaacgtctgttcttggagtgtttaaatttcgagccgtattaaaccttgccatgttgcttgttgaaagtgagcaagcgaggatcattcgaacacgtttacttgatatcgttatcgacacactggcagaacgcgctggcggacatacaaaatttatcaaccaaagagatgaagattattttgttgcagcattcaaggaagaaagctatcggaaacagttcaccgatgctcttaatgattatgtagatgccaatggttggaagtttggaaaactcaccaatgcgatttatcagagcattttccatgagaatgcaaatgagtaccgcaaggtgctgaaactacatcaaaacgataaaattcgtgacacgatgtattctgaggttctcaccttaattgctagtttcgaagctggcctcgctcacgagataaaacaaaaagccacccacctgggcagaaaactcacatataaagaagcagaatccatcttatcaacaatggaaaagcatcccttatacgagccaatgctggttgatgttcgcaccaaaatggcgagcagggatctatgcttccgtgatgccttgcatgaaaaacttgaggcttatgtccgatcggtaccagaaggcgactttgagagattcttaggcgagaaaagcaagtcactcgaagagagactcaatgaccctgaaactcttgaagtgtttaaacgcttaaaagatcgctaa

SEQ ID NO: 445352 - DNA, 1047 bp, Serratia marcescens
gtgagccgcaaaaagcaaaagtttcaggccaaaccgcagcagccagccagcgacgaaaccgcaggcattgagtcattcagctttggcgacccggtagccatcaccgatcgcagtatgttgctggattgcatggagtgtgctgataacggcgtatattttgaaccaccgatcagcccctacggcattgcccgaatgtttgattcaacggcctatcatcagtctccgctggtctttaagcgtaatgtgatcacatcctgctacatccctcacccactgctgagcaggcaggaaatgagcgcttgggtgctggattatctggtattcggcaacaactacatggaggtgcgccgtaacatgctgggtgagcctattgcgttaaaacatgcccaggccaaatatacccggcgcggcagcgacctgaaaaaggatcaatactggtttatcacccgccgcgatgcggactacccattcaagccgggcagcatctgccagataaaaaaccccagcatccaccaggagatctacggtgcacctgaatacatggcctcgttacaaagcgccatgctcaacagtgaagcgaccatgttccgccgtaactactacatcaacggcagtcacgccggggtaatcgtctacctgaccgacccgatcgccaacaacaaagacgttgagagcctgaaaaagtcattgaaggatgcgcgcggcggtggcgcttttaaaaacctgttcgtatacgcagcaggcggaaagaaagacggcttgcaaatcctgccattcagccagatagcggcaaaggatgagtttaccggcatcaaggatgcaacgcgggatgatatgcttgccgcgcatcgcgtcccgcctcaactgatgggggtgatgccaggcaacgccggggggtttggcgacgttgagaaagccgcccgcgtcttctccatcaacgagctgacgccgatacaggaaagcctgaaagagctgaatgactggctgggcattgaggtgatccgcttcaacccttacgccctcgcagccccatcaacatccgcctga

SEQ ID NO: 445353 - DNA, 1671 bp, Serratia marcescens
atgtactggcaggcatacagcatcacgcagatcgccaaatcgatcggcgtgagtaccaacaccctgtattcatggcgtcgccgcgataagtgggacgagtccacagcgctggagcgcgtacaggatcggatgcaggtgcggctgttacgtctgacggaaaagccagacctgacggcgcatgacttcaaaaccattgacctgttaacccgtcaactggtgaggatggagcgcgaagagcgccgcagcgaagagaaaggccgcgagaaaaagccgaaaaaccactttacggaagagcagatcggggatctgcgcgctctggtgctggattcgctctacgagcatcaaaaacgctggtacaagcagcgcgaacgccgcaaccgctttatcctcaaatcgcgccagattggtgccacctggtactttgcccgcgaagcactgttacgggcgctggaaactggcaacaaccagatctttctgtcagccagccgcgcccaggcgttccagttcaagaagttcatccaactactggcggcacaggttggcgttgagctgaaaggcggcgacgccatcaccctaagcaacggcgcaacgttctactttctcggcacctcagcagcgacggcacagagctacaccggcgatctgtatcttgatgaagcattctggatcaacaatttccttgagctgcgtaaagtcgccgcaggcatggcaacccatgaagggctgcgccgtacctacttttccacgccatccacggaggaacatgaggcctatgccttctggactggcgacctgttcaacaaggcaaggcccagaggtgaacgggtagaaatagacgtcagccacaaggcgctgaaaaacggcaagctgggtggtgatgggatctggcggcagattgtcaccattgaagacgcggtaaaactcggcttcaacctggtgaaaattgaaaccatcaagatggagaactccccggaagaatacgacaacctctatcgttgccgtttcgtgactgctggagagcgcgcttttaactacaacgccatgatcggctgctgcgttgacggctttaacgatgatgtatggcccgactggaacccattcgcacccagaccgataggcgatcgcggtgtttgggttggctatgaccccaatgggggaagcggtaacggtgactctgccgggctggtcgtcatcgttccgccagcggtaccgggcggcaagttccgcatcattgaacgcatccagcttcgtgggatggagtttgaggagcaggcaaaggccattcagggactgacagagcgttacaacgtccagcacatcgcgattgatgccaccgggattggcgatgctgtctggcaactggtgatcaagttcttcccgctggcggtgaaataccagtattccgccccgctcaagcgcgccatggtgctgaaagcgctcatgctaatccgtgccggtcgtctggaaatggatgcgggaatgctggatctcgtccagtcatttatgacggttcgcaaggtgcagaaaggcggggtaatgacctacgtttccgaccgcaaacgcggcagcaatcacggcgatcttgcctgggcatctatgacagccttgtataacgagccgatcggcagcgaaagcggcggcggtaatgatagttttgtagaggagttttaa

SEQ ID NO: 445354 - DNA, 840 bp, Serratia marcescens
atgccaaagtctaaatttttccgcgtcgctgttgagggtgccacctgcgatggtcggacgctggagcgccagcacatcgaacagatggctaaacgcttcaacccagcgttatacggtgctcgcgtcaatctggagcactggcgcagcgcttcaccaaacagtgatttccgtgcttatggcgatgttattgccgtcaaggctgaggaagtcaccgaagagccgttaaaaggcaagttggggctgtatgtgcaggttgatgccactgatgatctggttgccctcaaaaagagccgtcagaagatttatcacagcattgaagtgcatccctcatttgctgataccggcgaagcctatttgatggggctggcctgtactgatagccctgccagtctgggcacggaaatgatggagttttgtgccaaaagcaccgttaacccgctggcctcacgcaagcacgatcaggcttgtttcttcaccgcctccgttgaatccacgatggaatttgaagatgagcagccgccgcaggacgaaggcaaaaacttctttgcccgtattaaggcgctgttgggcggtacgcagcagcagtttaaccagcagaacggtgaaaaccgtgaggctatcgaggcgattgccgagagccagggcaagctgctggacagtacaacccagctttctgctgcggtgaaaggtaaggctgacgccaccgagctggaaagcctgcgtaaggacttcaaagcgctggaagagaaactgaaaggccaggacgccgagcagtacaaccagcgcccgcctgccactggcggcgatggtcaatcaactcaacatctggctgattgctga

SEQ ID NO: 445355 - DNA, 846 bp, Serratia marcescens
atgttaacaccagcacaaaaacattttgatcgggtgatggctgagcgccgcagtaatcgcggtacaaccaccgccgaaagaactgcatacgagcagatactttttcgcctgcgcatggataaagccgacctcagccgcatccagtcgaatgccggtaaggcgaagctgaaaagcgagcgcctgccggattaccagccatggattgatggcgtactggcagcggatacgggccaggcggatgaagtgatcaccactgtaatgatctgggcagcggatgccggtgatattgcgcaggcgctacggataggccagtacgtgctgcgccataaaatcccgatgcctgaccagtacaagcgcaccaccgccacggtactggttgaagaaatttgtgatcccatccttgccgccttcaaagcgaacccggcaaaggcaagcgtgagcattgacaacctcaacgcactgaacggcatcaccacccatgaagatatgcccgatcaggtaagggctaagttgtttaaggccatggggtacaccgtgcgccttaatcaggatgttgaatcccagcagcttgcccgctcgcatttgcaggaagctatcaggctcaacgcaaaaattggcgtggcgcgtgatatcgaactgctggatcgcaatatcaaaaagctgaccgcagccagcggcggagaaggcgagggcgatgcgccaccggtacagccggaagcgcagccagaggccgcgaaagctgcgccggagaaagcgccgcgcactaccgcagccaaaaagccgaaaaacagccaggcaaaaccggcagcaaagaacagggcgacgcgcaaagccgcgaagtcataa

SEQ ID NO: 445356 - DNA, 204 bp, Serratia marcescens
atgaacgtacaggcgcagcaggatgacaccgttgatgaactttgctggcggtattacggcaggacggcgggagtaaccgaagccgtgcatgaagccaatccgggactgtgcgacagcggcccgctgctgagcgccgggcaggttgtttatcttcccgaattaccaccaccaacccagcgggaaaccgtgcagctatgggattaa

SEQ ID NO: 445357 - DNA, 393 bp, Serratia marcescens
atggcaaataactttaatttcagccagcgaagtgaaaataacctgaaaggtgttaacgctgaccttgtgaaagttgtccgccgcgcccttcaactttccgctgttgattttggtatcaccgaagggctgcgctctgtagagcggcaaaaacagcttgttgcggaagggaaaagccagacgatgaacagcaggcacctttcaggccatgcggttgatgtgtttgcgtacccaaccccggcaggctcatgggactggaaattttaccagcagatttccgaagccttcaaacaggcgggaaaagagctaaatatccccattgagtggggcggcgactggaagacgctgaaagatggcctgcacttccagcttccttatgcggcgtaccctgcatga

SEQ ID NO: 445358 - DNA, 222 bp, Serratia marcescens
atgcagcccgtcagaaacagcgcgggcatggtcagcatcagcaacggcctgagcaatctgcccctcagcccttctctcaatcgcatctatttcaccttgtcggcgctgctcttcggctctggcttctgcctgccgctttgccagcgcggtagcgtcgtcggcatcccgctgtttccatttcagtgcccatgccgtattcgcctggtgggcaccaaaccatga

SEQ ID NO: 445359 - DNA, 468 bp, Serratia marcescens
atgttaaaacccgatctgcttcgcaaacatatcagccaggcggtgccgtggttgcgtgacaaccctgacaatctggcggtgtacgtccagaaggggcgcatggtcagcaccgggcagcgctctgcctcgtttgaatacgagtacaccattgaggtgctggcgatggattaccctgagccactggataccctcagcctgccaattctggcatgggcgcgcctgtatcagcctgagctgctattcaaccctgaccgtgcccgcgatggcatcacctttgaagcggatatcctgagcaattccaccatggatgtgcttatcaaaattcaggccagtgaggcggttgttgtcaaagttgaagagggtaagccggtcatacatcaccgcgctgatcctatgccggggccggagctgggtgcctggtcactggtctttgaggatatggtaagcggcgaaacatggacggactaa

SEQ ID NO: 445360 - DNA, 633 bp, Serratia marcescens
atgaacgctgatccgctgttccatgcccttgatgattatctggcaaccgtggcggcgcagctcgcaccgggccagcgtcgcaagctaacgcgcgaggtggctattggtctgcgcaagcgccagcagcagcgtatcaacagccagaaaaaccccagcggagagagctatacgccgcgccgccgtaagattttgcgcactcagggcggggttaaattcctgtggaaagatgaagtgcgcgagctgagcaactggcgcactaccgggcgcggcgaacagcgcgccatcaccggctatgatgtcgagaaaggggcattgcgcacgttctataagcgcgatattgagcgctatattgaaatccatctcaaccagaccaagcgcaccaccacccgtaaagaaaagatgttccgccgcctgcgcaccgctcgctttctcaaggcatacggtaccgccagcgccgccgtggtgggttactccgggcataccgccgagatcgccagtgttcaccagtatggtgaggttgataccgtggcaccgggtgcccgtacccgttacccggcgcgtgaattgctgggctttacggaaagcgatcttgactggctggcggatactatcgtcagttttctgcaaccctga

SEQ ID NO: 445361 - DNA, 636 bp, Serratia marcescens
atgaacctgaatgaactctatcgcctgatctgtaaccttgtccgtattggtacggtgacggatgttgatcttgctgctgagccgccagttgcgcgagtctcaacgggagagaatacaacggactggattcgctgggcggctttgcgcgccggaacggctgttacatggtgggcacctacgccaggcgaacaggtgttactttttgccccatgcggcgatctggaaaatgccgtcatcatgggcagcttgtacagcgatagcgtgaagccaccggataacggtgaaacgtcaaatgtcactttgtaccctgacggggcaaaggttctgtatgacccggaaaccggcgcactggctgctactggtattaagagcgcaaccgtagaggcgtctgactctatcgccgcgactgcccccaaaatgacctgtaccgcaacaacctcaatcacccttgatacgccagaagtgatctgctctaaaaagctctcatgctccacgtttgagatgaaacagggcggcaagatgaccggcaatgttgagcatagcggcggcagctttacatcaaatggcgttgtggtgcatacccacaaacatggcggcgtagaacgtggcggaagccagacggacggcccacaatga

SEQ ID NO: 445362 - DNA, 366 bp, Serratia marcescens
atgaccagtgcaagatatcgcgggatgaacgccgaaaccggcgaaacgctcaccgataacgagcatatttctcagtccatcaatgacattttgttaacgccggttggctctcgcgttatgcgccgtgcctacggctcgcagctcaataacctgattgaccagccaggcaatgccgtaacgcgccttcgcattatgtccgcgatatacagcgcgcttttcctttgggagccgcgtatctcactgaccaatattgtactgacggaaaccggggcggggcagatgattgccaccatcaaggccagccgtaccgatacccaatcaccctttaccacggacgtaacgatcggcaggcaggtgcaggcatga

SEQ ID NO: 445363 - DNA, 912 bp, Serratia marcescens
atgagcggaacaatcgatctttcacaattaccgcctccggtggtggtggagccgctggactttgaaacgctgttcaatgagcgtaaagaggcgtttatcgcactttacccggaagatgagcaggacgttatcaggcgcaccctctcgctggaatctgagccgatcaccatgctgctggaagaaaactgttatcgcgaattgttgctacgccagcgcgtgaacgaagcagcgcgcgcggtaatggtggcgtactctgtgggcagtgatctggatcagctggcggcaaatttcaacgtggagcgcctgaccatcacgccggaagatgacagcgttgtaccgcctgtgcctgcggtgatggaatcggatgccgatctgcgcgtccgcactccgcaggcgtttgaagggctgagcgttgccgggccaacggcggcatatgaatttttcggcctgtctgctgatgggcgcgttgctgatgtatctgccgtaagcccaacgcctgcctgcgtcaccatctctgtgctttcccgcgagggtgacggtaccgccagccaggagttgatcgatatcgttgccagcgcgctgaatggcgaagaggtgcgcccggttgccgatcgcgtgaccgtgcaggcggcggagatcgtgccttatgagattgatgccacgctgtatatctatccggggccggagtcggaacccatccgccaggcatctgagcagaagttacaggcgtacatagccgatcagcgtcgcctggggcgtgatatccggctgtctgccatttatgccgcgctgcacgttgaaggagtccagcgggtggagctggcccagccggtggcggatatggtgcttgatgatactcaggcgtcccactgtaccggctacaccataaccgttggggggtacgatgagtaa

SEQ ID NO: 445364 - DNA, 618 bp, Serratia marcescens
atgagtaaaaccctcacgccgcccagctcaacgcgccttgagcgtgtcgccgcccgtgtttgcgcctctctgggggaagtgcgggtaccgctgcgtcagctctgggatccgtatacctgcccggttgatctgctgccctatctggcgtgggctttctccgttgatagatgggatgagaactggccccagacaacgaagcgtaaggcgatagctgatgcgttttacctgcaccgctacaaaggcaccaccggagcaatgcgccgcgttgtggagccgtttgggtacttcatccgggttaacgagtggtggaacattgataccgacccaggcacgtttacgctggatatcggcgttgaagacgaaggcatcagcgaagaaacctatcaggagcttgagcggctgatcgctgacgttaaaccgtgtagccgtcacatgctgggcatgagcctgcacttacagactaccggccccctttatgttggtgcgtctgcctatctgggcgacacgctaaccgtgtacccctatttccccgaaaccatttcagttggcggtgaggagtatgtgggtagtgcaattcatttgattgatactgtggagatctcaccaagtggcaactaa

SEQ ID NO: 445365 - DNA, 1008 bp, Serratia marcescens
gtggcaactaaatattatgccctgctaaccaatgtcggggccgcgaagctggcgaacgccacggcattgggtgaacaggttgaaattactcagatggcggtaggggatggcaacggcgcactgccgacgccaaaccctgcgcagaccgcgcttgtacatgagctgcgccgcgcgccgctcaacacgctgaccattgacccggtaaacaccaaccagattattgctgagcaggtgatccaggaagacgtgggcgggtggtggatccgtgagattgggctatatgacagcgacggcgatttgattgccattgccaactgtgcggaaacttataaaccgttattgcaggaaggtagcgggcgtgtgcaggtaattcgcgtcattctgatcgtcagtagcactcaggcggtaacgcttaagattgatccatctgtggtacttgcaacccggcagtatgttgacgaccagataatccaggttaaagcctacgttgatcagcaactggcggcgcatattgcagccagtgacccgcatcagcaatatctgcttgaggcggatattgataaatatatccccgctggttttcctctcccatggcctgcggcaacgccgccaacaggatggctaaaatgcaacggagcggcattcgataaagcaaagtatccgaaactggcggtaatttatcctactggcagcttgccagatcttcgcggtgagtttctgcgtggctgggatgatgggcgtggtgttgatagtgggagggctttactgtcaacgcaggggcacggtatccctaaaatttatggttattttcagacctatgatgttgagggtgatgaagcgccaacagggccatttactcaaggcgatatgggaaccacaaaattagttggaggaggggcgtcaggccatgatgaacgcatcttttttgactctaccagaattattcctgatgccgcagaagtcagaccgagaagcaccgcatttaactacattgtgagggcagcataa

SEQ ID NO: 445366 - DNA, 594 bp, Serratia marcescens
atgacgcaggcaaaattaaacagtgagtttgttgctaccgttgcgggggatatcaccgtatttaattacgatagcaaaactcatgagtacatttcttcatcagaagaatatctggcggtaggtgttggcctgcctgccaactcatgcactgacgcgccaacagaagagaaggccggttatgccatttgccggacagcagaattatcaggatgggaatacattattgatcatcgtggtgaagatgttttcagtacggaaacgggggagcctgttgccatcacatcactgggcgattacccagaaaataccaccacgcaggcacctgccacaccatacgattcgtggaacggcagcaaatgggtgacggatacggaagcgcagcacacggcagacgtggaggcagcagagcagcagaaaacggccctactggcagatgctcaggcaacaatcagcctttggcaaactgagttacagctaggcatcatcagcgatgaagataaagccagcctgatagcctggataaactacatcaaagcggtgcaggctgtagacacgtcaaccgcgccagatattgaatggcctgacaagccataa

SEQ ID NO: 445367 - DNA, 1029 bp, Serratia marcescens
ttgaaaagggtcttttggctggatgctgcgagagcgatagcaattattcttgtggtttttacacatgctcatgagagggctgggatccaaagcgagatgctaaggagtgttttttacagtatcgatcgtttgggtgtgccgctgttttttatgatttcaggcggtctaatattgcctaaattagttaactgtgacctgctagacttttataaaaaaagggtgcctcaatttattatattgttggttgtttggtcggtggttacgaactgcataaagtattatgtagatggaggtggcgtttgggattcattaaaaacagcattcgtcaataacaatggggtctatcccagcaattatggcggcgcatctcaaatgtggttcttgtattcaataactcagctatatctagtcgcgccatttttagccaagatgcttcataaggcatcaaacagagagataatggtatttcttcttgtatgcgttattttcaaccagtttaagcatacggcaaccttctttggtggtgattggggtgctctgcatcgaatgggcgcagacttaactggcccgtatcttatcttttttgttctgggctatctgataattgagcgatcagtatggtgcggtaaaacaataaagcactttacagcttatgctttaatagcaatggttcctgtaatttcattggtgctaatagatcactggagcggtaaagttaatgatgggttgcactggtatagtggttcattgtttattgttatatctggaattgggttactgttgcttatcaaatggttatttgagaatgccagcagcagaattttaagttttgttagcaagtgttcttttggtatctatttaacacattatgcttttatttatgtgtcccaagggattatgagagggcacctttcaggaatgagcgacattgagcggatgatggtttattttacattttcgttctttgcgggagcgctgcttacttccgttatgatgcgaacaaaaattactaagtatctggtagcttaa

SEQ ID NO: 445368 - DNA, 450 bp, Serratia marcescens
atgatgatgatattgggcatgtttccgtttgcgctgcaaacgacgccctaccagacgtcgaaccagtcgaatacatggcgacacgtcaaaaacgatcgcgtggggaaatccccgcgctatcagtacataggcccggatgaagagccgatcaccctctccggtacactgtacccggaaatcagcggcggcgatgtgtcactcaccacgctggagacaatggcatataccggcagagcctggcccctgattgaaggcaccggcaagatttacgggatgtacgtgatcgacgggttaacccaaaatcgcactgagttctttcaggacgggaaagcgcggaagattgattttaccctcagcctgaaaaaggtcagcgaagatatcagggagaagctggcggaaatcaccaatgatgatgtgctgtctatggtgaaagcaggagtgaatttctaa

SEQ ID NO: 445369 - DNA, 2931 bp, Serratia marcescens
atggcagaccgcaaattaaatattcaggttgctttcagcgccctgaataatatgtcccgccctgtcagtgcggcgcgccagagtgccgccgcgctggcctctgaaatcaagcagacgcaaagcagcatcaaagggcttgagcgtcaggcttccagctttgaccggctgaccgcagccaataagaagaccaccgatcaactggctcaggcaaagacgcaggcacgtgaaatggcggcggcattcggcccgctacgccagcgcagcgctgagcaagttaccgccctcaatcagcagcgggcagcgatccgcaacctgacagcccagcagaaaacggaacaggcccagctcaaccagttgcgcgccagcttctacagcgaagggattgcgatcagcagtaccagccgggcaacggaacaaatcagccagcgcaccgcgcagtacaatcgccaacttactgagcagcagcgtcggcttgagtctgtcactcaggcgcaggcccgctatgcccgcgccaaggaaaccggcgagaagctgcaaagttcaggcatgaagaccgcagcgaccggcgcggcggtacttgcccccgtagcagccgccatcaagagttacagcagcctggaagatgccatgaagggcgtatccaaacaggtgaatggcctgcgcgatgatgacggcaaccgcaccgctcagtttgctgagatgcaaaacgctatcaaagacgccgccgaaaatttgccaatgcccaacggggccgttgactatgccgcactggtagagggtggcgcgcgtatgggcgtggctaacagcgatgatccatggcagaagcagaagaaggatctactggattttgccaacaccgccgccatggcctcaaaggcgtttgagctgcctgccgatcagctgtcggaaagcctgggtaaaatcgccggtctgtataaaatccccattcaggatattggcaagctgggcgacgtcatcaactatctggacgataacgccaaatccaaaggctctgacattatcgacgtgttgcagcgtgtgggtggtgcagccgaccagctcggctatcagaatgcggcggcacttggctccacgttcctgagccttggtgagcagtcagaaacagcgggcaccgctgttaaagcgatggtgcgcgagctgggtaacgcaatggtgcaaccagatcgctttatggaaggtctggacgcgctggggctgagcgccgagaaggtgcagaagaacatggcaaaagacgcgatgggcaccattatggcggtaatggaagccaccaaaaagctggaaccagataagcaaatgaacgtgcttactcagctctttggtgatgaatatgcaatggcggtttccaaagtcgccaataacctgcctgagctgcgcaggcaactcgaattaacccacggtaccgcgtcgaaaggctccatgaagcgggaatccgatatcgataaagattccctctcatcacagtggcagataaccaaagctgagtttggcaacaatttcagcgcgctgggcgaaaccatgcgcgggccaatgatggcgattatgaaatcagtcggcggcgtcctgcaatcaatccggagctggattgaagccaacccggcactggttgccgccatcatgaagaccgtcgccgcgattggtgccattctcacggtgctggggtcgcttatgctggcgctgggcgcaatactcggcccgatggcgcttgtacgcctgagttttaccacgctggcaggcgaaggcgggatcgccaaactgctgaccagcatcacccggctgggcggcgcgtttcagtggctggcgggttcacctatgcaggcgctgcttactgccggtcgtgcggtctttggccccctgatcacgctgctggcgggtatctctgcccctgtctggggtctgattgccctgtttgctggcgtcgctattgcgatcatccagttctggcaacctatcaaggcgtttttcagcgggttctttaccggcctgatgcaggggctacagccgatcttttctatcgtctctgccgtattctcgccgctggtacccatatttgacgccatcatctcagcgctcagttcggtatgggactggtttacaaagctgtttgaaccgatccagttctccactgaggcgctgaaatcctgcaccagtgccggggagtccttcggcaagattgtgggtgatgccatttcactggttctatggcccgttgaacagctctggaaaggtctggatctggtgctggaaaagctgggcctaatccccgatcaggcagagcgggccaaaaaagccgttgagcaggtgaacacgcagaagaaacttaccgggctggcggatacgctcgccggggatctgaaagccgtcaccgcgcaatcgaagaaggaggaagagaagaaggagcagaagcggaaaacggaacagagccagcagcaacaggcgcttgccaataacctgaaaggcccggcgaacctcgcaccgaagatcagcggtagcctggataaaattgccagcaacacggcagagaagaaagacggccccggtgaaatcgtcttcaaaaataaacagccgtacattcctatccgtggagggtatgccgaaccggtgcagcaggttcagcggcaggtgccatcactcaccgcatggatgcagcagcaggctggtgcgctcgtttcttcggtgctgccgtacagcgttcagcaacctgccgcccgttcgccagtgtcggcggttccgtctgcggcttccgtcgcggcgctgatgcctggcggcgacgtgtttaactttgagatcaatatcaacgacgcgggccagatggatgaacaaaaacttgtccggcgcatccgcgaagagttcaccgttgcccagcagcaggccgcgcggcgcaaacgctcgcaactgaccgaccatgaataa

SEQ ID NO: 445370 - DNA, 339 bp, Serratia marcescens
atgaccaaagtaaccggtaaagaagttgtaacgctcaatgcgcctatcgttcgcggcaagacggcaatcagtgaaatcacgatcacgccagtcttaaagcaggccggatcgctgcgtggcttaaaagtctatgacgttctgacgtcgaattatgatgcgctagttgttctgctgccccgcgttaccgccccggcgctgaccgctgacgaaatcgcccgcatggatacgtgggacttctgccagctcgccaatgcggtggttgattttttgcagccaccttcggatcagagcgggacggatacgggcagcgcgtcatccgatgcccctgcgaacgcatag

SEQ ID NO: 445371 - DNA, 516 bp, Serratia marcescens
atggctctgcctaaaaaacttaaatacttcaacatgttctttgatggggataactatttcggcatggtgccggaaatcaccccggcgaagttaacccgcaagaccgaggattatcaggccggtggtatgcctggttctgtcgcggttgatctcggctttgatgccggggcgctggatatggatatcacccttggcggcatggatgcggggctgctgaaaaaatggggcatcgccaccgccgatggtatgcaaacgcgctatgccgggtcttaccaggatgattcaaccggcgaagcggtacccgtagaaatccagacgcgcggacgcttcacggagatggatccgggtacgtccaaaaccggggatgacacttctcataagtacaccctgaaaaatacctattacaagctgaccatcaacggcgaagaaatcattgaagttgatgtgctcaatatgatctacaaagttggcggcgttgacatgatggaaaaacaccgcgctaacattggcttataa

SEQ ID NO: 445372 - DNA, 1128 bp, Serratia marcescens
atgttggatgatgaagcgcgttattcgccccgcccggcgttcagtattcagattgagggcaagcagctcaccgcgctggatgaccgtttgatctcgttgtcgctgacggacaatcggggatttgaagcggatacgcttgatctcacgctggacgattcagacgggcagatcgtgatgccatcgcgcggcgctaagatttccgttttgctgggctgggataatgacccgctggtatttaaagggctgtacaccgttgatgaggttgcgcaccgtggcccgcctgaccagctcaccatcagcgcccgcagcgcagactttcgcgacacgttcaacgtgaagcgtgaatactcctggcacgatattaccgttggtgatgtggttgccagtatcgccagccggtacgacctgcgcgccggggtaagcgaggagctggcgaagattgagatcgatcacgctgaccaaaccagtgaatcagatatcagttttctcaccagaatggcggatatgctgggtgctgttgctaccgttaaaaacggcatgttgctgttcatcacgccggggcagggcgtaacccagagcggtaaacctttaccggcgatcagcatcgtgcgggccagcggcgacaagcatagttttagcattgccgatcgtgacgcttataccggcgttaccgcttactggctggatctgaatttcggtaagaaacccgccaccacggtacagacaaacacccgcagacgtcgaaggacaacccagccgaagaagccaaaagaaccagtctcaagcagcaaggaaggggattacatggcaggcgcggaaggtaacgtattcgtgatccgcaagacgtttaaaacggagaaggcagcgaagcgggcagcagcggcgaagtggagccagttacagcgtggcgcggcgtcattctccatcacgctggcgcggggccgggcggatttgtacccggaacaaccggcaagcgtatcgggctttaagtccacgattgataatggttactggacgattacccgatgtgtgcatgatatcggcagcggcggctttaccacctcgctggagctggaagttaagattgatgagtggacggctgaggcgggtgacgaatcaacgggttaa

SEQ ID NO: 445373 - DNA, 1299 bp, Serratia marcescens; identical to SEQ ID NO: 98273

SEQ ID NO: 445374 - DNA, 1086 bp, Serratia marcescens; identical to SEQ ID NO: 201647

SEQ ID NO: 445375 - DNA, 1143 bp, Serratia marcescens
atgaataaatcaatgtgttgtttgatttttatggccttaactatacatgcagcaacagcagcagaccaatgccttggggtgctgcaagtaagcaaaatgaaagtaaatcagtttaataccagaagttcatttgagtctaaagccaaatcattttgtaatgaatactctaattacaaaaagtcgggcaatgcaggttcaattgggataagttacggtaacttcggtttaaatggctcctcatcctcgtctgatatagaaggggtggcgaaaaagtactgtagttcgagtgatagccaatctttaagtgaaggtgcttttaacaattatcttgaggatgttaacccggaagcatttaattcatataaaatttgcaaggaatttgaaagcacagggctaattgttagtttcgacgcgattgccgaagaggaggttagtctgatattgcccgttagctacaggccctacgcagcaggtgcggacatgaagctctcatatgagatagcgagcgacccagattcatcggttagttgttcatgggatacaaattcaagcctggaagataataataatgatgctattaagagcaaaacacttttgctctcatgggataaaaacggcgatgtcgggggagttcttaaatgcaatagaaagaaaagcgataaggaagctattattcttttgtcaagtattaaagatgggaagcatatgtcgtttgtatgggaggcttacaaagatcacgaaaaatacagcacaataaaagaaatttcggaacgaatcgatagtcttaataataaaataaatactatgcaatccgctgtggttggttttaaaagtagtacctgcccagcaggatggatagaatatacacccgcttatggtcgatttttgagggggattgataagagcaatactaaaattgatccagaagggatacgtgatgcgggagctttacaagaagacttagtaaaaaggcactcacatgaaataaaaatgcctgctaaatggggggataaatcaggtggggttgcaggcttcggaatagacaatggttctcttggtatacaaacgacaaatacacaggaatctggaggtgatgaaactcgccccaaaaatgttgcagttttatattgcactcctgcttaa

SEQ ID NO: 445376 - DNA, 1944 bp, Serratia marcescens
atgaatgaattaatggaatggcccgatgtaaggctgaaaagccctgtcagagtgaacaatgatgtaaaatcaccggatgattttatttcatggctagcggagaacaaatctgtcttagataactgtttggccgacctaaggcatcccttcctattagaatcgcctgaaaactggattaaattacttcatagttggtgttcgaaaaaaaacattctggatgacgcggatattattctgacgttattttgtgcagagttgcttcatcgacatcctgaagtcacaacatggattagcgtccgcgaagtgatcatgaattcttacgccgttgaatactggatcaaaaatgcgttacttgcactatgtaacattaatcaggaagctcggcaaacatacgtctctcttttttcagaagtattctatgccattgaacgaggtgatttgaaatcacatcggcattctgagctaactgaacaattgtctcactgggaacggtcagtcaataaacttgaagaaatctggcgtgggtttcgttattcagaccccagaatgtttgccgagtcgagtctgttttcggttctagctgacatagatattaaccagatggccggcctactaaatgcatcacgtaacccggttttgatcgatacagtgcttatggtatcgggggccggaatgttctctccccgtctgagcagatggagggagtttgcgctttcagccgagcaggcattttcaaaagatggtcattggaacggaagcatatttcttcctatgctactcgcgcatgtatgcaacaggatgaaggatattccgtttgaactggtaagacaggggaaaatgattgaagaccagtataaatccgaaatagatgccttagccgatagtattgcccacacactctacggacgttcagacttcgctggtattgtgacacgatggtcagcttggctgatgcgtaatattgtcctgagcgatcaggatgctaaagattttaaacgtccagtttatgcgctttcaatactcatggattcacttgggcgccttacatcacagctgaatctgccagaaacaagcccgtccgatgctcccgactgggagaccctttgctacttttctgctcgttctagtttcgctcacgacaacaactgtaaaccgcaaaactacaatgtattcgaacagttatggctgcgaggccccgatagtttttctttagaacagagccataaattaaatcgtatattatcactgcacttcagaagagaaggccagagctttccggggatatcttcacacctcctggcctatccgcttgtacaactcggcgacacagctgcgcgttggcttaacctctggaactccgcatattttctacgtgaggcagcagagtttggcctacccgaggccccctcggaacggtactcacttcgacataacattggagaatgtcttttagtgctctgcacttccggccttgctgctctggatcagatgtccgtacagcttggagaaggtaagctaagtgctccccagagttttctggatatgcatcgatatctacactttgccgtgaaggagatgatgtcagttgatgacaccataaatataaagcactggaagcaactttttctgcacctctgtttgagacgcgtgatatgggatggctcgttaatggacgaggcacagcagtcactctttcctcccactgaaaaacccgattttcaggactatctggaatattaccactccgacataaaggatctggccgggatgctgtccagtgcaattcgtaacaacgcaaatacagaggcgattaaagttttggtgacagctgccaatataaatttggcagagattgttggtcagctaaaatggctaaatcaagttgatggcaggaggtattcactgaacatggacgtcatatctgatctgaagccgctcttataa

SEQ ID NO: 445377 - DNA, 627 bp, Serratia marcescens
atgaaaattttttctccttcactaatagtatccagtccgactaagcgttcactcccggaaaaaaacatttactgggggtgcacacccggcggcgatcccactaaattcccgccggatataaatgccttaagaatacgccgtgatctagatgtagcagaacccctaacttttttcgtagacgcggtcagggatgcgcaggaaaggatctggatattggacggttatttttttgccgcacccagcgaaaaaattgatagtacagattatgtacttgatattgctaaatggtttcacgcgcgacttgatgcaaccgacatccgaattttaactaaggttcaccagcaattcagttctgagatggaatctatttttgaaatacaggaaagagaaattaacgcattacgcggaggagggaagcccaaatgttcgattcagatcagacaaaccttaaagcagaaatttgattttatgcatgaccgttttgccgtgattgatgatgaactctggcatttcggggctacagttggcggattccatacttccgtctccgctgtcagtcggggatggtgtgcaaatgaaacaggggctttaaatttttttgatctggcctggagggaaatggcatga

SEQ ID NO: 445378 - DNA, 1611 bp, Serratia marcescens
atggacttacttgatacatcagaaggttgggcagttatccgactggcctctctggctaagcaaagctcccgggagcctgccagattactattcgccactatcactgaactcacacctgaacgcatgctgccaccaccgatgaatggcttcgaaacagtggccgtcaaatcgaccaatgagcgcattttcttcagacgcacacttttagcattatcggatgctcgacaatggtatctatctcttcaggaaggcgtttgcaaaacgcctcttcccacacttgaggctgaacgtaaccctgctctggatggcctgcctcttttgaccgtgggtaagctttatgatgagaaaccttggccccagttgagtttacccatcggcgaaggattttttgcacttcctttgtccgaaaacgatcctgctccttttacaggaagcacaacttcccgtatacatcggcgatttgatggcggcgggattgaactctttgcaggatttctgcttgatgatgaagccacgacatttgtagcccagcgaatgcacataaacttgcgtggctatcaggagtatcttgggagtgcctgttacgtaagcccccagcgcatattacgacgggttgaaaattttatagttgatgcagacaaggaaggcgatgagtctcttctattccggtttgttgctatgcccggtcaaacagttgagggacttgagcttacaacttttgacacagacatgaatttgctaactgattttcaaactcagaagttacgaagcgatggtgtagtgatacagaaaaaagcagtatgcgatggagagtacgggtatgttttgcggcacccttctcagggcattttggcgttcagtcccccctcacccttcatacgacatatcaatgttggtgtaggagtcgcagacagaacacaatacatcgtcgatgtgcccatcgatgagtcaccagacgccgaaagattgacctatcacgcgtcgcgtagcacggtacactcaacctcgactgctgtagtgcgtgatgctgaacccgcacagattaaagcaaaacgacgcgaacaacattatcgccgtcagcgtaaaattcaggctgacacgcaggggcagcgctggtttaacgataatcatcgaaaggaagccatgcgctttttccatgcgctaatccagacagctaaaaagcagatcattatcgccgacccctattttggaagcttacagttctcgcagtatctttataaagtaagttcacgtgaggtaaacgttgacattttaaccacgacaagagcttttacaggaaactcacctgaagagaaagcaagaattttcctttatggtatcgaagaaattcgtaagaaccatcacataaccatcaagacatacatcctacctgggaatcttcttcatgatcgctttatagtcattgatgatgaagtctggttctctggaaactccctaaactctttcggcaaacaggcctcagtaattgtcaaactacctgacccgcagacaataattgataatctaaagcttattctcgctcaaggcagacagttggaaacccatttttccttatcgaaaaggtcatatataagtggagaaaacgaatga

SEQ ID NO: 445379 - DNA, 558 bp, Serratia marcescens; identical to SEQ ID NO: 126522

SEQ ID NO: 445380 - DNA, 570 bp, Serratia marcescens
atgtcagtcatgacacgagaaaggcttctgaatgaagcggaccatctgatgcgcgaacggggttactctgcattcagctatgctgatttgtcaaagagcattggtatcaccaaggccagtattcatcaccacttcccaacaaaagacgttttgggcgaacaagtggtgattcaggcccataccgataccaaaaaccgatttgaacagattgaagcgacggagaatacggttgcgcagatgcttaccgcctatgtagagcttttcatcgaaagctatcgcacgtcgcgtatgccgctatgctgtgctttgtcttcggaaatggccaatctgccaccgaatatcagagtacaggcgaccgaatatttcgatatgcagattgcctggttgaccaagattgtcagccgtggcgttgatgcaggggagctgactgctgacctgctgccatcaaaaatggctctgcttattttgaatttatgcgagggcgcaagcgttgtttcccgggcgattaataagcctgagcttttcaacgatacgcttgaacagatcctaatgattgttaaaagaaaataa

SEQ ID NO: 445381 - DNA, 342 bp, Serratia marcescens; identical to SEQ ID NO: 126524

SEQ ID NO: 445382 - DNA, 903 bp, Serratia marcescens
atgctcgctcaacagaacatactggcactattgcatacgtttgaaacggcagcactgcatatgagctttactaaggcggcgactaccctcaatctgacgcaaggggccgttagccaacgcattcgttctcttgaatccatgctcggattcaggctatttatcagaatgaccagaaagcttcagttgaccgatgaaggggagcgtttacttggcgtactcgcgttttcacttaaacgcatcagtgatgaaatagaagatattcgcgtgcaggggctgagaggaaccttgtctgtcggccttccacctaccttcgcttttctctggctgatgccgcgcttaccggtatttaccgaacggtggccggggctgaatatcaatttcagagtgagagccggtctggtagattttaatcttgaacgggtagatgtcgctatctactacagtaatctgaaataccccgatctctactgcgaacggttatctgaagagacgctggttcccgtctgtattccatctcttgcaaaaaaaatcaggcaagcaaaccattggttagctgaagtcccattcattcatacgtctgaatccgttgactcccagaatgttttttccgaatggcgagaatggtgcagggagtctggcaaaaacctgcctgttgaagataattttttgagcttcaacaattgtcagatgtcgattgaagcggcactcaatggcggcggtatcatcatgggcagaaaacgactcattcgacattacctcgatgagggccgactgattgccccttttgaaatagaaatacccgccgggcgaggatatgacctcattatgccacgagaaaaccttaaccgaccaggcgttcaggctttggccgaatgggtaagaaatgtgtttaacgaggaataa

SEQ ID NO: 445383 - DNA, 1320 bp, Serratia marcescens
atgaagggtcttaagttagtggttattggagcgggttcaagctacacacctgaactgatggaaggcattatcaagcgtcaaaatgaatttccgatccgcgagttatggctggttgatattgaggatggccgtgaaaaaatggcgatcattgctggcctcacccgacggatgctggaaaaaaatgggctggatataccggtttatgaaacccttgaccgcacagaagcactgctcggtgccgattttgtttgttctcagttcagggccggctgcctggaagcacggatcagcgacgaaaggatatcgctgaaatacgacatgatcggtcaggaaaccaatgggttgggtgggtttgccaatgcatgccgcactatcccgattgcattggctatagcgaaagaaatggaacaactgtgcccggatgcctggttgctgaactttaccaacccgtcgggaatggtcactgaagcgatactgaaatacagcaaagtcaaaaccgtagggctgtgcaatgtgcctgttatcatgcaaaaaggtattgccagtgctttaggtgtcagtgacatcaatgaatttatcatgcaggtcgcgggacttaatcacttcatttttgcgcgccatatttttcatgaaggtaaggataagctgcctcaggttattgagctgatttcagaggggaatgatcctttggtgcctaaaaatattcctcctttcaaatggccggatcggttgttggcgaatatgggaatgataccttgcccctacctgcgttattactacatgagcgacgacatgtaccgtcaggagcttggcgaagcacaaggggaagggactcgtggtgagatcgtaaaggagctcgaaagagaactattcgaaatttatcgaaacccggaactcgccgagaaaccgaaagcgctggaaggtcggggagggcagtactattcggatgcggcatgtgaattgatgagcgcaatatataacgacaaacgcatcatcatgcatgtcaatacgcgaaacgatggtgcgattgcgggcctgccggatgactgtgcggttgaggtcagttcaatgatcacccgttcaggacctataccactgaatgtcgaacctttcccggaagatgtacttcgtctgattcaactgatgaaaagctttgagcaattgaccattgaggcagccatcagtggtaatcggtatacggcatggcgtgccttggttattaatcccctagtcaaaagcggtcaactgcttgaaaatgcattggatgaagtgatcgaacataacaaagcgttgatgccggccttccaacgcaataaataa

SEQ ID NO: 445384 - DNA, 330 bp, Serratia marcescens; identical to SEQ ID NO: 126527

SEQ ID NO: 445385 - DNA, 795 bp, Serratia marcescens; identical to SEQ ID NO: 126528

SEQ ID NO: 445386 - DNA, 564 bp, Serratia marcescens
atgtccaaacttcaccttactgttatcagtacattatgcctggcgttgtcgagccaggtcgctttttcagccagttttacgctgacaagtcatgagcttgaaaaaaaccgtttccccgcggctcagaccctgagttcaccttatggatttgggtgcagcggtggaaaccttgccccctcttttaactggagtggcgcgccggcaggaactcaaagcttcgctctcaaaatttatgatagggatgcgccgacaggcctcggttggatccactggcaggtggtgaatattccctcatctcttcactcgttaccggctgggataacggcggataacaaaaatctcccgcaaggggctcttcagacccggactgatttcggtatcccgggttatggcggcccttgcccgccgaagggtgaaacgcaccgttatgagatcacgctgacggcacttcgtgtcgacaaacttccgggaataacggcggactcgacgcccgccctggtcggctttatggcaaaagcgaactcactgggcgaagcgcatcttcagattacgcagggccgctaa

SEQ ID NO: 445387 - DNA, 1107 bp, Serratia marcescens
atgagtaagttgttcaccccctacaatctgtcaggcatgcagttaaaaaaccgcgtggtcatggccccgatgacccgcacccgcacaatgaacgacgtgccggatgacgtcgttgcactttactacgcccagcgcgcctctgcggggctgcttatcaccgaaggcatgcctgtttctgaagaagggcgcggctatctgtataccccggggatctacaacgctgcacacgttcagggctggcgcaaagtgaccgatgcggtacatgcgaagggcggccgtatttttgctcagttgtggcatgtgggccggatgtctcatacctcaattcagccgggcaacatcgcgccagtttccgccggtaccgtacaagcggttaacaccaccgtctttgcactgaccgagtctggcgaaccgggacctgtcgttccaagccagccgcgtgcactggaaaccgcagaagttcgacgcgttaccgctgactttgtccattcagcgcgtctggcaatggaggccgggtttgacggcgtggaaatcatggcggcgaacggcttcattttcgaccagttcctcagcagtgaactgaaccctcgcactgatgaatacggtggctctgtggaaaaccgtcagcggttcctgctggaaacggttgatgccatctctgcggctattggtagcaataaggtgggcttgcgcatttcaccgttcgggcggatttacgacctggcgccttatgaaggtgaagaagagatttgggccagtatcgctgcggccctcggccaacgtgagctggcttatgtgcacctctattatcaacctgtttatacccaggcaccggtacctgccggtttcaaagccgcgttccgtaaaactctggggggcaccgttattgccgccggcggcttcacccgcgagattgccgaaaccgcacttgaggcagacgaactggatcttgttgcgtttggcgtgccgtacatcgccaaccctgatctggtcgaaagaatgcagaacggctggccgctggctgaaagcgatcgcacgacgtattacggcgtgacggggtcgccggaaaaaggctacaccgattatcccgcctgggaagccaactaa

SEQ ID NO: 445388 - DNA, 702 bp, Serratia marcescens; identical to SEQ ID NO: 126531

SEQ ID NO: 445389 - DNA, 816 bp, Serratia marcescens
atgactgccggcaaatctaccctgcaaataacggagttcaaaatgagcgattactttaaaggcaaaaaaatgcttgtcgtgggtggcaccagcggcatgggtctggaaacggcgcgtatggtgctgaaagccggtggcagcgtggtactgacgggcaacaaaaaagacaaggcagaagcggttcagaaagagctgagcccactgggttccgtgtccgtgattgcggcaaacctgatgaccgaagagggcatgaacgccattcgtcaggagattaatgctaatcatcgcgatattagcctgatggtcaatgcggccgggatcttcatgccgaaaggctttaccgagcatttggaagccgattacgacatgtacctgatgttgaaccgggcaaccttcttcatcacgcaggacgtggtgaagaacatgctggccgacggccgtgaaggggcgattgtgaacgtgggctccattggcgcgcaagccgcactcggcgactcaccggcttccgcgtactccatggccaaagccggtctccacgccttgacacgcaacctggccattgagctggccagtgcgggtatccgcgtgaacgcggtctcgccagggatcgtgcataccccgatttatgaaggcttcatggcgaaagaagacattgccggcgcaatgcaatcgctgaacgctttccatccgctggggcgtgtcggcacgccggaagatgtggccaataccatcttcttcctgttgtccgacaaagcctcttgggtgactggcgcaatctgggatgtcgatgccggtatcatggccgttcgcagataa

SEQ ID NO: 445390 - DNA, 753 bp, Serratia marcescens
atgaaaaaattgaaatttaccttcaaaaatgcagaaggtgaggaacttgccgggttgcttgaattgccagaaaatccaaaagcctttgccctgttggcgcactgctttacctgcgggaaggatctgaaaggtgctgcacgcattgccaggaaactgacagaaaattcaattgcggtgcttcgctttgatttcaccgggttaggcaacagcgaaggcgatttttccaataccaatttttcctcgaatatttctgacctgctgtgcgcggtcgattatcttcgtcgggaatacgaggctccttcgctgctgattggtcacagccttggcggttcggcaatcctctctattgcagccaaagtgcctgaagccagagcggtcgtaaccataggttcgccaggcgaattgacgcatgtacagcggttgttcaaagacaatatcgaagatatcaggaaccatggcgctttcccggtagagcttgcaggccgggtattcacgctcaaaaagcaaatgctggataacattcaggagcataaaatagcggagaaggtatttaccatgaataagccgctgctgatttttcatgctcccaatgatgataccgtgctgattgaacaggcagagaaaatttttaaagccgccagacaccccaaaagctttatctcactgggtgaagcagatcatcttctgacgcatcctcaggatgcggaatatgttgccgggattatcgttgcctggagttctgcttacatttag

SEQ ID NO: 445391 - DNA, 495 bp, Serratia marcescens; identical to SEQ ID NO: 126533

SEQ ID NO: 445392 - DNA, 849 bp, Serratia marcescens; identical to SEQ ID NO: 126534

SEQ ID NO: 445393 - DNA, 1224 bp, Serratia marcescens; identical to SEQ ID NO: 126535

SEQ ID NO: 445394 - DNA, 1353 bp, Serratia marcescens
atgacgaaacactatgactatatcgcgattggtggtggtagcggtggtatcgcctcaatcaaccgtgcggcgatgtatgagcagaaatgcgctttgattgaagcgcgggagttgggcgggacttgcgtcaatgtggggtgtgtaccgaaaaaaataatgtggcacgctgcgcaaatcgcagaggccattcatctttatggcccagactatggcttcgataccacattaaaccgccttgactgggctaacttgctaaaaaaccgcagtgcctatatcgatcgtattcatacttcatacgaaaatgtgttaggtaaaaacaaggtagatgtcatcaaaggttttgcccggtttgtggacgcgcatacggtggaggtcaacggggaaacgattaccgctgaccatatattgatagccaccggtggtcgccctagccattcctctattccgggagcggaatacggaattgattcagatggtttttttgcgcttgaggcgctaccggagcgcactgcagttgttggtgcaggctacattgctgttgaactggcaggtgttctcaatgcattggggtcaaaaacccatttgttcgtacgtaagcatgcgcctttgcgcagttttgacccgttgctcacagaaacactggttgaagtcatgaacgtcgaaggcccaacgttgcacacccaagcgatccccactgcagtggtcaaaaaccaggacggcagcctgacactgaagctggaagatggtcgtgaacaaacggttgactgtttgatctgggcgattggccgtgagccagccaatgacaagttgaacgttgagatggcgggtgttgaactcgatgaaaaagggtacgtcaaagttgataaatatcagaataccaacgtgccgggtgtttacgcggtgggtgataataccggtgcggttgagttaacaccggcagctgttgctgcgggccgtcgcctttcagaacgcttgtttaacaacaagccggatgagtatctggattacaacaatatccccacagtcgtctttagccacccaacaataggtaccgttggcctgactgaaccccaggcgcgtgaggaatatggtgatgatcaggtgaaagtttatcagtcatcttttaccgccatgtacaccggcgtgacgcgtcatcgccagccatcccgcatgaagctggtatgtgtggggttggaagagaaaatcgtcggtatccacggtatcggtttaggcatggatgaaatactgcaaggctttgctgttgcgctgaaaatgggagcaacgaagagagacttcgacaataccgtggcaattcacccaactgcggcagaagaatttgtcacgatgagataa

SEQ ID NO: 445395 - DNA, 762 bp, Serratia marcescens
atgaacaaatacatcctcgcgttatctgctgcacttatcggctcgcaggttcaggcagcaacgcccgcagcgcttcccgcaccgatcaagcagttggaaaaacaaggtatagaaataatcaaacccttcacggctcccggtggggttcagggctggttgggaaaatatcagggaacgggggtgacaatttatctgacccccgataaaaaacatgccatatcaggttatatgtacgatgagaatggaagtaacctcagcgaacaggtcataaaagaggagatttacatccctgctggccgcgagatgtggaaaacactgtccaaagctgccggtatcacggaaggcagcaataatgcaaattgtcagattgtcgtgtttgccgatcctttttgtccttactgtacaaaattcagacaggaagtgcagccctatattaaggacaatacaatcgctttgaaaacgcagttagtgggtgtcatgcagcccgacagtggccgttacgcggctgcgatattgtcttctgaaaaccccgcgaaggtctggcaggatttcgagttgtcgggtggcaaaaacaagcctgcacttttggagaaaacgccgcagccgattttctcgcagatccaatacaaccagaaattgatggaagatgtgggggcaagcggtacgccagcaatttattatcttaaccacgccaacatgcttcaacagatcgtcggtctgccggaccaggaacagatggccaatcttatagcgtgtaaatag

SEQ ID NO: 445396 - DNA, 969 bp, Serratia marcescens; identical to SEQ ID NO: 126538

SEQ ID NO: 445397 - DNA, 450 bp, Serratia marcescens; identical to SEQ ID NO: 126539

SEQ ID NO: 445398 - DNA, 294 bp, Serratia marcescens; identical to SEQ ID NO: 126540

SEQ ID NO: 445399 - DNA, 1254 bp, Serratia marcescens; identical to SEQ ID NO: 126541

SEQ ID NO: 445400 - DNA, 645 bp, Serratia marcescens
atggcacagattttaccatcaatttttggcgcgaatatcttaagtctgcaagatgagctccgttttttagaagaagagaacactgaaatattgcatgttgatttaatggatggaaccttcgtaaataatattgcctttgggccgaatcaaatttctgcaatgaaaaaagccagcaaaatgactttcgacgtacacatgatgctggctaatcctgaaagacatattgatgatgttatcaatactggcgcagaaatgatctcagtgcattatgaatcaacgccgcatgtgcattttattttacagaaaataaaaaaggccgggcgaaaagccggtgtggtcatcaatccgggtacgcctgaaagtgttctggaatatttgttggacgatattgattacatcctgattatgaccattaacccggggcaacccgggcagactttcatcgagaaaagcctcgagaaaatcaggaaaaccagagaaatgattgctggccgacacattcaaattgaagtcgacggtggcgttaatctggaaatagcggaaaaagtacaggaggcgggtgctgatttaattgttgtcggtggcgcattatttaatgacaaccctaaagcaagctatcaggcattaaagtctgtcatgcattaa

SEQ ID NO: 445401 - DNA, 753 bp, Serratia marcescens
atgagtcattttgaaggtaaagttgcgctaattaccggtggtgcgcatgggattggtaaaggaattgcaaaacaattcgccgaacgcggtgcgcataccgtcattgtcgattataacgaggctaatggcatcaaaactgcgcaagaactgacctttggcaatgttaaatcgctctttgtcaaaacggacgtctctgatccgcaggcactggctgaagtgcgcagaaaagttatcgaaacttatggccgtatcgacattctggttttgaacgcaggtgtcgcttttgccaataaagtcaaagacattactttcgaagagtggaacaaaacactctcaatcaacctgacgggtttattcaatacggtcaaagcattttacgatgacttcttaactaaccagggttcaatcgtttacatctcctccggttctgcgctgtcaggtactggcgggggggtgagctatccggccagtaaagcggggggggaaggtcttattcgtggtctggcgaaggagttgggtccaaaaggtgttaacgtcaacgctatcgcgccgcgtcttatcgacaccggcgaaatgatgcgtgttaattacccgacgcaggcagatttagacgcagtactggagaaaattccggtccgtcgtctgggcacaatcgatgatgtcgcaaacctggccatcttccttgctgataagtcaaattcttacatccagggacagacgatcctcatggatggtggccgtacaattgcctga

SEQ ID NO: 445402 - DNA, 561 bp, Serratia marcescens
atgggtgttcaagaaaatactgtcagtattctcagggaactagaacaaaacgcgctcaatatcgacaatgatcaggcacagcattttatcggaaagatccgcaatgcgaagcatattttcctgcaaggtgcagggcgcagcggtattgccatccgcgcgttcgctaaccgtttattgcatttaggcttctcggtcagcgtagttggggaaatttcatcacctcatacgaaagcgggtgatttgttaattattggttcaggcagtggcgaaacaggcagtctcaagagccttgcgcagaaagccgttgagtgtggtgtcgacgtggcgctggtcaccatgaaaaaagactctgcgattggccagttggccaactgcgtgctggtattaccgggaacggtcaaaactgaaaacgatcgcactctgggccagttttcgcagccaatgggttcctctttcgagcaactctgctttatcacctacgatgccatcgtgcttgaactcatggaccaactgcgtgaaaccagtgaaaccatgtttaaacgacacgctgattttgagtaa

SEQ ID NO: 445403 - DNA, 1512 bp, Serratia marcescens
atgatgaattatgtggcgaagcaggtcaaaatcggtttttcgggtgtgcaggttctccacggtgtggatttcagcgtaaagcctggcgagatccacggcctctttggccataatggggcgggtaaatcaacgctactgaaaatcctggcgggcgttaacacgcaggatagtggagagctgatgatcggcgaaacgccggtgcaccttgcttcgccacgggatgcactcaacaaaggtattgcttgtgtgtatcaggaactccgtctcattcccggcatgagcgtctggcaaaacctttttctcggacgtgaatgtcgtaaaggcagtggctttatagatgatgcaagtatgatcgcgcataccgagaaagtactaaatgattaccatctgagtttcagcgctaccgcgctggtcaaaaatctgtcacatcctgaaaagcagatgctggaagtggtttctaaccttgatcgcgacgcccgttttcttttcctcgatgaaccgacgaccgcgctggaaggtgcgcaggcagaagaactgctgcaggcagtacaacgtatcgcacgcgaaaagcagattggcgtagtgctggtctctcataaattagacgaagtgttgggtgtttgtgatgaagcaaccgtcatgtgcggcggccgagtgatttataacgaaggcaaaaagacgctgagcaaaagcgccatcattgacgctattgtgggcgatgcaaatgcttatcaggcgccgtctaacagccgtagtctgatccgcggcgcgatgggcaaaccctggctctcggtcacaaacctgcagactgatcgcctgaaaggcatcaaccttgaggcatatcgcggggaaattttgggtatatacgggctggccggcgcaggccgaacgcgcttgtgccagacgctgtttgggttggaaaccgttaccggtggtgacatccggctgggtcacaaagaataccatccttcttcaccggcaaaagccattgataaggggattgcttacctgacagaagaacgtaaaaaagatggcttcattcctcagatgtcgagttatgccaacgccatgctgccggttctgaaaaaattccgttctggcggatttgtcagtcacagcgctgcgcggcaggccgccgctgagttgctaagcaagatgaatacgctgggaacgctgagcggaccgattaaatcgctttccggcggcaatcagcaaaaagttctgctcgccagggtcattgcgcaaaacgccaatctggtattgctggatgagccgaccaaaggcgtcgacattggggcaaaagcggatatttatcgcatcatccatcagttggcagataaaggctgctgcgtcatcgtggtatcgagtgaggaagaggaattgctggacgtggcagataccattacggtgttccgacagggtaaatgcgatggtgtgatcattcctgcacgcgaccttaaacccgcagatcttcgcaaagccgcatgggagcatgctgaagcccaggcttag

SEQ ID NO: 445404 - DNA, 981 bp, Serratia marcescens
atgaaactccgtaccacaatcaccgcaggtgcagcgatagtcgcactgtcctgcatgctcgccggctgtaaccgtgaggatactgaaagcaccgtgggtgccggcaaaaaaacattgggcgttacgctgccgaacctcaccaacccttattacgttgccatgaaaaaaagctttgaagacaatgcagcggcacagggcttgaacgtaaaaatttcgattgctgataatgacgatgccaagcaactttcgcaggtgcagaacttcattgaacagaaggtggatgcggtcgcagtgaactgcgtctcctcaggcccgtgcgtgtcgatcataaaccagcttaatcaggcaaaaattccggcgtttgccatcaacatccttccggataccgaggggatgaagcagcaaaacgtcacgctggttcaaggtgttcagaccgatcagcgtgaaggcggcaagctcattggccagcagttgttgaaagacattggtgaaaatggcacggcgacagtgggtatcgtgggagaaccaacatccattgccgcaaatgcacgtgatgaaggcttcaaggaagccgtggcatccaacaaaaacattaagttcgtcgcgctggtcaatggcaaagtagaagaaacaacctccctgaaagtcaccactgaaatgctgcagggcaggccagaaattaacgtcgtgtactcagacaccgaaccttccgcgctcgggtcactggcggcaatccagcaactgggggtcagtgacaaagtgaagctgtatgcgtttgtggataaagaaggcgtcaaagccgttcagaacaacagcatattgaaagccggtgcgattcaggagccggttaaactggctcagttgctggttgaaaatgccaagaagagtctgaacggtgaacaggttccagccatgatcaacaacccaccgctgctggtcaccaaagacaacgcagcatcggtaatgggttcagcatactga

SEQ ID NO: 445405 - DNA, 1026 bp, Serratia marcescens
atgagttcaataactacccctgcaaaaatcaaaccgcctaagcagccgctcaaagtccctgcagaagcgggtatcgccgttgttttcttactggtcatgctgggcgggtttatcgccacgcctaacttcctgactgtttcgaacatgatggtgttgcttctgaacggcgcggtcatcggcttcctttgcctgggacaatcctttgtcctgctgaccgggggtatcgacctctcctgcggctccatcgtggcgatgacctgcgtggttgcagctttgctgatggagaaatttggcattccgtggcagcttgccgtacccatcgttttggcggtgggtgcgctgagtgggctggtaaatggtctgataatcgaacgcaccggcgtgccgccattcattgtcacttttgcgatgatgggggttgcggcatccataccacaaattatcaccggcgccgaatcgatacgcgtgacgcaaattggttacagcctcatcggtcagtcaaaaccgctgggtattccgttccctgtcatagcgctgctgctggccattgttattggtgtcatcttcctgcgccgcaccatcaccgggactcacatctatgcggtaggcggtaacgcagatgctgcacgcttatcggggatcagcattccacgcatcaccctgttggtgtatgcaatttccgggctttgtgcggcatgcggcggcctgatttatggatcgcgtctgatgacaggctatccgacggcgggccgtggtgacgaactgttcttctcaatagcgggtgcggtggtaggtggcgtcagtctgtttggcggcactggcagccttatcggcgcgatgattggcgccatgcttattgcctcaatatcgaatctgatgaacgtgctgaacgtcagtgcctactggcagccgctggtcatcggcctgatcatcctgttcggcgtcactttcgataccttacgtacctcgaaaaaaatcgtgatcccctggctcaaagtcaggaagtcacgcaaaacacaacaataa

SEQ ID NO: 445406 - DNA, 1449 bp, Serratia marcescens
atgaaacaggaccttgttgcgggtatagattcctccacccagtcttgtaccgtcatgctgcgtagtcttgaaaatggcaaggtgatcgcacaggctcgtaagttgcatccaccgaccacaccgccgtgtagcgagcaggatccgcaagcctggtgggatgcattagtctccgcgctcactgaattaaaacaatggtggccacgtattgcaggtctggctgtcggtggccaggggcacggcctcgtcatgcttgataatcacgatcgcccgctgcgtcctgcgaagctgtggaatgacacggagtctgcaccgcaagcgcgtgaattgtgcgagaagattgctccggaagaatgggcacgcctgacgggctccgttccggggccagcaatgaccatttctaaactggcctggacagaacaaaattatccggggctgctggaaaaagcccaccgcatcatgctgccgtttgattatctggtttaccgtctgagcggtagctttgtgtgcgagcgcggcggggcatccggtacgggttacttcaaccccttcaccaatagctgggaaccacagctggcagcggtggttaacagtcaaattgactggatttcccgctggcccactatcatcccgtcgcatcaacctgcaggcgtggtgaagttgatgcctgagctggaggaactggcgggtgcaatcgtgggtgtcgggaccggcgataacatgtctgccgcactgggtatgaacctgaaaaccggtgataccggtatctctatcgggaccagcggtacgttatatggcatcaccaggaaagggattaccgacagcaccggcaccatcaacggttatgccgatgcggccgatcgctttatccccatgattactacattgaactccgccaaagtcaccgatacatttcgcaaaatgctgcgcgttacccctgacgaattcgacgagctcgcgctgagttcgccacccggcgccaacggtcttcagcttgttccgtggctggacggcgagcgcacccccaaccttcctgacgccacgggacacatgcgcggattacgtaccaccacaacgatgcaggatatggctcgcgccaccgtggaaggcgtactgtgcggccttctggcgggcggtctggtactgaaacaacatggcttcactgacgacggtcgcattgttgtcaccggcggcggcgcaaagtcacgagcctatcgtcagattctggctgacctgacgggcaagcccgtttggatttctccggtgggtgaaacggcagccgcgggtgcagccattcaggctgctgctgccgtgctgggatgcacaaatattgaaatggccgatcgctggagtgtgccgcttgagaaagtggccgagccacaacaagatgcgcgccatgtcctggacgcttacgttacctatgccaatgcattatcaggagagctgcaatga

SEQ ID NO: 445407 - DNA, 1164 bp, Serratia marcescens
atgactgtttaccacctcagtactcgtattaactctaatgtcccagctgattttttgctgtatgatctgtgtatttatcgcatggacgcagacaggaataaacactccctgattgatgtaaaaaaacagccttttcaggataactatgaaacgcagagtcacatgacaggagatataaatgactatctctccaccatttatattatggaagtcatactctaccggaaaaccctgctacatacgcaccgtatgacaccggttcctttcactaaaatgtacacgcttgaagagttttcatcgggcaaagcttggtctccggttaagagagagaatccatgttattttgagtcaaaaggcacagcgaagtctgagggccaaggggtcgaaacaagacatattagaatcactatcccggagcgtccatttattgcgaaagaatatcctattggaactccacacgatccgtttgaaaagaataaagttgattctgatatcaacgatcgattttatcaccagtcttatccatctcaggcaagtgccagcgtatgcggtcccgctgcatttttttattgcctgcaaaaagatcgtcctgatgtgtatgctcaggctgcaagggagctttggcgatatggaaaaactaaagtcggtgagcttaagatatctccaggagaaggatgtaaacatcctgcgggccatttttatgatgacatctctggccttgactggatgactctggcagggctaagggattcagaaaatgcgatatttagttttgatacccttgattcccctaccgccggagtcactatgtggcaaacactaacggaatggtttgaaaaagcaggctatgaaaaaacattcagcaatgcaggaattactcaggctggtgtccagggaattagagagtttaataattatattgctcaaggatataaagtcatagcattaataaatgatggacttcttgaaggtagtaaagacaacacaaccctacctacgcactgggttgtttgggatagtcccgtaacacaggatgccaatggacatgttaatttaaagttattctcttgggggcgttcaaccaactggattaaacagaaaaaagacttacaattttttatcaataggttcttcggggggatggtttttaaaccattgaaatga

SEQ ID NO: 445408 - DNA, 564 bp, Serratia marcescens; identical to SEQ ID NO: 96840

SEQ ID NO: 445409 - DNA, 582 bp, Serratia marcescens
atgagaaatatggaaaaaacgggtcacctggcatggtgcgcacttatcgccctgctgactgccagggaagatggcctggtggcgtcggagtcgcaggaaaacctgtttatcacccgctggtttgcgcaggtgaaaaaacagcgtcgcttttctcgtgacgtggccaccgatgttgactggatactcaaccagggccgtacgctcggcgttcgcgcgcggctgcgccataagctggattatctctggcgtagctgcaccggcgaactgtctgagcagaacgacctttttcgcctgacctacgcgctggagctggcgaagcagtacgactgggggtatcacgtcctcagcgacagtgagtggagcggtcgaaataagattctgccatcggcatcggtgaacagtatctgtctgctgaaaagcgcgctggatattggttttaatgatgacgggacgcaggtgctacctgtgccggcgagaattggcggccgcgccgaggggcttaatgcgctgctgaaaagctgtggctgggaggcagtcagtaatgacgatcactggaaactggtggccattagagctggttga

SEQ ID NO: 445410 - DNA, 594 bp, Serratia marcescens
atgttgatttcttcgtcgtctcaaaaactacatctgcctccgaacgttcaggttcgccggcgagggtatgcgtatgtcatttactacaacagcgacgatgaggtgggtggagtagttgtcaccgaaaccccatccggcgacacgcagctgcgcccgtatgttaaagaccctgtggaactgaacaaagatattgtggcgatggttgctcaacagatggcagatgcgctgattgagcatgccggccgacagcctgatggtgctattccctcaccaccggctcccatacccggcacgacgctcctcgagaacaccatgttcccctgctcccgctgcgggcgaattactgcccggctggtttttgctccggagtgtgcgtgtgaggctgatatgctctctctgggtgaacggctccggaatgacgtcaggtatgccccctacccggtctggctgattggtgcgccggacagtgacaacgatagtgttgccaggcaccttacgctgcagctggcgccggtcagcggtgaggtataccgggagcatccagaccagatgaacagccgactggtggaactggatgacaaacatcagtgctga

SEQ ID NO: 445411 - DNA, 1344 bp, Serratia marcescens
atggccaaaggaaaagtctataccattcaaattacggggcttgcggcagatgactactggttcggagagcaaagacaatcggatgcaaatactgaatggcgggataccttacgggatgccaggaacaacaaagctgaagctcgcgtaatttgccagtgtatggggaaaaatgaggatcattcactccgaagactggtggtcaggtaccggaccgatacggataaattttatctgtctgcctggcaattcactggcggacagcaccggcatgactgccggttttactccatctggcaagataaatcgtcagctaaagcctattcccccggcgtcgttaccgtaaacagtgaaggcctgttctgcatcaaacttccggtcggtcttatacgaaaaaatccaggcgacgagccagtacagaacgtcaatccggcccgacatccacgtacgggcaaggcgaagccttcgatgagtcttctcggacttggacatttcatctggcagcaggctgaaatcaatacctggaggccgcagttcgtcagaaataaacccaggaatgccctctggatagccagcagaattaaccggactgcagataatattcaggcgggaagtgtccggctgtctgacgtgtttctggtgagcgcgtccaaagaaagtgtacagcatcgggaaaataaggaacaggtgcgcgatgccacccagaacaacaagcgtatggtcgctgttgcgttgcttaagcgtgacgccatcgaaggctatgctgagctgctggccggacatctgaaactctccagtccttttggtttccccgcactgcgggtttcgcctgccgttctcaagggctgtgagagaagttttcagaccgagctgaatgcctggagagcgggtcataaagtggtcgcgattatcgagacagaacccccggtgctgcattttgaaaaaagagacggacgggttatccccgtcaatgaggcggatgttataggcattgcgctgatgcgcgtatcaccgcgatttatccccgtagactcagggtatgaggagatcattgaaactcgcctgtgcgaacaggaacgtagttttgtaaagcccctgcgttttgatgccgatgatgacacattgcctgatttctggctgacggatacagacggagaacggtcgctaccgatggaagtctttggcatgagaacgcctgattatattgcgcgacgggacgataaaataacgctgtataacgacaaatacagtgctcaggggtggtggttctgggatgcgacggcgcgggatgctgaaaataacattacgacgtttccgccgaaagcgggtgatggatctgacgtgtag

SEQ ID NO: 445412 - DNA, 609 bp, Serratia marcescens; identical to SEQ ID NO: 96828

SEQ ID NO: 445413 - DNA, 321 bp, Serratia marcescens; identical to SEQ ID NO: 96827

SEQ ID NO: 445414 - DNA, 225 bp, Serratia marcescens; identical to SEQ ID NO: 231540

SEQ ID NO: 445415 - DNA, 699 bp, Serratia marcescens; identical to SEQ ID NO: 147046

SEQ ID NO: 445416 - DNA, 984 bp, Serratia marcescens; identical to SEQ ID NO: 151091

SEQ ID NO: 445417 - DNA, 522 bp, Serratia marcescens
atgtctgaccacgccactaccactgcttcctttacgctcgagtcgctttatggcgcacatcacggctggttgaaaagctggctgacgcgcaaactccagtccgcctttgatgcagatgacattgcccaggacacttttctacgggtaatgggcagcgactcgctctcgacgatccgcgatccgcgctcctttctgtgcactctcgctaaacgggtgatggtcgacctgtttcgccgaaacgcgctggaaaaagcctatctggagatgctggcgcttatgccggaggcgctcgcgccttcccccgaggaacgcgagagccagctcgaaaccctgcaactcatcgacagcatgcttgacgggctgaacggaaaaacacgagaagcgtttctgctttcgcaactggatggtctgacatacagcgagatcgcgctgaagctcggtatctccgtcagctcggtgaaaaagtatatggcaaaggctatcgaacattgtctgctgtttcgtctggagcacggcctgtga

SEQ ID NO: 445418 - DNA, 954 bp, Serratia marcescens; identical to SEQ ID NO: 151092

SEQ ID NO: 445419 - DNA, 2325 bp, Serratia marcescens
atgacgcctttacgcgtttttcgcaaaacaacacctttggttaacgtcgttcgcctgagcctgctgccgctggccgggctgtcgttatccgccttcgcagcgcaggttgatatcgcaccgggttcgctcgacaaagcccttaatcagtatgccgcgctcagcggaattaccctgtcggttgacgccagcctgacgcgcggcaaacagagtaacggtcttcacggtgactacgacgtcgaaaccggcctgcaacacctgctgaacggtagtggcctgcaggtgaaaccgctgggtaataacagctggacgctggagcccgcaccaacaccgcaagaagatgccctgaccgtggtgggcgactggctgggggatgcgcgcgaaaacgacgtattcgagcatgccggcgcacgtgacgttatccgccgtgaggatttcgccaaaaccggcgcaacatccatgcgcgaggtactgaaccgcattcctggcgttaccgccccagaaaacaacggcaccggtagccacgatctggcgatgaactttggtattcgcggcctgaacccgcgcctggccagtcgttcaacggtactgatggacggtattcccgtgccgtttgccccttacggccagccgcagctttcactggcgcctgtctcactcggaaatatggacgccatcgatgtggttcgcggcggtggcgcggtgcgttacgggccacagagcgtgggcggtgtggtgaactttgttacccgcgctattccgcaagacttcggcatggaagccggcgtggaaggccagctcagcccaacatcttcacaaaataacccaaaagaaacgcacaacctgatggtgggcggcacggcggataacggttttggtaccgccctgctttactccggcacacgtggaagcgactggcgcgaacacagcgcgacccgcatcgacgacctgatgctgaaaagcaaatatgcgccaaacgaagtgcataccttcaacagtcttttgcaatactacgacggtgaagctgacatgcccggcggcctgtctcgcgcggattacgacgccgaccgctggcaatccacgcgcccttacgatcgcttctgggggcgccgcaagctggcaagcctcggctatcagttccagccggacagccagcataaattcaatattcagggcttctacactgaaactctgcgcagcggctacctggaacagggaaaacgcctcaccctttcaccgcgtaactactgggtacgcggcattgaaccacgctacagtcagagctttatggtgggtccttctgcgcacgaagtgggcgtgggataccgctatgtgagcgagtcgacgcatgaaatgcgttactacacgaccaccagcagcggacaactgccgtccagcgccagcccttacgatcgcgacactcgttccggcaccgaagcgcacgcctggtatctggatgacaaaatcgacattggcaactggactatcacaccgggtatgcgctttgaacatatcgagtcataccagaacaacgccatcaaaggctcacatgaggaagtaagctacaacgccccacttccggcgctaaacgtactttatcacctgactgatagctggaatctttatgcaaacactgaaggatcattcggcaccgtacagtacagccaaattggcaaggctgtgcaaagcggcaatgtggaaccggaaaaagcgcgaacctgggagctcggaacccgatacgacgatggcgcgctgacggcggaaatggggctgttcctgattaactttaataatcagtacgattccaaccaaaccaacgacaccgttaccgcacgcggtaaaacacgccataccgggctggaaactcagactcgctatgatcttggcacattgacgccaatgctcgacaacgtttcagtctacgcaagctatgcgtatgtgaacgctgagattcgcgagaaaggcgatacctatggcaatcaggtgcccttctcaccaaaacacaaaggcacgttgggcgtggactataagccgggcaactggaccttcaacctgaatagcgatttccagtccagccagtttgcggataacgccaacaccgttaaagagagcgctgacggtagtaccggtcgcatccctggctttatgctctggggcgcacgcgtagcctatgacttcggcccgcagatggcagacctgaacctggcgttcggtgtgaaaaatatcttcgaccaagagtatttcacccgctcttaccacgacaacaacaaaggcatctacgcaggccagccgcgcacgctgtatatgcagggttcgttgaagttctaa

SEQ ID NO: 445420 - DNA, 900 bp, Serratia marcescens; identical to SEQ ID NO: 151093

SEQ ID NO: 445421 - DNA, 999 bp, Serratia marcescens; identical to SEQ ID NO: 151094

SEQ ID NO: 445422 - DNA, 957 bp, Serratia marcescens; identical to SEQ ID NO: 151095

SEQ ID NO: 445423 - DNA, 768 bp, Serratia marcescens; identical to SEQ ID NO: 151096

SEQ ID NO: 445424 - DNA, 354 bp, Serratia marcescens; identical to SEQ ID NO: 151097

SEQ ID NO: 445425 - DNA, 231 bp, Serratia marcescens; identical to SEQ ID NO: 231556

SEQ ID NO: 445426 - DNA, 261 bp, Serratia marcescens; identical to SEQ ID NO: 147047

SEQ ID NO: 445427 - DNA, 396 bp, Serratia marcescens; identical to SEQ ID NO: 96772

SEQ ID NO: 445428 - DNA, 159 bp, Serratia marcescens
atggaatttctcttcattttattattttttaccttatacatatcaattgcctgtgagtatcaccggcgccggtggcgcgcgctgtatcgccgtaagagaaataaaagaaaaggcatgaaaatgaaacggatggttaatattctgctgttcaggcaataa

SEQ ID NO: 445429 - DNA, 3138 bp, Serratia marcescens
atgatacttaataaaaaattgaagttagcgtattgcgtgtttctggggtgttatggcttatctcttcattcatctcttgccgcttatcgggaaccaggacaattaggttcacccgacagttggaaaaacgcagagtttaatcgccaatgggggcttgaggctatttccgccgagttcgcctatgccagaggctataccggaaaaggcgtgacgattggtgttattgatgatgccattctctctcatccggaattcgccggtaaactgacgcggctggatgacggcagctataatttctcgtatgataaacaagataatatgtcattcggcacgcatggcacgcatgtcgccggtattgcagccgccaaaagagacggctccggtatgcatggcgtcgcctacgacgcggacattatcggcgccaagttgaacgacttcggcaatcgcaacggccgcgaagaactgatccagagcccagcccgggttatcaataacagctgggggatcccaccggcggtcagaaaggatgccaatggcaacaccatttggctgccgaacgggcggcctgactatgtggcgtgggtgaaaaccgacgtcatcaatgaagtgatgcgcaataagtccaacctggaatggggcagcgagcaacccgtgcccaccggcgggcacagcgccatggcgacgctgctgcgcgccgccaagcatggcaagctgatcgttttctcggcaggcaattacaataactacaatattcctgaggcgcaaaagtcacttccctatgctttccctgaggtattaaacaattatctgatcgtgaccaatctgagtaataacgataagttaagcgtttcctcaaccagttgcggacatacggccagtttttgcgtatcagcgccgggcagcagtatttacagcagcgtaggggagctggtttccaataccggcggggcggtgaaccgcgaagcctataataagggcgagctgacggttaaacccgattacggaaatatgtctggcacctcaatggcggcgccgcacgtcaccggatttgccgccgtattgatgcagcgcttcccttatatgagcgccgctcaaatatccgcggtcatcaaaaccaccgccaccgatttaggcgaggccggcattgatcatttattcggctggggccgcgtcaatttacgcgatgcgatcaacgggccgaagatgtttatcacccgagaggatattccgcaggaattctatgtgccgggttcctacagtgaaaaacagtttgtggtgaatatccccggtcttgggaatatcgtcgaagccggaaccccgattgagcggcgttgcacgtcgagcgaatgtgacttcgattcgtggagcaatgacatccgcggccacggcgggttgaccaaaacgggcgccggtacgctggcgctgttgggcaataatacttacagcggtgacacctgggtgaaacagggtgtgctggcgatcaacggttcggtggcgtccaatgtctatatcgaaaatagcggcacgctggccggcgacggcactgtgggggcgttcagagcggttcggggcggcagcgtgacgccgggaaatggcatcggtacgctgcacgtgttgcatgacgccgtgtttgatcgcggctcgcagtataacgtcgaggtcgcagacaatggccgcagcgataaaatcgaagcgcggcgcgctttcctctacggcggcagtgtgaacgtcagcctggagcacagcaaaaacctgctgtcgcaaaatgaggcgcaaagcctgctgggcaacaaatacaccatcctgacgacgacggatggcgtgactggccgcttcgaaaatgccaatccttcgtatccgtttgtcaacgtgacgctggactatcagggcaatgacgtcggccttgggatcacgcgcaccgccgcccgttttgacagcctggccagcaccgagaacgagaaagcggtcgcccgcgcggtggaaacgctcaacgccacggaaccggtcacggaaacggccaaacgcagcgtcgcggcgcctaccgctgaagcgctaaccgcactgcagggcgttgaaggcgaggcgacagccgttaccgaagcgacgagccccgtgaccggccacccggtttatgaaagcttccttggcttcacttcggccagagaattgcaacaggcgacccgtcaactgtccggccagatccacgcggatatggcttccgcccagatcaacgaaagccgtaatctgcgcgataccgccaccgagcgcttgcgccaggctgaaggacgccgtaccgcttccgatatcaaagcggatgataatggcgcctgggcgaaactgctgggcaattgggggcatgcttccggcaacgacaacgccaccggttaccagacatccacctatggcgtgctgttgggtctggacagcgaactgtttgacgacggccggctgggcgtgatgaccggatatacccgcacgtcgctggatggcggctatcagtcagatgctcacagcgacaactaccatctggggctgtacggcgacaaacgtttcggcgcgttggcgctgcgagcgggcggcacctatacctggcatcgcatcgacacgtcgcgctcggtaaactacggtgcgcaggcggatcgcgaaaaggcccgctataacgcgcgcaccggtcagctgtttatcgaaagcggttacgattggagcaacgacgtggtcaatcttgagccgttcgccaacctggcgtacacccactatcgcaacgaggggatcaacgagcaaggcggggcggcggcgctgcgcggcgataagcaaagtcagtccgccaccgcttcgacgctgggcctgcgcgccgatacgcaatggcagaccgacagcgtggcgatcgcgctgcgcggcgagctgggttggcagcatcagtacggcaagctggaacgtaaaacacagctgatgttcaaacgcagcgatgcggcgttcgacgtgaacagcgtccccgtttcccgtgacggggcgattctgaaggcgggcgtcgatgtttgggttaacaaaaacgccgtgttgtccctcggttacggcgggcaattgtcgtccaaccatcaggacaacagcgtcaatgccggtctgacctggcgcttctga

SEQ ID NO: 445430 - DNA, 183 bp, Serratia marcescens
atggcagagccctttcttaaaaaccggaagcgatttacctcgtcgctggaaaataaacttgttcccctgttcgacgagctgtcgcatacgacccgtatacccaaaagccgcctgctcgatgaggcgatcgaggatctgcttaaaaagcacggtgtaacggtgccggctgacgaacggcgctga

SEQ ID NO: 445431 - DNA, 408 bp, Serratia marcescens
gtgactgagaaaaattatatcgtatgcggtcaaactggcgctggcaggagcactccacagaagagaacaatgttgaatgtacgcattgatgaagacctgaaaaagaaagcagaagctgtgctgacggaacagggaatgacggccacagacgccgtgacagccctttaccgcttcatagccgaacacggccgtatgcccgtgcaaagcagaattgtcacgatggatgatgcggttgaaatgctggtattcgctaaatcagacacgtcacaacttgaacgggtctgtggcgaaaaaaatgccagcacgctgctgaccaataccaacgtgaagatgatatttgccgaaagcggaaccccgcctgacaccgaaccatcagggaaacaggcctccggtacggacaaacggtga

SEQ ID NO: 445432 - DNA, 645 bp, Serratia marcescens
atgccttattataagggacgctggcaccgttacagcgaggcagagcgccgcgcttatggcgcagcgatgcgtgaaaaagcaagcaaagcggccagcgccgcctggcacagggaatggatcagcaaaacgggactgcgggaacgactctggaccgacagagccattgctgattttctcaaaccgccccagaaggcaggccctgtctacgcctggaagcgtaaatacatactcagagtggaacagaccccggccttccgcgcctggatgatacagcgtcaggactggcttatacgccggggaaaactgccggcatcactgcagacaggtgaggatatgacaggattaattggcagcggtctgacattacggaccgtctatgaaaatgcacagggtgagaagcggctgatcgtatcagttacggataatgtggtcctctggaaaacggccgaccccgaattgcctgccgggggtaaatcacagggaagcgccacactggcgagcttcaggcgctggatcgccagtgaacacccggcttccggtgtggaactggaagccttcgacaaggttcttcaccgtcgcaaatatgcacaacagactacccgtgagatccgggccatgaaaaaccgtattcgccaggaaaggtga

SEQ ID NO: 445433 - DNA, 549 bp, Serratia marcescens
atgggaacctacatacgaacctgcgcggagatcaaaaccgcggacggctggcaaccggtcggctacggcgcgtttcccccggtgttgtggcacgacatggacgggtatgaagctcccgcgtacagcgaaccctttaaggaccagaactacggcatgtttggcctgtttgccggcgaaagaaattacagccagtgtcaggtgctggccgagccgcgcggtttcccggacgacatctcggaagaggcactgcgacatcttgtgcctgaagtatggcaactggaaagcaattggggctggggtgagccaccaccggccactgtcgctgaacggatcgcccgttcggaggcagactgctacgggtattcgtggctgagtgcagcggagctgaccacgttcgactatgaccagacatttaccgatcagcgccccgatacaccacaaaccgtcacctatcgtgaatttctgggcaagcggtattttctgcacctggatgcgctgaaaacgctgggcgaacaggctgaggtgcgcgtgctgttctgctttatctga

SEQ ID NO: 445434 - DNA, 636 bp, Serratia marcescens
atgaacatcagcaacgatatccgggcacgcattgaggtcgccgcggaggcgctggtcagtgaaggcgtgaacagcccgaccaacgagcaggtccgccagaagctgggcggcggctccctgtcccatatctcgccggtcatgcgggagtggcggcgccggctgcgcgagcagactgacacaccggcgctgcccgtaccggacaagctgcagcagctgtccgccgatctcgccgcccgtctgtggcagcaggcccgcgaactggctgaggctgacgccgcggcggtacgcgaacaggcggatgcagacatcgcccaggcggatgaacagcgtgatgaggcactggacgaagtacgccgcctggaagccgaactgacgtacctgcgcggcgtggcggacgaacgtgaccggctgcgcggacaactggaagagacgcgcgcggcacttgccgaatcccggacgaataacgccgttctgcaggccacagccgatgccggcacgcggcagcttgacgacacgcgggcagagctgaaactggccagagaagataataaggcgctgcaggcagagctcctgcagctggcgcgcgcggccggcagacaacccgatcctgcgcaaaataaaaccggtaaggagtga

SEQ ID NO: 445435 - DNA, 228 bp, Serratia marcescens
atgatcaccgacacccggacacccgaagaacttgccgcggccatacagaccgcgctggaaatagccgcccggttcggcggcagggataccgcgcaccataaagcgtgggttatcgatcagatgtgccgcgcgctggccggcgccggctacgaggcatatgtagccggcgtatgcgccggcgagaacggcccggacacctacacctgggacgagggcattacaccatga

SEQ ID NO: 445436 - DNA, 1077 bp, Serratia marcescens
ttgatttcagctattcaccgcgggtttaaaaatctactcgataaactaaagcagcagctcgaacagttcagaatcaacccgccatcactgacgtcgcttgctgccggaacgcttcgccttttcgttctggtcacgctgttctggcttgctgcctcacattttcaggtgccggataacccgtatatgcgggtgatacagaagggggtcttactgtgcggcacccttctgctcgccttctatagcttccggtgggttatttccgatcagctgacccataatccccccaatctcggatatggtctggtcatcttaacgggcactgcctccctgattggtaacgcaggggattacgccctccttcatccgcaggaatccctgccattgatcgctattgcagtcattaccttgttcattgaccgctgcattcgtcctgcatttccggctcccgtgctcacggctgacgctaaccctgttcctcagcgcgcaatgggatactcccgcaggaaagcctcttcgcaggaccgacgtttcattgccgcacatgaagcaggtcatgccctcatttttgccgcctgcttaccgtatcccgacgatctgattgtcgtggtgaaagattccccggacgccgccagtaatgctatgggttatgtcagaaaagaacaacaccaacacctgctcattgaaaaagaggtcgcggaatggaatatgcttctatctcttgccggtgctgccggtgaacgggccagcaccgggcgtgaaaccctgggcgccatatcggactcatgcacatggcaggcagttgcaactgcatacctgtcctgtctgcatcgtgggatgttctataactccccgtctgacaaactggaaatcgaacaaaatgagcgccagttgaccagacttctcgaagaacaggaggcaatactggatcagttctttgaactcaaccacgatgtccatgcgcgactgacgcaaaggttgctggatgacggcagcctgaaaggggtccagctgcatccttatttcgaagcagttcattttccgcccggattcccacgtccgtcagacatacccagctga

SEQ ID NO: 445437 - DNA, 261 bp, Serratia marcescens
atgttcagcatcatttatcacgccggcgctgtcgtccttttcctggtcatgagcctggcggccggcgccggcctcctgcttcatggccatgaatatacgacaggtcatttctggaacatgacggggctgtgcattgtgtcctctctcgtctggagctgggaagttgtccaggcaaaagaagcctggtacatattacgttcactccggcatgaaggtcagggcggtgatcccataaaacgtaaagaggaagggaaaaattga

SEQ ID NO: 445438 - DNA, 216 bp, Serratia marcescens
atggcacgtttgtatatgtccattgtcacagcattaatcctgttgtttttaactctggcatccggaaccgctctgttggtgttcggtaaacagttcccctataacctctacgataccgctgtattcatgttcattggatgcggtctggtgcttgttctgaaccttgttcaggctcgccatattttcaggcagctaaagaaaaatgaggctcattaa

SEQ ID NO: 445439 - DNA, 306 bp, Serratia marcescens
atgacaaaaccgggttttattcagcatcccgggacacatcagcgcggggattccatgcgcgcagcctgtgttattgagcatattgaaaatgaggcgatgcgcggatgcggcctttattatgaaatttatcactaccgggttgtctgccggttattgcaattactgcaaacgctgaacgccactgacaaaataacgctgatagaagaagctaaccggcgaggatttacgctgaatgaaaccagcattaaagaaagtcgtcagtgttattccaacatcatcagagaaatccgcgagagccaatattaa

SEQ ID NO: 445440 - DNA, 303 bp, Serratia marcescens
atgaaaaaagcaatattttccgcattattactctgcattatggcgtcatattcaacctccgtcatggccgctgacgcctgtgaagtggtgttatgcatgtacggtaaaaccaccgggaacggcggcggcaatgaatgccattctgctgaacgtgcattctttaatatcatcaaaaagaacaagcacggttttctgccggaccacactgccgatgccagaaaatcgttcttacttgagtgtgattcggcagacccggcaattatcagccagattatcaataaatttggccgcatgcatggttaa

SEQ ID NO: 445441 - DNA, 1029 bp, Serratia marcescens
atgaacgctgaaaacctgtcgctggattttatgaaaaaccagctgtttggtgagtttattgcgcaggacggcctgacggaaattgccgttaaccggccgggtgaactgcataccaaaatccgggggaaatggcgaagacatgaagccccgattacgctgcgtcagtgttacgcctttgccagagcgctggcgtcctggcaggaagataatatcgacgacacctcgccgatcctttctgccacgcttgaatcaggcgagcgcattcaggccattattcccccggcctgtgagcgtaacaccgtgtctattacgctgcgcaagcccgcatttgggcagaaaacacatcagtcatggattgatgcgggattttataaccgggtgaccggtaaggagcgaacggaaggcaaagatgttgaactgacccgctattatcagagtgaggatatgccccgctttatggaaaaagcggtggaatacggcaagacgatttttatcgtcggtgaaaccggctccggtaaaaccacctatatgaaaacgctgctgcactctattccccggcacctcaggctgaccaccatcgaggataatcccgaaatccggttctatcaccacaccaattatgtccatctcttttatccggcggatgccggggataatgccattatcacgcccggcagactgatacgcgccaattatcgtatgaaccctgaccggatgttactggcagaaattcgcggacaagaagcctgggatgcgctgaaaatcgtcggttccgggcatgagggattgatgacctccctgcatgcgggcagcccggaagaatgtattgaagggttaattgaccgctgctatgaaaaccccgactgccggaacatgcctttcgacgtgctgttacgcaaggtgcttaagagcgttgatgtgatagtcagcattgatattcacggtgacatacgccggatgagtgatgtttattttaaaccccttcatctcaatgacatgagaggtgtattcagtaaagggcttcaataa

SEQ ID NO: 445442 - DNA, 1305 bp, Serratia marcescens
atgaccgataaacctgtcccggacgaaccggaaaaaaccaccgcagaacgggaagcggaagcccgcgaacgcgcccgtgcggcaatggcgtatcaggaaccggagcagagaacatcccccggccagccggaagtgacccgttttcgtaaggtatccggtcgccgcacgctgatcgtcagcctgctgagtctgactctggtgatcgccctggcatccggcggcgatcgtcttttcagtgcattgaaagggggtaatgagaaagaagccaacaccgcgccgccgccctccgccgggaagacgcttcatgagcgtcaaaatctggggatggacagtaacccgtttggcctgttcgggccgcacacacaggacggaacagaccctctcagccagaccgtctcctccgcacccaccctgccaccggccccacccgccctgaacaaggcagccgcgctggctgacggggtgaacaacgcccgaacaatgccgggcgataatgcacacacgtccccgggtgaaacgcgcagccacgcagaaacatccgacagtgggtcatcatccacaacgtacacatcctgtccatcagtactgaccaggggaaaggatggcagccttcgctgcccggagactgccgcgccggaatcgggtaacaacgacaatccgggcgtcgcccgtgtcaccggcgtcagacgactgggtctcgatcctgatctctatatcccggtggaccgctatatcccgtgttcgatgatgtggcgcttcgtgtccgatgtcggggggcatatttcctgcctgatcagtgaagatgtttacagcgccagcaaccatgtaacgctgatcccggcgggaacgatcgcccgtggcatctaccgcaccggggcgctgcaacacggacgcagccggatgtttgtactgtggacggagctgcgcacgcctgagcccggcagcctgcaaatcccgctcagcaacacgcaggccagcggctcgctcggcgaggcggggatctcaggctggatcgacaatcacttctgggagcgcttcggcaatgccctgatgctcagtacggtgcaggacgtggcagcggcggcgtcggatgctgccccggggaaagaccgcaataccgactacaccgaaaacacccgcgccgccacggcggaaatggcgaaaacgacgctggataacagcatcaatatcccgcccaccctgtatctgaatcagggtgatgtcattggcatcatgaccggcaccgatattgatttctcatccgtctggcggctgcgactgaaaaagaggtggtatgaacgctga

SEQ ID NO: 445443 - DNA, 891 bp, Serratia marcescens
atgatgctgaaaaacatcctgctcctgaccggcttactggcgtcatgcgcgacatggagcgccgccaccccgcgcggcagcgcctatgacagccggatgcagaacgtatcgtataacagccagaacgccaccgtggtgaatacccgccctggctacgtcaccacgctgctgttcgacgacggtgaagctgtgattgatgcgcaagcgggttttccaaaaggctggacggtgacgaaaagtgataaccgggtcggcgtcagcccgaaccccatcacccagccggtgacggacgccagcggcaacaacgtcagccaggtgttcctgcccacggcaaaggactggaagaccaacctcttcgtggtgacctcaaagcgtgattacagcctggagctgaacgtgctggaccacgattcccccgcgcaggcgttcgttatccgtttccactatccgaccgaggctcgccagcaatctgccgccgccagcgccgcgcgtcagacgcagcagcgggaaagacaggagaagcagcagatagcgtcggcattcggacaggccagcacgccacgcaactggcgctacaccaaacgggtagccgcgggttccgcctccatcgcaccggattttgcctgggatgatggtcgttttgcttatatcggtttttcccccatcagaaccctgccttcctttttccgggtggttaacggacgggagcaggcagtcacgccccggacggttaagcagggtaattacaccgtgatggtggtgccggcagcgccacaactggtgttgcgttacggcacctcggtggtggggatcgaaaacgacggattcgggcgcatcccgataacccgtagcgacactgtttcaccgtccgttacgctggaggcgaaatga

SEQ ID NO: 445444 - DNA, 141 bp, Serratia marcescens
atgaaattcagcatcttgtttttggtgttgtgcgcgcttacgggctgcgcgcagcatcagggcgacctcccgccggtgtccggcgatccccagccggtgaattcccccgccatcattcaggagctgactcaccatgtctga

SEQ ID NO: 445445 - DNA, 1032 bp, Serratia marcescens
atgtccggtggtatttttgttggtatggacaaaaacatcatggatggactcaatgccgtgttagaaggtcagtcttctacctacggcaccctaatcagtgtgattatcgtcagttctttcaccctgtttattacgtatcgcgggtatcagacgctgggcggtaaactccagacaccggttgaggatgttgtctgggatgtgggtcgtatgttgcttattactacctttgttttaaaccgcgagggctggctaaatgccatcattgcggccattgaagggcttaaggacggcatcagtggcgatgataatgtctgggcgctgctcgacacggtgtgggaaaaggcacaagcgctggggcaaacgctgtttaatctcgatacctccacctacgttaaagtgaatggcggttttgccgaggtgctggtctggggcggagcaatcgttctgttactggctgcaacctttgtcaacctgctcgccgaaatcaccattctgttaatgaccaccaccgccccactctttattttctgcctgctgtacggttttcttaaacccatgtttgataactggctgaaaacactatttaccgcaatcttaacgatcatgttctctgccctgtctgtccggatcgccatcaactacctgaataaaatactggatgccgccacagcaacgtctgctgaaagcaatatggtgaccctggcggcgcaatgtttgctggccgggattgccgcaggcgtcgtggtgtatttttcagcgaaaatagccactgcgctgagcggtgccgccgtgcaggcagtgttacagggtgcagccatgagcggactgcgcgggctggcgagcaaatctgccgacgtcgccggacccggcataaaggccgggggccgactgaccgccaaaggtggcatggccgcagccgcgacaaccggcagattcattgccgcaggggcgggcaaaaccgtgagcgcctggcagaaacgtgccaccgccattgacagcatgaaacgccagaaccagcagcgtcaccgttaa

SEQ ID NO: 445446 - DNA, 276 bp, Serratia marcescens
atgttaaaacccgtattaaccttatgcgtcatgtcaggcattctcgttttatcaggttgtaaagagacgaaatcagaagcctggtataaagaacatcccgatgaaacctataaggtctatacgcaatgcctcacggatggcgaggcaagcgacaactgcgagtttgcgcaccgggcagcactcatgtttgcccagacaggcaaacccggcatcagggaaaaattcgagacgctgtttcagcaggaagcccaaaaaagaaaatccgtaactcagtaa

SEQ ID NO: 445447 - DNA, 729 bp, Serratia marcescens
atgcggttcagagatatcatactggcattatcactgtttatttccaaccaggcgatgagtgccggaataccggtattcgacgccgtacagaataccgaatccatgaatcagtggatccagaaactccagcagtggcaggaaaccgtcacccactacagaagtgaacttgatgcctacaagcagcaattagccacggcaacgggcgtgcgtgacgttcaggcatttctccgcgaggccaaaagcctgaacaccgatattgaaaatcttcgtcaaaacggtatttcactggatgacctgctgagcaaccagagcgggtcatattcgtctgaactgaatagcttgtataacaaatataaaacgttcgatacctgtaacccgtccagcgcttcacaacgctatctggacagctgcaaacagatgatcctgaatcaggccgtagcgatagaaaatacgtccgaggttgaaaacaagatcacgggcacgctcgacgatatatcggatttatcagaccgcattgctaatgcgcaggattcgaaagagtcacaggacctggctaacgccatcgcggccaaaagcgtacaattaaatgcgctgaccggccagtgggaaatgtcagtcaaacaggctgaacagcgaacaacgctgctggaacagcaaaaacagaaagcctttgagcaacagcaattaactgcgcccgttgccgatctgaactctctacagggaggttaa

SEQ ID NO: 445448 - DNA, 2748 bp, Serratia marcescens
atggctacgctgaacaaagcgctgacgcggcctgccgccatagccggcattcccctcgtgccgttcgtgatggtcagcggggccatcgtcctgctggcggtctatgtcagctattacctgatattactgcttattccggcctggctggagatgaaggcaaaggccagaaccgatattcactatttcgggctgctctggctggcctttaaaacccgtggcaggtttggcaccaataaacattttggtgccaatgccctgctggcaaaccgctatggcgctgtcgacatttcggagtttattgaaaagatgaagttaaacgagcgcgttacgctggagaaatacattccgtattcctcccatattcacccgcacgtcatcagaaaccgccagggtgatttggttgccagctgggagctggagggcaccgtttttgaatgcgaggacgaacatcacctgacgttaatggcgacgcatctcaataacgtgattcgtgcatatgaaggcctgccagtcactttctatcttcaccgtatccgggaaaaataccacgatgcctttgatgcaaattcaggtattcccttttctgatgaagtgacccggctgtattcccagccgatcagcgaaaagccgttctggcggcaccggctgtttttcaccctctgctatgcgcccttctctccgctggagaaaaaggccatgaaggcacagccgtcaggtaaacgcaaaacggtgctggatgatgccctgaaagtgatgctggaacaccgggatgcgctggcttcggcgctgtcccgctatacggcgacgccactggggatgtatgaaggcaacgggagggtgtattccgcccagctgtccttttatcaccgcctgctcaccggcaagtggcaaaaggtggcggtcacgcgtgcgccgttttatgaaacattaagcacgtcggatgtcttttttaccactgacaccgccgagtgccagacggtcggcggcgcgcgttttttccgcagtctggaaatcaaagattattcgccggagaccgcgaccggcctgctggacgcgctgctgtatgccgaaagcgagtatgtgctgacgcagtccttcacctgcatggcccgcgatgaggcgcagaagcatattcgcctggcggaaaagcgcctgaattcggcggatgacgacgccatttcgcagcgcgaagagctgattgtcctgcgtgacctgctccagtccgggcatgtgtcctgcggaaagtaccacttttccctgctggtatcttcagacagcgccgaccaggtggtcaaggacaccaacgtgctggcgcagcccttcgccgacctcggcatcatgacgacgctgtccacgctgtcgctgcccgccgcgtacctggcgcaactgccgggggtgtatacgctgcgcccccgtctggtggccgtcagcagccagaactttgccgacctggcgagcctgcacaattttcatcctcacaaacgaaacggcaatccctggggtgacgccatcgggatactgaaatcccccggcggtggcgggtattacctgaacctgcacgacagccagagcgggcgggatgacttcaacgaaaaaacgccgggtaatacggcgattatcggtaaaaccggctcagggaaaacgatgctgatgaccatgatgcagcaactgatgcagaagtaccgcaatccggcgacgttctctgaatcagccccccgtaagcagctaaccaccgtgtatttcgacaaggaccgggcggcggagatggcgatacgccagatgggcggacgctacttccgtatccgtaccggcacgcccaccggatttaacccgtttaagcttgcgccgacccggcggaatatcagctttatcaaacgactggtgcgcatgctatgcggccgcaacggcaagccgctcgatccgcgcgatgaggagcgcatcagtgccgccgtagataccattatgctcgactacccgccggaataccgcaagttcggtatcacccggctgctggaagtcctgccggagccgccaacccccgacgcccgcatcaacgggctgcgtattcgccttaaacagtgggcgcagggcggcgagttcggctgggtattcgacaatgaggaggacaccttcaatatcagcgacgtcgaaaattttggtatcgacggtacggaatttctcgatgatgacgacattcgcggccccatcacgttttatctgctttaccgcgtcaccagcctgctggacggtcgccggctggtgatgttcatggacgagttctggaaatggctggccgatgtcgaattctcccgcttctcgctcaatatgctgaaagtgatccgcaaactgaacggcatcttcgtccccgccacgcagtcgcctgacgaaatcgtcaagcacccgattgccccggcgattatcgagcagtgcagcacgcagatttttctcgccaacccgaaggccagccgggaggattacgtggaaaagatgaaagtgccggaaagcgtgtacgacatcgtcagaaacctcgatccgggggagcgctctatggtggtcctgaaaacgccgttacgcgcgggtgaaacccggccttttgtggcgatggcgaaaatggatttatcgggcctcgggaaacttaccaaaatgctcagcggcagcgaagacaacctgaagctgttcgacaccctgtatctggaaggaatgcagcctgatgactggaaagccaccttccttgaacaagccctgtaa

SEQ ID NO: 445449 - DNA, 282 bp, Serratia marcescens; identical to SEQ ID NO: 126508

SEQ ID NO: 445450 - DNA, 648 bp, Serratia marcescens
atgctttccaccaccgtatttctggcggcggccatgcagtgcgccgccagcgttcacccgtcgacggcacttgatgtggcgcgggtcgaatccggtttgaatccgtatgccatcgctgaaattctgcccggtggcaaaggcgtgacttcacatttccccacaagcaaggatgaggccgtcagtctaaccggacggctggcggcacagggccgacgttattcggtcgggctgatgcaaatcaccagcaccaatttccgtcattaccgcgtgagtgcccgtgaccttcttaacccctgtaccaacctgtccgtttttgagcgcatcctcaccgactgctaccgccgcggcggttccctcaagcgtgcgctcagttgctactactcaggaaatttcacgaccggccaacagccggaatccgcgtttaaccacaccagctacatccagcgcatcggctacgccgtgccgtcgacgcaggaagaccggcagcgacctcccgccgaaaagctcatgccggaaatccattaccccaccgccgtcatgcgtggcgagcttaccgataacgccacgccagtactggcatccctgcgctaccccaatgccgtgatacgcggcgcgttacccattcccggcccccaggaggaacaatga

SEQ ID NO: 445451 - DNA, 222 bp, Serratia marcescens; identical to SEQ ID NO: 126510

SEQ ID NO: 445452 - DNA, 588 bp, Serratia marcescens
atgattatcccgtcactgaattacgccgtattaaccgatgccctgcatgcattgaaggatggcaacattcgttactgtgaatcgctaggattcactttcgacgaaatgaatgccctcaaccaattatcactagacgagctgtttatcatcagtcgggagtctgcgcagtttttggctgtgacggttcatcacgacgcgttacacctgcttctggcgaaatcccgtgaggaggttctgcagcagcaacgtatcaaccacgctatccggctgggtgggtcaattgcgctactcaacaagtattttggcctcacctccaacgaagtttgccttcgccgccgcttactgggcgtccgtgtgccttatggccggacgccagagccggacgaagagacggatgcggccatctggcggcaatggcaacaatgccgggtggccaacctggaatcgaccgatgcgttggccgccatgatgcaggtaacgcaaaccctgctgccgaaagtcgaagggttgtcactgaccatcgtctggaagcgtatcgcactttgcgaacaggaggcgtcagaccggagggccgcccatgccagatga

SEQ ID NO: 445453 - DNA, 927 bp, Serratia marcescens
atgtcagacaatccaacttgcctaaacattagagatggaattccagactggataactataagggaggcggtaagacttctcaatgcattgaatgggtgtaaaataagaaaaagtgatttttatcgatttgctctgcaagggaaaattcggttttcaatatattttcaatccccagtaatattgaggaaaattaaatcacgaaatcataaattaaagctaagaccaatagaaaattcgtcaacgatgaaatcattcatgcctgccgaaagttcctttgtcaacgagaacaatttaactttcagtactgaaggaagatatatccaccctgtacaaagagtcattgacacaacattactcggctatgaatatgtccttatacagcgtttacttgcacattcattaaagataccatcacctgtaacaggagcaaagtcgaataattatggtattaccgtctgtttattgggggaatcgtttcaacttttcgaaaagatgacatggcatgaaagaatcgaacgacacgtaaaaaggctacctaaagatatttcatcagatgattacgaagatataatactaaacgctacaaagaaagattcgcataaatattattttcctatgcatgaattaccgagtgatgcctgctttgtcctcagaaaaagtgaacttgataagttgatcaacaaaccgatcgaaaaagaaatacttcaaccgtctccaactcggatatccacccctctatcacgcctcttctggcttgcctgcaaaaataatgaaactatcagtccgttaatcatgcaaccgtataaattattgtccatttttgaacaatgggcatctgaggaaggcattactgatcgattcagtggcgacacgctgaagacagcgcttgagcgcggctcgccctcttccatatcggcacaaaagtaa

SEQ ID NO: 445454 - DNA, 1194 bp, Serratia marcescens
atgaaagaacgcatgccttttgttatatatgtctttgcactctgcgcttttgctttgggattcactgaatttgtcacgatcggcttagtttccaggatatcagctgatctaaacgtcagtgtcagtcatgtaggtacagcggtgacagcctacgccctcggtgccgtaattggtgctccgggattaactgcgttggcaacacgatggcctcgtaaaagattattacttgttgctatgggcctgtttacagttggcaatggtatcgtcggtgcgtctgagtccctaacgcctatgttgattgcaagatttgcttccggtttagggcacggagtgtttcttgctgttgcttcaagtgtggcaacccaactggctgggcgacatcgtgctggcgccgctgtttcggtcgtttttggcggtcttacaattgcgttggcattaggcgtaccacttggtacctacatcggtagtctgttgagttggcagtctatattcatggcagtaacggcaagtggagcgatcggtttcattggattggcaatgctgatgcccacggatcaaaatgatccctccttgcaagcaaatgccatggacggtttaaaagccatgttcaacccactactgcttgcgggagcaggaattacagttttggcctatgcaggatcttttgccctgtatacgtatatttccccgattctacttcaggtaacgcatgtagacgagcgtacgagtagtttgcttatgttggtctacggcgtgatggccgctatcgggaatgtctggggtggtcgcctgactgacaagcaaggtgcagatcgtgccgtgatgacaattcttattggtctggcgatcgtcctctttgctatgtggttctctgtctcatccttaatgttaatggcactgtttattgggttgcttggagcattgacatacgcagcggtcccctcaatgcaagcaagagtgatagggctatctcacatacatgcacctgaagctccagctgtggcagcaggactgaatattgccggttttaacggaggaattgcattagggtcgctattggggggggtagcactgaatgttactggtcttacaagccctacttgggttggaggcggagtagtaatcgttggtattttatggatgttattacaaataaattctaataaaagacgcaccacctccgattactcctga

SEQ ID NO: 445455 - DNA, 705 bp, Serratia marcescens; identical to SEQ ID NO: 126515

SEQ ID NO: 445456 - DNA, 252 bp, Serratia marcescens; identical to SEQ ID NO: 31754

SEQ ID NO: 445457 - DNA, 237 bp, Serratia marcescens
atgtatacgttgcgcaccatttcagaaattcgtgccgggggggtgctggtgctggataacggtgcacagcgtacactggatgaagtgcaaaaaacggcacctgaaacaaaccaggtggagccaaaggaaatctcttcacttcaggagctgctgaacgcttccaaaaatctggagccgacttcgcctgagctaattgcggctcttaatgaggctctgtcaaccgccataaaacggtga

SEQ ID NO: 445458 - DNA, 657 bp, Serratia marcescens; identical to SEQ ID NO: 105690

SEQ ID NO: 445459 - DNA, 609 bp, Serratia marcescens; identical to SEQ ID NO: 31743

SEQ ID NO: 445460 - DNA, 354 bp, Serratia marcescens; identical to SEQ ID NO: 31742

SEQ ID NO: 445461 - DNA, 3336 bp, Serratia marcescens; identical to SEQ ID NO: 117529

SEQ ID NO: 445462 - DNA, 516 bp, Serratia marcescens; identical to SEQ ID NO: 117530

SEQ ID NO: 445463 - DNA, 492 bp, Serratia marcescens; identical to SEQ ID NO: 117531

SEQ ID NO: 445464 - DNA, 219 bp, Serratia marcescens; identical to SEQ ID NO: 117532

SEQ ID NO: 445465 - DNA, 720 bp, Serratia marcescens; identical to SEQ ID NO: 97227

SEQ ID NO: 445466 - DNA, 342 bp, Serratia marcescens; identical to SEQ ID NO: 16817

SEQ ID NO: 445467 - DNA, 792 bp, Serratia marcescens; identical to SEQ ID NO: 97225

SEQ ID NO: 445468 - DNA, 1266 bp, Serratia marcescens; identical to SEQ ID NO: 97224

SEQ ID NO: 445469 - DNA, 441 bp, Serratia marcescens; identical to SEQ ID NO: 97223

SEQ ID NO: 445470 - DNA, 426 bp, Serratia marcescens; identical to SEQ ID NO: 16821

SEQ ID NO: 445471 - DNA, 336 bp, Serratia marcescens; identical to SEQ ID NO: 133262

SEQ ID NO: 445472 - DNA, 240 bp, Serratia marcescens; identical to SEQ ID NO: 16823

SEQ ID NO: 445473 - DNA, 546 bp, Serratia marcescens; identical to SEQ ID NO: 97148

SEQ ID NO: 445474 - DNA, 297 bp, Serratia marcescens; identical to SEQ ID NO: 97149

SEQ ID NO: 445475 - DNA, 360 bp, Serratia marcescens; identical to SEQ ID NO: 97150

SEQ ID NO: 445476 - DNA, 285 bp, Serratia marcescens; identical to SEQ ID NO: 97151

SEQ ID NO: 445477 - DNA, 333 bp, Serratia marcescens; identical to SEQ ID NO: 16829

SEQ ID NO: 445478 - DNA, 510 bp, Serratia marcescens; identical to SEQ ID NO: 97269

SEQ ID NO: 445479 - DNA, 180 bp, Serratia marcescens; identical to SEQ ID NO: 97153

SEQ ID NO: 445480 - DNA, 321 bp, Serratia marcescens; identical to SEQ ID NO: 97154

SEQ ID NO: 445481 - DNA, 345 bp, Serratia marcescens; identical to SEQ ID NO: 97155

SEQ ID NO: 445482 - DNA, 369 bp, Serratia marcescens; identical to SEQ ID NO: 97156

SEQ ID NO: 445483 - DNA, 717 bp, Serratia marcescens; identical to SEQ ID NO: 97157

SEQ ID NO: 445484 - DNA, 420 bp, Serratia marcescens; identical to SEQ ID NO: 22854

SEQ ID NO: 445485 - DNA, 135 bp, Serratia marcescens; identical to SEQ ID NO: 218221

SEQ ID NO: 445486 - DNA, 1530 bp, Serratia marcescens; identical to SEQ ID NO: 97160

SEQ ID NO: 445487 - DNA, 3237 bp, Serratia marcescens; identical to SEQ ID NO: 97161

SEQ ID NO: 445488 - DNA, 366 bp, Serratia marcescens; identical to SEQ ID NO: 97162

SEQ ID NO: 445489 - DNA, 780 bp, Serratia marcescens
gtgctggaagggcttctggagcagcagacggggctgaatccggtggagattatgacggacactggagggtccagcgacattatctttggcctgttctggctgctgggctaccagttttcgccccgcctggcagatgccggtgaggcggtattttggcgtgcagataaaaatgcgaactacggggtactggatgagctggcgcggggatgcgttgaactgtcaaagatagaaacccaatgggatgaaatgatgagggtttccggttctctgaagctgggtacagtccacgcctcagaacttgtgggctcgcttttaaaaagttcccgtccgtcagggctggcgcaggcgattatggaggtgggacgggtcaacaagacgctgtacctcctcaactacattgatgatgaagaatatcgtcgcaggatactgactcagcttaaccggggagaaggccgtcacgccgtggcaagggcgatctgttacggccaacgtggtgagattagaaaacgttaccgtgaggggcaggaggatcaactgggtgcgctggggcttgtcactaacgcagttgtattgtggaacacgctttatatgcaggaagcgctatcacatttgcgcagcgctggtgagatcccggaagacgagcatatctcacgcctgtcgccactgatgtacggtcatatcaacatgctgggacattatacgttcacgctgccggaaaatattctgaagggagagttgaggccattaaatttcaattcaaacaatgaattattgccttaa

SEQ ID NO: 445490 - DNA, 534 bp, Serratia marcescens; identical to SEQ ID NO: 83888

SEQ ID NO: 445491 - DNA, 996 bp, Serratia marcescens; identical to SEQ ID NO: 97196

SEQ ID NO: 445492 - DNA, 1161 bp, Serratia marcescens; identical to SEQ ID NO: 97197

SEQ ID NO: 445493 - DNA, 885 bp, Serratia marcescens; identical to SEQ ID NO: 97198

SEQ ID NO: 445494 - DNA, 699 bp, Serratia marcescens; identical to SEQ ID NO: 97199

SEQ ID NO: 445495 - DNA, 1041 bp, Serratia marcescens; identical to SEQ ID NO: 97200

SEQ ID NO: 445496 - DNA, 228 bp, Serratia marcescens; identical to SEQ ID NO: 16848

SEQ ID NO: 445497 - DNA, 714 bp, Serratia marcescens; identical to SEQ ID NO: 133280

SEQ ID NO: 445498 - DNA, 2601 bp, Serratia marcescens; identical to SEQ ID NO: 97186

SEQ ID NO: 445499 - DNA, 318 bp, Serratia marcescens; identical to SEQ ID NO: 97185

SEQ ID NO: 445500 - DNA, 294 bp, Serratia marcescens; identical to SEQ ID NO: 16852

SEQ ID NO: 445501 - DNA, 282 bp, Serratia marcescens; identical to SEQ ID NO: 97183

SEQ ID NO: 445502 - DNA, 555 bp, Serratia marcescens; identical to SEQ ID NO: 110340

SEQ ID NO: 445503 - DNA, 315 bp, Serratia marcescens; identical to SEQ ID NO: 97179

SEQ ID NO: 445504 - DNA, 312 bp, Serratia marcescens; identical to SEQ ID NO: 97178

SEQ ID NO: 445505 - DNA, 648 bp, Serratia marcescens; identical to SEQ ID NO: 216610

SEQ ID NO: 445506 - DNA, 2058 bp, Serratia marcescens; identical to SEQ ID NO: 32296

SEQ ID NO: 445507 - DNA, 123 bp, Serratia marcescens; identical to SEQ ID NO: 31757

SEQ ID NO: 445508 - DNA, 321 bp, Serratia marcescens; identical to SEQ ID NO: 31761

SEQ ID NO: 445509 - DNA, 417 bp, Serratia marcescens; identical to SEQ ID NO: 129191

SEQ ID NO: 445510 - DNA, 987 bp, Serratia marcescens; identical to SEQ ID NO: 105543

SEQ ID NO: 445511 - DNA, 657 bp, Serratia marcescens; identical to SEQ ID NO: 31747

SEQ ID NO: 445512 - DNA, 897 bp, Serratia marcescens; identical to SEQ ID NO: 118496

SEQ ID NO: 445513 - DNA, 258 bp, Serratia marcescens; identical to SEQ ID NO: 105717

SEQ ID NO: 445514 - DNA, 255 bp, Serratia marcescens; identical to SEQ ID NO: 31731

SEQ ID NO: 445515 - DNA, 198 bp, Serratia marcescens; identical to SEQ ID NO: 31733

SEQ ID NO: 445516 - DNA, 318 bp, Serratia marcescens; identical to SEQ ID NO: 31740

SEQ ID NO: 445517 - DNA, 306 bp, Serratia marcescens; identical to SEQ ID NO: 105758

SEQ ID NO: 445518 - DNA, 672 bp, Serratia marcescens; identical to SEQ ID NO: 105759

SEQ ID NO: 445519 - DNA, 177 bp, Serratia marcescens; identical to SEQ ID NO: 31741

SEQ ID NO: 445520 - DNA, 555 bp, Serratia marcescens
atgacgccgttacgcgtttttcgtaaaacaacacctttggttaacgccattcgcctgagcctgctgccgctggccggtctctcgttttccgcttttgctgcacaggttgatatcgcaccgggatcgctcgacaaagcgctcaatcagtatgccgcacacagcggaattaccctctcggttgacgccagcctgacgcgcggcaagcagagcaacggcctgcacggagattacgacgtcgagagcggcctgcaacaactgctggacggcagcggactgcaggtaaaaccgctgagaaataacagctggacgctggagaccgcgcccgcgccaaaagaagatgccctgaccgtggtcggcgactggctgggcgatgcgcgtgaaaacgacgtatttgaacatgctggcgcgcgtgacgtgatccgccgtgaggatttcgccaaaaccggcgcaaccaccatgcgtgaggtgcttaaccgcatccctggcgtcagcgcgccggaaaacaacggcaccggcagccacgacctggcgatgaccttggcatccggggcctga

SEQ ID NO: 445521 - DNA, 2529 bp, Serratia marcescens
  misc_feature (2168)..(2179): n is a, c, g, or t
atgattaacgggaagggctctaaagcggtttccgcaaggaatcgccgtactctgaccacacaattaccatacaacccgatcatctcttacaaaaagaataaagtcatagcaggcatcaatccgaacactgctctggcttatacgaccgggggggaggccgctcgaatattagcgaaggtggtaccagctgacgttacgatgatcgtctctcaaaacggctctgaggctgtcaaaacgtcatttaaaaatcgttcctcaaacaacgatgcaacgacctttgtacaaagggtcaaggttgctgctgcaccattgtggacaaagaacgtctttgacatagctgtagaatactcaaaggatccagaattaagaactacagacaccctcaacgtatatacggtgcctgatttcaatattcgagcatcgatggaagtggatgacaaaaaaacagccacatctcttgaagtgcccttaaaggtaacagtggggcgttataacaactccacacgtaaaagtgcatttgaccgtaaaacaatgggagaatgggacgtcacgatatactctcaaaaaagtgtatacggcaaagatccagaaacaggccgttataaaactacatacgaaagaactgcgctgactgaagcattgccggtcaatgatgcgggcattgtcgaaaccaagattaaaattgaaaatatggatctgggtaatatgcgtctggttggtgtggctaaggtcagatcgccattctctgattttgaaatgaaacgtgagaccagtgctgtaggcattcgaatctataaaggtgaggaactggagggtaacctgtcgaaaagccttattatcggaaggatcccacttagtactctggtaagcttcaaatctgccagtacggctaactctgatgcactcgcccccaccgaatggcagcagtcctctgataatggtcaaacctggaccatgctttccgacatgaccggaaagagaagtgtaagtatcaaaaagacagaagtaggaaagtggctttatagggcaaaaatgactaataaattcacatccaagatttcctacacagatgccttaacggtagttacctacaagcagcctaagctcagtatagatgttacagacattcttcagggctcagatatacctgtaaccctgcttgataacgatgaacctataccagcaggcaccgctgaggttctctggtcagaggataaagtcaactgggtgcagggagatacaacttacactgtggcttcagctgataccctaccgtctacgatttatgcccggatgcgttaccttgattccgatgaactggcagaggagtcttcatggaaggaaacgtctgctcggttggcagccgcaaaacccaagcgcctttctgtctcggtaacgggggtttcaaaggtagaggttggtcaaaaagttactttggaaggtaagttcacgaaccctaacagtaagtaccagaatggtaataacgtagttgaagaatggaaaacaccggatggccagacatttaagggctcttcactgtctgttacccttactgagcaaatgttggataaacagggatatgctgcttttgaatacagtgcatggttagcggacaataaggagaatacggtttctacccgtagagtttctgtcaaatcgtgggtttataaatttcccgagatgaaaataagctccaaacttaaatacgacatggcaccgaccaccctacgcgttgcgttgagcggtattaaggatggagactatcctggtgttacttattcccgtgaatggatctacgacaaagagaatctggtaatcactaaagatgaaggtgacaccaaagaatttacaattgaaaatcctggcaaatatacattgatggttgttttcaaagataaccgaaacaatgaacagcgtatcgaaaatacctttgttgtcgatgaacaaacgccaatgaacgttgagatgacacccaagttctctaacaaatatatgagagctccactcgatgtaaccttaaggtcaaacatcaagctatctcattcggcggactcgatagatacggtcacatacaaggtgaacggtgaagtaatacccagcggcaaaaattattgggctcaactgatctcgggtttaaaagaaaagaaatacgagattacaattgatgnnnnnnnnnnnnaacttggacagagaggttcagcatctgttgagtttgatgtcgttaaaaacgcagtgcctaattgtacattgagctacacggaaaccaacctaagctggagctttaccaataaatgtgatgatactgatggaaaaatggttagatatgaatggttcatcaacggcgaattaaggaacgttttcggtagtacggctacactttctaaaaaccttaaccgtggtaagcaggacataaaagtaattgcttatgatgatagtggagactttgcaacacagcacgtgacagttttcggaccggctgaagaggcaagtaagtctgaaaacactgtatcaataccaagcagtgagtag

SEQ ID NO: 445522 - DNA, 135 bp, Serratia marcescens; identical to SEQ ID NO: 197115

SEQ ID NO: 445523 - DNA, 273 bp, Serratia marcescens; identical to SEQ ID NO: 31728

SEQ ID NO: 445524 - DNA, 957 bp, Serratia marcescens
atgctgggtgtcgcggcaacattgtcgcacactgcagtcgtatggctgattgcttttggagggatgtatatcagtaataaatttaccgcagaatcagccgaaccctggctacagatggtctcttcagtgatcatccttggtacggctttttggatgttctggcgaacctggagcggtgagaaaaactggctggagggaatgcaggagaatgaacatcatcaccatgacgaaacaaggttgatcgatactggccatggaaaagttgaactgtccatttttgaagaaggacaacttccccactggcggctacgcactcttagtggccaaagatgggcttctgaagatatctcattaaccacacttcgggaaaacagtacgatctctcagacttttgaatttgttgatcatggtgattatctggagtcaacatctcccatccctgagcctcacagtttcaacgtacgtctgtctctgggacatcgtggtcatgtccatgactatgatgtggcgttcgctgaacacgaccatgaccatgaccactctgagcttgatgggctggatgtgaattcgaaagagtatcaggacgctcacgaactggctcatgccaatgacataaaacgccgcttcgacgggaaagaagtaaccaacgggcaaatcctgatatttggactgacaggagggcttatcccttgcccggcagctataactgtattgttgatctgccttcagcttaaagcgcttacgctgggtgccacactggttgtttgtttcagtatcggcctggcattgaccctcgtaacggttggagtgggtgcggcgatcagcgttcgtcaggtcgccaaacgctggagtggcttcaataccatcgccagaagagccccctatatttcaagcgccctgattgctgctgttgggatttacatgggtatacatggctggaatgggctggtgcattaa

SEQ ID NO: 445525 - DNA, 948 bp, Serratia marcescens; identical to SEQ ID NO: 105770

SEQ ID NO: 445526 - DNA, 1038 bp, Serratia marcescens; identical to SEQ ID NO: 105769

SEQ ID NO: 445527 - DNA, 513 bp, Serratia marcescens
atggctaaataccctatctcaaataaggcagataacgaccggattcagatccggtctttctggatatccgaaagaaaagcaccctatgtttatagtttcttgaaaaaaacagaactttgtcataggggtgaccaactggatttaattaggtcggctattagtaccgggttggtattaaataatttatttcctgacttggcaaattttataaatggtttaaacgaaagattaacacttgcagatcttaataggtttctgaatgatggaaatactatagatactgaacctaagcctcctattaatgtattgctagagaatgtcttagatcaaaagtttaaggagtatttaacacctctacaattagataattcaaagcaggattctgtttctgtaaaagaaaccttccttgtacaaaaggaacatgcctgctttggtgtgaagattgaaaatgagggaagcgatacctctataccatctgaaagcccactttcttcaggtgcatggctttgttga

SEQ ID NO: 445528 - DNA, 195 bp, Serratia marcescens; identical to SEQ ID NO: 118669

SEQ ID NO: 445529 - DNA, 132 bp, Serratia marcescens; identical to SEQ ID NO: 124592

SEQ ID NO: 445530 - DNA, 555 bp, Serratia marcescens
atgaccactaccattagcttcgtcacgctgcgcctcatgaccgagcacgaccttccgatgctccatgactggctaaatcggcctcacatcgttgagtggtggggcggagaagaaacacgtccaacacttgctgaagtgctggagcaatatcgaccaagcgccctggcgaaagagtccgtcactccctacatcgcaatgctggatgaagaaccgattgggtacgctcagtcgtacattgcactcggaagcggtggcggatggtgggaagacgaaaccgatccaggagtacgcggaatagaccagtctctggcgaatccatcgcagctgggcaagggcttgggaaccaagctcgttcgcgcgctcgttgagatgctgttcaaagacgctgaggtaaccaagatccaaacggacccgtcgccgaacaatttacgcgcaatccggtgctacgagaaggcgggttttgtggcgcaaagaaccataaacaccccaggtggaccggccgtatacatggttcaaacacgtcaggcgttcgagcaagcgcgcagtgctgtctaa

SEQ ID NO: 445531 - DNA, 183 bp, Serratia marcescens
atgttcatcaaccccatcagcgacaaactgaccaattttcttttcaagacgctgcattgcctcataaagcttggcatcagtattatttttaagaaacctcagtatataatcagcaataatttgaacaggagtaaagttacacatcatgtatccttaataagttgtgtaaaaataaaaccataa

SEQ ID NO: 445532 - DNA, 2175 bp, Serratia marcescens; identical to SEQ ID NO: 129106

SEQ ID NO: 445533 - DNA, 2577 bp, Serratia marcescens; identical to SEQ ID NO: 129107

SEQ ID NO: 445534 - DNA, 813 bp, Serratia marcescens
ttgacgctgggcgggcgctatgactgggcgaagacctccgcttacaaccgtgatgcgagttcgacgagccagcagaccgaccggcagttcacctggcgcggcggcctgaactatctgttcgacaacggcgtgacgccgtatttcagctacagcgagtcgtttgagccgaatttgggcacgacgcaagggggcagtacgttcaaaccttcgatcggcaagcagtatgaagccggcgtgaaatacgtgccgaaggatcgcccaatcgtgctgaccggcgcgctgtatcagctgaccaagaacaacaacctgacgccggatccggataacgcgcagttcagcgtgcagagcggcgagatccgttcgcgcggcgtggagctggaagccaaggcggcgttgaatgccaacgtcaacctgatcgcctcctatacctacaccgatgcgaagtacaccaaggacaacacctatcagggcaaaccgaccgtcgaagtgccgaaacacatggcgtcgctgtgggcggattataccttccacgaaactgcggtgagcggtttgacgctgggttccggcgtgcgttacgttggctccagctcgagcttcaacagcgataacaccaccttcaaggtgccggactacacgctggtggacgccaccattaaatacgatctggcgcgctttggcctgccgggctcgtccgtgggcgtcaacatcaacaacctgttcgacaagacttacgtatcgagctgctaccgcgactacgcctgctactggggcgcagaacgccaggtggtcgccaccgcaaccttccgtttctaa

SEQ ID NO: 445535 - DNA, 498 bp, Serratia marcescens; identical to SEQ ID NO: 91874

SEQ ID NO: 445536 - DNA, 174 bp, Serratia marcescens; identical to SEQ ID NO: 146456

SEQ ID NO: 445537 - DNA, 1254 bp, Serratia marcescens
atgtggatagtaagggacattgacgatctgcgtttagtccagctcggcgataactgcgccgggttccagctcacctatcatgagccaagaaggccaacaactttaaagtcacttttcaatacttctatgtatcaggcattagtgattaatgatgagtcttctgttgaaaactctgccccacgtccaaagcaaacgcttgagctgcctcccccacgtgtaaatgcagtcgaagaacattctggcgacgtggaatatcatggaaccgatagtgcatccgcgactggtccgctgaaaactgaggctgtggaatatgaacattatcaacatctttttgagaaagaagatgaagagcatgagatcattgattataccgatttctcacagcttagtgtttctcggccagaagtcggtagttgtgcaacaagctcttcggtccataatgaaaagcttctctccgagccgtcagaattaccagaacttaaccgagaacagaacgctgatccccagggtacgaatgaacgctctatggatgtttctgtaggacaagaaaactcagaaccagatactgagggtaactgcccaccaccagctgaagttgtgtattcccagaccgaagcagccgcaaccagtgtgatggcaagtgaagagcccgccttacctcctgtacttgaagaatcaaatggagagcatgcgcccacagacgctaaggggcatcatctttcgccagcactggccagactgttcgccccaacagcaccggtagaaaaacaaaatcccaagcgcaaccggaataaatcatcggacaaagcagaagtacaaaaaccagcatcacctgtttctggtcacaatctgaacagtaaagtctttgcatctactgaatcagaccaaaatggtgaattctcgcttataagcgaaggtgacgttacagagcttgaatttgtagaaattgcgttagtactgcatcaaattctgtccaaaatggaggtggcgtttaaaagaaagcgcaaaaacagatttatggtaagtactcctaatactctctatctgacccaatcttgcgtggaaaaatttgggtcgcagttagaggctcaagatcttttcaataagcttcctcagtacctcgttaattctggtgctgtgatcaatacaaaatgccatgcatttaacatgcctactttgctggccgcatcagaccgggcgaaagtggacattgaacgaattatcaataacctgaaagaggctgggaacctataa

SEQ ID NO: 445538 - DNA, 657 bp, Serratia marcescens; identical to SEQ ID NO: 16007

SEQ ID NO: 445539 - DNA, 1185 bp, Serratia marcescens; identical to SEQ ID NO: 16006

SEQ ID NO: 445540 - DNA, 1110 bp, Serratia marcescens; identical to SEQ ID NO: 95539

SEQ ID NO: 445541 - DNA, 435 bp, Serratia marcescens; identical to SEQ ID NO: 25497

SEQ ID NO: 445542 - DNA, 309 bp, Serratia marcescens
atgacaagattacgtcgctcatttactgccgaattcaaactcgaagccgcatccctggtgctcgaccagggatattctgtccccgaagcaagccgttcactagatgtcggtgaaaccgtgcttcgccgctgggttcagcaactgcaatccgaacgaaccggcaccacgcctatctgcaaagcgctgactccggaacagcagaaaatccaggagctggaagcccgcatccatcggctcgagcgcgaaaaggacattctaaaaaaggctacggctctcttgatgacggacgagttcacacgtacgcgctga

SEQ ID NO: 445543 - DNA, 198 bp, Serratia marcescens; identical to SEQ ID NO: 191037

SEQ ID NO: 445544 - DNA, 537 bp, Serratia marcescens
ttggtatggcattccgtatcccgcgttgatatgtttgccgttaactggtataaatttacacagttaaccaaaaacgtaggatgttttatgaaaaccaaatcagcaggtaataaattggctacgtatctccagagtcactcaattattcgtgacagttcagagggagtcagcggtaaaaatatttctttttccgtttcgatgcctattgagcgttattaccttttcaaagaaatatcaaaccgttacaacatctccatgtctcaaattgttaatgtagctttgcatgctttcgattctgaattgctactttcccttgatagagagtcatcttttgaaattgccctggctgcggatgatgggattacgtcagatattggcggtgagccagtttcttactggtattcaaaggttcatcagaaagcagagcaggaagaatttgcgcgtttctgcgagttgaaccctgatattccagaagagcaccttgatgatgcttatcagtcttatcttgcacagtctgccagagaggagattttttga

SEQ ID NO: 445545 - DNA, 291 bp, Serratia marcescens
atgctttctatgaccggacagcttttgaacgtcttcgaaaatccccgcggcgtgactaaagagggtcgtgagtatggtgggaattataaaattcaggttctgggggctgtcaccctccagaacggtgaaacaaaaaatgacctcgttgacttaacctgtcacgatattgcggcgttcaggccgcttttgggacagcgaatttctttcccgattggggttatgtcgatgggtaagaatcagactgttttcttcattcccaagggtgggatgccggagtcggttgggggttga

SEQ ID NO: 445546 - DNA, 1065 bp, Serratia marcescens
atgatgatagattggctgacgttacgtatcccctgtgaccactccagagagattgcaggcggggcgatggtgtcttacaaggatgcttgggatttcgatgctggcgcggattggtgcttcacaaaaccgcttgcggttgtggggtcacatgatgccaatgtcaggttaaaaacatctggtttcagcaacgaaggccagtccggtactgagcttcatatcgacggaaatctggtgaagttctttcaggggcataacctgtttggcagttgtgacgttgtgggtctcgtttgtgatttcatggatcacatctgcagcatggaatcgcttggcctgcatcctactgattttcagaaacaggcatggcgtcgggggctgtttaagctatcccgtgttgatgtgacgtccatgtatcggctcaataaccgcaacgatgtactgagctggatttcatccgctgaatattcctcgacgatggcgcaccgtgggcgtggtcagcttaccaaagggtcaacgctctattttggtaagcattcccgccgttggtctctcaagttctattccaagggacaggaagtcaactgtaaggggcatcgtttgccgcttgaactaccttcccgtgataaacttctcgcgtatgcagagcctgcattaagatctgaattaacgctgcgttcaatgacattgaaagaaaccgatctccagttggcagcgaactggccgcgaaatgcggagggtataacccgtatatttgaaaaatatctggcagggctaaacatgagcgatactcgcaccattccggcagaacagcttgccgagttgccttctggcgctcgcttggcttaccagtcatggcttgagggtcatgatttgaaaaacatgcttccccacaataccttctatcgtcatcgtcgcgccctgcttactttgggtgttgatattgctacggtgcttccacgtgaaaaatcgaacgtggttcctcttgttcgcgttctggaggctatcccgatgggtattcctgattgggcgtatggtacgccgttgtatcaccagcctgttggcttctga

SEQ ID NO: 445547 - DNA, 204 bp, Serratia marcescens; identical to SEQ ID NO: 151872

SEQ ID NO: 445548 - DNA, 1530 bp, Serratia marcescens
atgccccatgtcgccctggaagggttcctttgctatgttgagcagatggaagcagactgggattccaacgatctggaagcgacatataaagaagttgatgcacagatacaccagaccctcattaattcggtatccgctgctacgcaaggggtaaatgataagagagaactggaaggggagtttgctgcatactggcgtcccagcgagacactctttcttctgtcaaacgcaagtcgggggaccacacttaaaacctctttggcaaaattacttaagtctgatggaactaccagacaggagtacataacggttgaggaatcatccccggaggactcggaagccgttatgaccaagtggctcaaacaaaggtatttccccagaacttcgttaaaagaaatacccatcagcacgcattacatttctgtaaatcccagccgtctagccgggatgaaatggccaccggcttcattccgggacttactggaatggcttgaaaaatcagaccacaatgccagagatagagtcattgaaaacatcaaagccgaagggaagaaaaggtacatttttctctttgatgttttaaaccaggacatcttagctatctatgttgagttcaatgcgcagtctgttgatttcagaaggtaccggaagtcagccaaaaactcaacggtcaagcttgcggcgatgttgggtggcaaaagtgtttgcacggaatatcaaaggctgggtgtcattcgtgctgacattgcgacgctccttagccggaatacacgacggaagggggcagtaagtctttcaacaaagcgtatagcgttgataggttgtggaacaattggagggtatctggccgaattattactacgcaacggagccggatgtggtaagggttatctgcatctttatgatgatgatatctacaaacccagtaattttggccgtcataccctatcgtcacatgatttcgggtggcctaaatccctttcacttgcggcaaagctacaggagtctgtgcatttacagacaaaggttgtaggatttatggaacaattccgtatcagcgcagatgaaatgcagaagtacgacatcattattgatgcgacaggacgcccacctgtgtcaaaacgcatcgctgcggtggttagacagattccactggagcaaagaccatatattattcacgcgttcaatgatggcaacggccgggcatcaaaagtctttattgatgatggccgaagctgttacgggtgtatggtttctaaccctgcaaaataccataaaggaaccgattcaaggtttaatgatcttgatatatcaagcgaaaaaaataaaagttgtggcagcacttacaccctttatgatgcagcagttagtagcataacgtcatctctggcccagatggccgtgttaagtactctagaaccagagttaaagtggacttacaatgaacatatccttgagggggggcgttcgctcagacctcaatttttgccacatcagccgaattgccctgtgtgtaatgaacataaatga

SEQ ID NO: 445549 - DNA, 636 bp, Serratia marcescens
atgtcctggcttaattccctcttagtggcgcttacgtctgtggaacctcattgggttcccgtcaccgttatcgtccttgttagctttgccgtcatctgctttattttcttttatttatcaagagccatcaaaattgttaatggcctaaaaaaatatacaaaatcaatcagcagcgttgaaaacagtgcaccagaggcccagcttgagcatcttaagagcctgtttcagcggcctgagctcaggcatgcgtggaatgagttcaaagaatcgttacacccgcagcgcgaactggagaacggggaagagaaaatcgtccgcattagagctactgcaccaagtgccagctttttctcggagcaacaactggtcgatattccgctgaataccgaattcttcaaacacttacctggaatcctgaccggtgtagggattattggtaccttctatggcctgatgattggtctcaatcacttcgatcccagcacaccagagcaggtctccagcagcgtcaataatctgttgcacgatgtgttgtacgccttcctaggttcggcatttgctattttcgcctccattattgtcacctggctggaaaagctatccatcgccaagtgggtgatgctgccaacttactga

SEQ ID NO: 445550 - DNA, 801 bp, Serratia marcescens; identical to SEQ ID NO: 105635

SEQ ID NO: 445551 - DNA, 381 bp, Serratia marcescens
atggacgaactggccagccagcaactgggcaatttctcattacgcctgttctcatccgcgcgtcgtgacaagcaatcccccatgccgtacatcaagctggaatggggggccgacttccaccaacaggaaaaccgcatgttggaaggtgataacgtgccggtactcacgaccacctcggcacacctgacgcgtcagttgctggaaaccacaggcggatgcgctttcctgcccagccagtgggacaaagagtatccgcagttgcttgccgccgccgagatcccgccgattgtccgcccactgtatgccgtctggttgcaaaacagcgatcaacagcctttgattcggcaattacttaaaatacctttaaataccgcagcctaa

SEQ ID NO: 445552 - DNA, 198 bp, Serratia marcescens; identical to SEQ ID NO: 191037

SEQ ID NO: 445553 - DNA, 267 bp, Serratia marcescens
atgaagcagcttcgtggctacacatggaacctgaaatggaacggcaaccctggcgcggggttcattgcccaagaagtccagcaggttttccctgaactggttatcgtcacagaagatatggaaatgagagacggcactgtcgtggagggtgttctcgcccctgacaacaacgggatctctgcggggttacatcacgaagcgattcttgcgttaatggaaaaagtagagcggcttgaggaagaaataaaaagtattaaggctaactga

SEQ ID NO: 445554 - DNA, 1620 bp, Serratia marcescens
atggctttgattagcgatatcctacgcgggccttacggagatccgcagccaaacgtaattattaccatgcgcgcgaaggagacgagcgcgcgtgtattggttagcaattcatcagcggccattaccgcagccgatggcaagtattcaatgcaggttttccccggcgaatatgaggtcttggtatccactctggggaaagttggtgaaattcgtgtatatcctgattcgacggatggaacactaaacgatttccttatcacaccaggtgaagatgagttgactccggcgattgtcaaaacggtcgagacgatgaggaaagaatcagccgattcggctgcggcggctaaatccagtgaaaacaatgcagcaaagatcgccgaccaattagccagtagcatcgacgatagaattgtgtctacgctgtggagtaaaacccactacgtaatgccaacgcaagcggccggtacaggttggtatcgacttggtacggtgacaaccgatcagcatggggataccattgtttttgaatttcatggtgcagcaggttacaacggcaatgcggagcaagccggacatcagcgactaatattccgttatggcaaccgggcagtaaatacgaatattgcaggtgcagcatcactgacaatgttcacgacggggtctcgtcctatggtggtgaatgctgcgatgatggaaaacccaagaaacacatttgatatatatattcagctcaacagttttgtaactgctgctacgtatatgacggttgattctcgtagtccggggcaactggctaaagttaatattttattacagaaagcggctagtgacccagtcggtacaatgggtttcattgagtataaaattccgacgtggaatgctaaagagttaatgccagattataatgtcgttgcaagcgcctcattgaatggatttggcagagggcctcaacacaaagatgatttgttttcagttgaaaacttatcttcaattaaccgatttaattcggcatctataaatgttcctggggctacgctggggtcgtgcataacaatgcctatggatggtggtcctagttgtggttatcttgcaattacgtctggtcgaggactatgggtaggatcatcaaatgtcgttacgaataaaacaattttatggaatcgtgtgtggagtgaaataaacactacagttgacgccaacgggttcataaaaaaagcatccccgatcgtgaagctcttccgtgatggcacttgtgaactcaacgacgaaagccagggcgtgaccactgaacgcgtgagcgagggggtttaccgggtttccggcacactcgggtttaatgctgatgctcaatggggcggcccggatggcggaatcgaggttccgctcgaccgcaacaagcagccgctgatctgggtggattacgaggtagagccgaccggcgatctgctgattaaaacctatcaccgcacgcacccggcggcgccggctttcgcccgcaatgacattctgggctatgacgaggggatgccgatcgatatccctgaggggcgttgggtggatctacgcgttgagatgccggcagtcgatgaagcgggaacggaagaagaagccacaacataa

SEQ ID NO: 445555 - DNA, 1116 bp, Serratia marcescens
atgttcttcgactggttaagtattgaacaggatttcggctttcaacttcctattctctcggatgttgcttaccagcgtattcatcttgaaagtggtgaggttagtgcgctttctcagccaacttttcagcaccggggatctttctgtgatgtcgtttctatttctatccgtggatctgttctaaaaatgacgggcaacccttcgcggtgggggcggcttgataatttatttggcttacctaccgttgatgcttgcgttatggttttcaataagatccttcttgatcttaaattgcctgtttttacaaaatgcactcgtttaatgcccggtcagtctaaagaaaccgaaaaagctcatatggtcagtgatggggcgttaattaaagagcttcacataacatctaataaatctgttggcaaagggaatgaggatgattatatttcagggctttcgactcaaccctataggaatagtgtaccacggttgcattcaaacggtaaatctgttgactggttgtctaaaaaagggaatgttaatcttatttatccgactgtatataataagtcacatgagattgagttacatagtttattaaaaataaaaaataaattctctgagcagtcaaaagagtttaattatattgttagtgtgattgattattgtaaggaaaatggaatagtcagatttgaacaaaaattgaagtctcgttttattcaaaaacactctctaggtttttgggggttatctgattattctgtgttaaataagttacattctgattttctggcgcttgatgaaaagttatcggtgaatgctatggattttgaaactattagtgaacatcttattacccgtggaatagttgaaactacacgggcagctaatactacagctatgtacgcgatccaatggtttcatggtcatatttttgatttaagtaaaaatcaagtgcgtattcatcgggcaagactccgcaagattggtattgacattgcgcaaaaatgtaatgtttcgaaattctctcctgttgttgtcaagcaaacgcgagagattaaagtgtctgattgtgttattccatcgtggtatgtaaaaccgtctcatttacgagttgcatag

SEQ ID NO: 445556 - DNA, 1263 bp, Serratia marcescens
atgaagctgataacaggtttactttttttactggttccggggctggttatggcgaagggcgtcagtctggagctcaacgctgttccgctgccgcaggcgctgaacatgatttacgttcaggtgttcgataagccgtttatgcttgacccggagcttgccaaatccgataaggtggtgacgttccgtatcacgccggatatcgatgaacgggcatttattaagcgctatctcggcaatatgaacattgcgatttataacaaacagggaattgactacgtggcgccgttcacgccgaaagcgtatgtgccgccgcaggagacctttgtttatcggcctcgcttccgttccgtggcgtatctgtctgacattctggccggacagtttaccgggcagtttaacagtcagcgtaactcgttaccgtccgggcagatatcgccagaagcggccgtagcgggtacggcatcggactttatgaaccgtaccggggatgtgctggtttattatggccggaagtcagagattaagcggttgcagacgcttttaccgctgattgatactgcctctgaagaagtgattgtcgcagcttacgtgtttgaggttcagaccagtgagcgtaacggttccgggctggcactggcggcgaagctgctttccggcaagctgaatatacagattggcgcgtctggcggttttgataactttatccgggtgaatacaggctctcttgatgcgctgtatgagcttttcaggacggacagtcgttttcatgtcgtcagttccccgcggctcagggtgaaggatggcgcatctgccacgttttcagtcggtaacgaggttccggtgctgggtcaggtgagctacgccgacaacaggccgatccagtcgattgaatatcgctctagtggcgttatcctcgacgtgaaaccgcaaatccggactgacaatattgaccttgtgattaagcagcagctttccagctttgcgaagacggatacgggcgtgaataacagcccgacgctgattaagcgcgaggtgaatacggaggtatcagcggctgacggggatattattctgctgggtggcctggctgaatcgaaggtcacaaacgccgataccgggttcagctttctgccaaaaggctggctcaccagttcatctgacgagaagaacaagacggatattcttgtcgtgttacaggcgaaaaaagtcaggcgcgccagcgccgcgcacgcaccgagttcccacgaggagcgcgcgcggtga

SEQ ID NO: 445557 - DNA, 1035 bp, Serratia marcescens
atggctatttctgcgtatgtgggcattcccggaagcggtaaatcttacgaagtggtggcaagcgtcattattcccgcctgtatcgctgggcgtcgcattgtcagtaatatttacggccttgccacgcaaagtatttatgattactgcgttgatattaaaaaggcagacagggaatcacttggtgaaattttacttgttcagaatgaagacgttcagaacgataatttctttccctacaaaacggattcaggcattgcggatgatacgttctgccgtccgggggatttaatctgtattgatgaagcatggcgcatatgggagaacgataaagggattcctgcaaatcatcgctctttcattgcagaacatcgccattttgccgatgaaaaaacgggcgtaacctgtgatttagtggttatgaatcagtctgttgccaaccttccgcgattcattaaagaccgggtggaaacaacgtatcgcatgagtaagcatgtggcgctgggtctgcataaccgctaccgtgtggacgtatttacgggtatcaaactgtttaagtcgaatctgacgaacagttatcagaataaatatgacaaggcgatattccccctatataaatcccatgagaacgggcagggaagggaacttgtcaccgataaacgtcagaatattttcagttctaaaatgttgtggtttaaagctgtcgggttactgattctggcggtaattgccattttttatctgttctggtttttcacgtcaaacggtaattcagagcctgaacagcagactaaagatttacccgccgcaaataattcagcgtcttttgtacctgccgcgccagctaagcccgttgtgtcggacaaatggcgacttgccggacggcttaaacgcgatggtcaggcatgggttgttgttgcagacacgtcaggcagattgcgtatagagccggcttcgcagttcagctttgacggcatgatgatgacgggtgaaatcgacggcgaaacggtgacggtttattcaggggcgatacgatga

SEQ ID NO: 445558 - DNA, 558 bp, Serratia marcescens
atgggctaccgaaaggctaatgaatttgcttttgacgaggcacgaaaggaaagctttcgcacccgacttaagaagctaataggagggcgcagcgttcgcgctgccgcaaaggattgggggctttcgttctctaccttaaacaactaccttactcgtggcacggagccatcattagtggcaatgatagccgttgctagtaaagagaaggtaagtcttgattggatagcttttggaacatccaatgtcaaatcagagtcaatcaagggcgatgtatcaaatgagagtcagtccattgacccgttagcaatggcttggaacatgattttttcatcactcaatcggcatgatatcgaggcgctcataagtttgattcatagggagggggccagaggcatcctttctacaacagaagccccaggtaatttagaccagcttttactagggcttccgaaagaggaaaaagaaaggttacttgcattacatgaagccaaaaaaggggcacttgaggagcgtcaagaacatgacttaactcacccagtgagtaagcaagccgggtga

SEQ ID NO: 445559 - DNA, 1899 bp, Serratia marcescens
atggctaccacaccaacacaaaaacccatccctagcaatgacattattgacttgaagtttaatgccgaaaaaatagatgaggtggtgaattcagactttgaaacctacatagataggtttggaattgagaggtatacactggatggaatcagaaaaaatctagctccgctaggcaaagcctatacaaaagaacaggccgcatcggcaatagcatcaggtgaaataaaagagggagatttcttctttatctggtctgacaacgatgaaaccattgctgaccaatataagaatatatcgggcgtggcagtattccaaggttatgggtttgtaagaagtaagctggtaacagacctatatcaggaaattgggattgagttatatactcaatcggctaatgtggataattattatgtggtagctggtggggctaacgctggcaagttgttacctacgagctcatcgccgacggtggttacctattttcctgtatttccaggacaaacttatatcgttaaggcatcagacttccgaacagatttctttgctgtagcccttaaagccgacaaccagctcactgaaaccactctggggttggtgagcctatcaggaacaggaagttatcgagccttcacagttccagtaggaagctcagcgaagttcgccttcgtgaacgtgatgatcacgaatggtggatttgatatccgtaatagcatttccatttctgttgatgttgttaaatttatcaacggtatcgctatctatgatgactatgcgagaaacaaattgcttgatgataacattagcctgatcgaagatgatagcggacagatttataatagtttaaataacagggcagggtactatgttagagctacaggagcgaatgcaggcgatatattgccattaacaggaacagtgttgaacaccttccctatctcagcagggaaaacatacaccattcaggcgtcttcttttgagccaaactattttgcagtcacgctaaagaatgacaatcaagttacagggccaaccctgggtcttgtcacattgaccggttctggaaacactcgttcgtttactgtcccatcgggtagcgctgccaaattcgcattcatgaacgtgtaccttcctgggccaccttgggatattaggccaacattatcgattgttggacccgtacaaaaaatgtcggcgttgaaatcgtatggtctagttgatactcgagcacgtcaattaattgctgaaattgatgggaaaaaaaactcaccaatcaaagggaaatcatgggctgttgtcggcgacagcattacagcaaaaaacttcaggacaaataaaaattaccacgaatacatttctgataatgtcggagggatgacggtatacaactatggcattagcagcactggatacaatgggcgctatggcgttgctgatacaatcactgaaattcccgattatgtaacagtgtttctcggcactaatgatttttggctggttggcaataataaaccgctgggaacattcttggacactggcactgaaactatttctggctgtatcaatacgtgcctgctcggcctgatcacgaagtttttctcgaagaaaatagccgtgttcactccgctgccgcggctggacaactggggaagcaacgcggcacctaatgccgtcggctatacgcttgaacagctttctacgctgattcaacgatatgcggcgcactactcgatcccgtgccttgatctgtaccatgagagtaatttgcccgtgtacgtacccgcggggaactcctactacttcacgtacccaggcggttctgagccagatggcgtgcatcctaatgacgcaggacacatcgtcatggccgcaaaaatccaggcgtttctcgagtcgttttaa

SEQ ID NO: 445560 - DNA, 180 bp, Serratia marcescens
atgtcagatatcgcagacccaagcacaaacgctgaacaggccgctatgcaactggttgtcgagttaattcgagcagaacgtgtcccaatacatcacagcaacgtcgacggcgttctcagcatgtacgaccaagcgctcaatcacttcaagaaactgaacagcggcgagtctgcttcttaa

SEQ ID NO: 445561 - DNA, 180 bp, Serratia marcescens
atgaaattcattgaactgccagaagatgttcagcacgaagccgcagctgctttgtccggcgctttacgggaaaacggtattctgggtgatgaaaaacggatggggcaggctcagggaattgccgacaccatccgtgatgcgtacctgcgactttactcagagcaacagtcgcctaattaa

SEQ ID NO: 445562 - DNA, 348 bp, Serratia marcescens
atgaatgatgtcatcatgaaaaaatatataattacgattgcgttactgtattctcaatttgctttttcagctgagtataaaatatcaatcccaaccgatgccaaggctgtgtatacagtgttgggcaagggggagcgtgatggtctgaaaaccattattactaagcgagagggtagttccggggtgtcatactctgagcgtgcttacgactgcgttaatcgcacagtaaagtacctgggtgatggcgagaccctagagcaaatgaagttatcccgcgctgacccgaatatgagcgatatagttccccaatcaatcgctgattatgtaggtaatgaagcctgcaagtaa

SEQ ID NO: 445563 - DNA, 579 bp, Serratia marcescens
atgatccttagcatcacagcaatggcagcagcgtttgcacctttgctcactgaggcacaagccgaggttcatggtgctttcaaacctctggtgtcctctgagtgcaaaaaaaccgtggttctttctgcggttgatgcattccagcgatgccagcaggttcagcaacacgctaacaagctgcaaaagattgcagaagaaggtatggaacacctcgcttcagttcgtgatgggagcgcggatgcccgtgactttcctgctggttatgacgctacgcttgatactttagctgtggcagctacaaactgcattaaccttactcgtgacatgtttgaaatggcagagggctcagaggcgtggtcaggcaattatgccatgctaaagcctgttaaaaagcaaatgatgcgtagccttgcgttgctgagaagcagcgctagccagatcgctactgaaatccgccaagcaaatactgtagttgataatggtcgactgttagccgataacacctcgaatgaagacgtggtaaggctgatcaacaaatcgcacatgatgttaggggtggacaccccgcgctggtcttaa

SEQ ID NO: 445564 - DNA, 375 bp, Serratia marcescens
atgaagaaaatagctctggctctttcgcttctggttctggccggttgtgataatgatgcagacgtggtttcgcgcaatctaagtaccgcttcggataacttcgaggttaatcgccgcgtcgtcttctataacggcatcaccggcgattatatgttgtctatcgaaggcctgtgctcgaaagacaacagcagcaccgccaacaccttgggcatcgtgtgcaaggttggccctaactcgtacaaaaagcacctgctcggcctgtctgacaacgtgacattcttcattgagcagatcgacggcgtgaagaccaacccatatttctaccgcgtcaccttcaaaccttcagtgatcattcctgatatcgacgttcgctaa

SEQ ID NO: 445565 - DNA, 540 bp, Serratia marcescens
atggttcagagatataaccctgattacgtcatgcatgcggcgcgatttgcgccgtttgcccgcgaaaatgagcatggtgagtacgttaaattctccgactatgaagccttggtatcagaacttgccagcagccggcagatcaacgcccaaacgctgcaggtaaagctgacaatggctgaagccatcaaagagctgactgctcgagttaatgcgctggctgtggagaatgcggcactgaagtctaaagctgccgagcttgtgcatgaagcatctgaagtctactcagcatacaacgccaccatcagagagcctgacggcgacttcatggatatgcagacactgtatgagatgcagcgtatggaaaccccagccactgacgcagcacttgcagctatccaggcgcagggggtggagaagtacgcatcagaccttgaccaaatcgcctcagaatccaatccagcagaaccaaagcatactgtcgcttccagctatgcggatgacgctcgctcattcgccaagaagctgcgggaggccaaatga

SEQ ID NO: 445566 - DNA, 276 bp, Serratia marcescens
atggctaagcgtaagagcaacagagcggcgcgtcggttgttgtgggttccgattgccggttatggcgactgcttcaaaatcagtaaccggcgctggcaagtttacagcgccaactatccacacgtctggcagcacgttaagccatcacgcagccagcgacgttccaagtgttatcttgatgagttacgcattgagcggcatttcaaacagaaccatagcgatggaatgagcgcagagcaggcttggaatttggccgtcaagaccgttaagggctga

SEQ ID NO: 445567 - DNA, 609 bp, Serratia marcescens
atgagcaaggcagaaaacaaaattatcctgatggatgacgcagaagcggccagtatccagacgttaaccggttgggttgatcgtcatggacgatactggggaaatgacgagcagcaggctcgttggtgtggtgccacgcaccgcaaatgcaaaaacaagccagacgaacacccaatccatagcacgcatagttattgtgaagaatgccaccgcgaaagccgtcaggagacgtttgcaaaaatggctcgcgcagtctgggccggtgagcctctcgttatcttcgatagcgatcaatactttttcgatgccgaatcgttgtccgactattgctgggaaaattcagttttgccgagcgaactacagctgatcatctgcgaaccaaattacccgcctgaattcgatattgagcagcattgtgaggaagttattcctgatggtgaggattactactcactgtcgcaacaaatcagggatgccgccgacgcgctgaacaaggccataaaagaaagctcaccagtatcgtggagcggaggcggtcgggtggcgatagtgtctgacgacatgctcaccgacgagcagaaggctgaaattatgaatgggcgcgtttga

SEQ ID NO: 445568 - DNA, 420 bp, Serratia marcescens
atggacaataagctgagcgaactgagcaagccaaaggcattcgttgttaccggcgggaaaatgtatcaagaccgcgccttcacggataaatcaacggctgaacgctccaaagccgatcggcatgatggagcagtcgttgagcctctctactcgcaagagtacgtctccgccctcattcagcgagttgaacgcctcgactcgatactaaccgaatcagtgcaggcactgaaagcggtggagcagcgcaatgcagagctggaagccaagctggctacgccggtgcggttgactgatgagcggacgctatgggcgggtgaagatgattatgacaccggccatgttaaaggttggaacgccaaccggattgagcaagcagcgctgctgaaaaagcaggggttcaaagtcgagggggatgagtag

SEQ ID NO: 445569 - DNA, 570 bp, Serratia marcescens
atgacactaaagactgatcgtttcaacgaaatttacgagaacccggaacagtgtagttattctgaaattcaggaaatggccgcgatgttggctaactgggaggcgcagccggtggcatataccgaacaatgcgaaatcagcaatatgcaggccactgggctttatctccgaggttttccggataactctcaggggagaaacattccgctctacaccgccccgccagcgccagcagtgaacgcatcgccagattttgagacgtggtttgttgaaaaatataagcagccagagcgtctgatgaagaatggggatggcgcatacaagttctctggcgttcagatggctttttctgcgtggatcgatggccgcgccgcaatgctggctcaacctgtaagtagcggttacaagttgccggacggcttcaaactcatgccgctggaaatgaccgacgaaatcggcgaagccatcgccatggaagctcgttgctgcggtgggattgctctatgcatctatgaagctgcgctggcagcatcgccggagagtgggaatgatcacgataccggacgataa

SEQ ID NO: 445570 - DNA, 486 bp, Serratia marcescens
atgaccgacgtgaaaaaaatgacgcttgctgagcgcgctggccataagcttggccggtgggtgaagcctcttgtgcgcctggaggcagcgattgtccaacgtctggtaacggcgggcataccatctgggttggctctcactctgaagtgggcgatacgttgcgcactcgctctggcgctactctattttgcccttatcccagccctcatcatcttggtcttctttttctttcttacgttgggcggaggcgaggcggaaacagggaatgatgatatggaggaaattaccgattacatgcgaaaggaagaagaagcattgaagccaaagtggcgcgaaggccattccggatgggggctgtactcacacgacgatcaggctctcgatgtcgacaaccggatgactattaggagtaggaggtccgtggttgttaggaaaacggtatctatggtcactcccgctttgtatttgagtgattctcatatatga

SEQ ID NO: 445571 - DNA, 381 bp, Serratia marcescens
atgaaatgcgatttaaagattggtgtaaacgtcgacacctcagaccttgataaagtcgaggcgcaattaacgcggatcgttgatttgttggacaggataaataaaccgagaaaaatttcattttttgatggtgaaggggcgttgcgccttgttatttccccgtttgttgttgaacaaaatcaggtgctgataaacgatgccagcattgattcagcgaaaatttccaatgtaatcatgtctcacgcgaaagcggttatcacccaagaaaacgcgatgaaagattcgattcgcgaggtggttgacgagctgctggctaagcagcttcacccggtggtgcactttggcaggaaattaaaaaccgctaaaacacaaccagcctaa

SEQ ID NO: 445572 - DNA, 2976 bp, Serratia marcescens
atgacagacattgcatcgatctccctgcgcgttgataccggcgacctgcagcgcggcaacagcgagctggataaattccagaaaactgctgcaggcgctgccggcgcggctgacggtttcaatgcctcgggcaaagagacggccaaagtatcgaaagaggtggcgcacgaggtcgaggaaacgcacaaacgggtagcggaatacagccgccgcctgcgcgagacccagaccacggcgacggcatccggccgggcgcaggaccaactgaccgaatcctacttccgccagattgaccgaatcaaacagctcggcacaggcacgcaggaattgcgcgccattcagtcgcaggtgcgcgccgcccgcgccgccggcaacatcacgcaaaacgactacctgacgctcaccagccacgccgcggataaaatgcgcgagctgaccaaagccgaagaggcatcggcggccgccaaatcgatcttcatccaaaagctgaaagaccaggtggcgacgcagagcctttcgcgggaagagctgctgcgctaccgtgccgcgcagttgggcgttggttccgcagcggacatttacatcaaaaagctgtccaccgctggcgacgccacgcataaattcagtttgcagacgtcggccgcccgccgggagctgggcgttatgctcggagagctggcgcgcggtaacctgggcgccttgcgtggctccagcatcaccctggcgaatcggtccgggctgatagagcagatgatgacgctgcgcgggctcggtatcgctggcgtgctgggagggattgctgccgctatttatggagtagggaaggcttggtatcaaggctcacaagaagcggtggaattcaacaggcagctgatcctgacagggaattatgccggtaaaacggcaggtgatttgcagtcaatggcaagggcgctggccggtaatggtgtaacgcaacatgccgcggctgatgcgctggcgaaggttgttggaagcgggagtttctccgccggttctatctccatgattgcagatacagcggctaagttgaaagccgatgtggggcaatcaatcgacgaaacgattaaccagtttaagcggttgcagagtgatcccgttcaagctgtcacagagttggataaatcgctgcatttcctgactgcgacgcagctcgagcagatcaccagtctatccgaacaggggcgcaccaccgaagcagcggccgttgcaatggacagttacgcggaagtcatgcgtcagcgtagcggagagatcaaagaaaaccttggtacgctggagtctgcgtggaaatggctcggcgacgccgcttcttctgcatgggacaaaatgctgaatatcggccgagaatcttcggtgaaggataaaatccgcgacattcagcagcagcttgttgagtttcagataaaccctgccagcaaggggatctacttcaaccaaacaggtaaaacggctgacgacctgaaagctgaactgtcaggcttaatggagcaagactaccaatccagcatcagcaccgcccgcgacaaagctgagcgtgacaacgaagaacgccaaaagcgacagttccaggctgatcagaaccttaagcagcggtatgaaaccgcagaggaaaagcaccagcgtgaactggcaaagatccgcaactcctatgcatcccagagcgttaaagatgaggcaataagccgggaaaatgagcggttcgccagggagaaagagagaggaacaaaaaaagggcgccagtacacggctccagccggtgatcgtgctgaagaaaaagcgcaggccgatttgttggcgctccaggcgcaactcaaagtgctgcaggaccaccgcagcatcaatgacaccatcagccaacaacgcaaggatttgtgggcggagcaggcgaagtttgccgttctggagcaggccgccgataaacggaagctgacggctcaagaaaaatcgctactttccagcaaagatagcgtgctggcgcaaaaggaacggctggctgttctcggcgacgagatcgccaagcaggagcggctaaacaaacttcaggacgcctcgtccaagtatgtcacccagatgagcgagaagcgtcaggcgctgcgtgaaagcgccggcttgagcgatcgggatgcgcggcgccgcatggaagaggcgcagctcgcgcaggggtggcagaatcagggcggtagcctgcaagatgacggttacaagcggcagttgcaggcagcacgtgatttttacgccgaagaggacaagctgcgagccgactggaaaaaaggcgcattgaaaggctggaacgaatatctggactcagcgaccaatgtctattcctcagtcgccaatgtcgccaatgccgcaatcactgggctgagcgacacgcttaccagccttgcgacaaccggatcggccaacgttaaaagtttcggcgtctctatgctgaaaatggtggtggacgtcatcaacaagctgttggtggcttacgccgttcaggcggctatggggtggattggtagctcgctcagtgcgccatctggcggcaataatcccggcgcagttccaatggggctgcattacgacggcgggtataccggcgacggcggcaagtacgagcctaaaggcatcgtgcacggcggtgaattcgtgttcaccaaagaggcgactcgcaatattggtgttggcaacttgtacgccatgatgcacagcgcccagggttacgcggacggcggctatgtaggtaacgcgccaatgcacggcctgacggcttccggcggcggtggcatcactgttgatattggcgggattaatttcattaatcagaacacccagcaacagcccgcagggggcggccaacgggatacggccggcattcagaaacaaatcaaagccgctgttatcgacactattaatgaccaatccatgcggccagggacgccactctggaatgctttaaataaacgttaa

SEQ ID NO: 445573 - DNA, 618 bp, Serratia marcescens
atgaaacacttacccctgcgagaagtgatgcgcaacctcggcttaaccgtcaccgatgacggctatgagttaagcaacccagccggcactgcgcgttatgatcttcatggcgtgcgcactatggtaaacggcatcccagaatacttcccgatcacgctgtcggtaaaaggtggttatgcccctgccttcgaacctggccagactaagccaactgagaacatcggcacgatgagcctcggcatcaatgttgatagcgcgtcgctgactgcgctggagagccagcttacgcgcattgccgacctgtacgaacgcatccagaaggcacagcaccaggataagccagtaagtaacttctatgacgacaaaggcgtcctgcgtttgcggattggaaatttcggtatcaaaacagccaacccaccgcgctcaatcttcacagttaatgctggtcaagtattcattggcgatgcgttggtcaaagatgcagttatttcaaactgtattcttagctccgaactgggtaaagaacgccaggatcacctgaagcgtgaggtgcaggccatcattgaacgcgagctacagcccggcggcaagctctggcggtgtatcggtgaacgctaa

SEQ ID NO: 445574 - DNA, 525 bp, Serratia marcescens
atgaagcccttactcattctcggcgctgcctcaatcgtcttggtttctgtgctttgcgctgtggtcaactactaccacgatgaagcgcagaggctggaaggcgatgttaagcggctgcaaagtgataacagcctgcaggcggaaacaatcgccactcaggcgcttcacttccagcgcgccaacgaaatcagcaacgcggcgacccagtatggcatcaacaccgatgcggccacacaggggaaagaaattgaataccggacgatcctcaagaaacagccgacgtgcgatcttgctgttcccgctgctattgctggtaggctgctcgactacacctaccgtctacgttccagcgcaatgtcagccgataccatcttcgctgacgcaaccggtgctggcgccactgcctccggcaccctgacatactgtcaggcggttctgtggattgatccgctgctggcggcgctcgacaaggcgaataatcagctgctggagatacggcggcttgatggggaaaggcggaaatga

SEQ ID NO: 445575 - DNA, 312 bp, Serratia marcescens
atggatcgcctgattcgcgaaatgtcttatctgttcactaaatcccgatttgaagagctccaggagcgagcggaggaaatctccattgaatactgctggcacatcgagtgtttcggtttggtagcggatgccattgaggagtttgtcgaagagacgccagcagatgaatggcgtgaacatgaaaaaattatcatgcattacatggtcatgcgtggattagccctgtacggagacggtgaaaaaattaccaaaatccaatgggcgcaccctggctggatgggcactgctgagaaaggagacaccatccagtga

SEQ ID NO: 445576 - DNA, 126 bp, Serratia marcescens
atgaacaacctgcgaccgacggtcacaccagacccgcgttatttccaaaagctcttacctggcggcattggttatgacccggtggccggtgtgtacgtgctgatagctcggcggcaacaccaatga

SEQ ID NO: 445577 - DNA, 327 bp, Serratia marcescens
atggacaataccacgctaaatgtcatcgaagcaacaaaaccagttctcgttgatgccagaaaattgcgcaaggctcagcgcttaattaagtccgatacttcgtcttgggtgtggaaactgagcatgcacatggtgaagcaggcttatggtatcgagcacaaagagccgttaccggaaattggtgagcgtaacggtaacttcatttgcacatacgtgaatgaagaaaccggtgaatacgctttcattcgcgaccgaagcttattgaaccacgcagtaaaggtctgccaacaatataatgagaaggggttagtatatgttgccagttaa

SEQ ID NO: 445578 - DNA, 588 bp, Serratia marcescens
atgatgttcccaaccgatattctgcgcgcagccctgtgctgcgtagcaagcgagaatgagcctcgcgaatacctgcaaggggtgtatatcacccccactcacatccatgccactgacggccgtgcagcggtgatgatggagcatggtgcggataccgacattgataaggtgtttctggtcaagggcgacattccagacagtgcggaagccacgatcattaaacacatggacgagggctggatggctatccattcggatgaagataaggaatttgtcggtttctgcgagttggtgccgctggattgtcgctatccagacttcagcaaaatcctgccggcagagccagaaccgtgcgacgtgctgccaatgttttcaggtcaccttttggctctcccctatctgatgtttgggtcggaaatcggctttgctgcagttcagtttaagccttcagggaaaggtggcccctgccaactgattttagacccgggcattaaccgcctgtacggcaatccgttcctggtcattatgccgctacgcgacaacaccttcgatctgctcgacgaggtgatgaatgaagaaggtatttga

SEQ ID NO: 445579 - DNA, 264 bp, Serratia marcescens
atgaagttacttatccttactgaaaattcaaatttatatcaacgggttaagctgattgagccgctcatttatggtgcaataacaattctgattggacgtaatctgtccttaaaatttacggcatctgcaagcgataaaacttttaaatatcatgttgttaaagattttcatgagtacaactttcctgatggcaaaggcctaatctcattggcaaaaaaaagttctgccaacccgtcggtcatgcaactggttgatgaaggctga

SEQ ID NO: 445580 - DNA, 588 bp, Serratia marcescens
atgggcgccgggttacgtgatgctgagcatcgagagagggccattcaaatcatgaatatacatccgtggacaatactatccggcaagatgtccgaacaatttccgccgagaccatcagcgcgagttacatggtggacaaaagagagagttgcagagcttcgccgattggctccaaatcacaccattgctgaaatgtctctcattatgggggcaagtactactgtaatacgcagtaaagcggagtacgaggggatcttatttaaaaaggtgaggcatcacatccccaaggaacaagctagatccattctacgcaaatacgcgggaaaattaagcgcctcagagatcggcgaattatttggcttaagcacccaaacgatataccgccttgcgcaaaatacaggcatttcattacagcgttacggtgataaccaccattctgccaaagtatcaagcaatgatgttgaactgtgccgcgctctttgcgaagagggagtgccagtcacaatcattgctgaaaaaatggagcttccaaagcgttacgttagccaggtcattcgtttctatggacgaaatagagacctgcaatag

SEQ ID NO: 445581 - DNA, 1254 bp, Serratia marcescens
atgaaagaaattatttctccggtcgataccgaagacggcctgtttcatgatggcgacccatcaacaggcacagaaggcaccgtcgtgtccgccaaatggctgaacccggtacaaatggccattatcggcaaccaacaggaattggcctccgtattgaaagaggcgggaataaaaatcgacccatccaagcaagatcaattactggcggcaattaaaaaaatcaccggtacggcaacagaaggctttttaaaaattggtgattacggctttgggggggggcctcaacacaaaacagaagcttacagcaaagtagcgcagatttaccgcattaatagtagcagcacaagttcacccggtggcagtgtttacggggtgatttgtctaccgtgtgatggggccccctctgctagctatttggcagcaggaaataacggtgaactacatgttggtcgttcaacaacagcatctaacggtgtttcgtggtatcgagtatatactacagcttataaaccaacagccgccgatattaatgcttatacaaaacaagaggcagatgggcgttttgcattcaagtcgattactgtaaacgggaagcctttatcttcgaacgttaacttaaccgctggtgatgtcaacgcatggaacaaaacagaggcagatgggcgtttcatttccaaggctggcgacactattaatgggacgctaaaaaacagtaaggaatttcaatcaactggcattgataattttagaatggctaatagcgatattggcacattctggaggaatgacggcaatcgtttatatctactgttaacgaataaaggtgatccatcaggcacatttaacgaccttcgtccgtttatggttgatttggtttccggtactccctcatttggttcaggcattcatattgatgggaaatggcctgctatcaccacatcaacagggacaacgtggcaccctgatggaaacgtgcaaggtgcacaatggggcggatacctcagtaactggttgaatagcaatatttcaaacgcacaaaatggtgcccagaattgggcatatcaaaacttagttcaaaatgtgcggctaagcggaagaattaatcaacctgataccggagggcaagtcagggtgcctgatggctgtgtttttactggtgtatcaggggctaactatgacccatcaatctgggcgtcatattcttatattcaagtcttgattaatgggacttggcgaaacattgggacttcatga

SEQ ID NO: 445582 - DNA, 153 bp, Serratia marcescens
atgttgctgcaaaaacgcagttttaacgccagcgcgaggcgcaaggggggtaggctccccgccgccgtttcccgtcatgcgtgcggcgagagactttacgattcgtttttgcagagggcgcgcattcgtgataaaaatattgatatgttataa

SEQ ID NO: 445583 - DNA, 1764 bp, Serratia marcescens
gtgcgtacaggattattctttggaacctcacaaagtattgttaagagctttttgagtaacgtaattgcaatcgatgataaattgttttttggtaacaccatatctaataaggaagtgacagcttctgatgaaggagaaaaatcctttgattttggcgaggaagagagtgcttcaggcgaagaggaacatggtttaggtgtagcaactattagccacgcctcttctgagattagaaagagattagaagaagaggttcataatttagattatcaagacctctctttagcttttgctgaatatgggataaattgtagtggttttattcctgaccctcatagatttcactcaattgaagatgccgccgaaaatattacactgagtgcaaaacgtgtagatgctacaattcttgattggcgcatggatgaaaactttggtgctgaaataggtagtttagctaagacaagtatttttaaaatactacaacatgacaaaaaacagcatgggcgattacgactaatagtgatttatactgctgagcctaacatcgtagaaataactaaaaatattgcagaaacattaagtggtccagattttagtgtattgctaaatgggaatactattaattttgaaaatgcagatctagaattctgccaaattacggttatagaaaagaaagcgacagcagaagagttacgagaggaggtcatctcattatttaccgaacttactatcggacttttgcccaatgctacactatcgacacttagcgaattacgagataaaacccatcatattcttcatacttttagtagagatctagatccagcctatttgtcacacgtgattggattattatcttcacccaaagtaagggagaatgctgaagaggtcgctctcgattatgctgcggagttaatagctgaagaattaaaatccatgattcaaataagtcatccattgaaattaagcttagaaaaaaaaagaataatagattggctaagccatataaacactgcaaatgatgacgatttttttgaaattattgttggagatgaatcaggaaaagttggctcatccagaataaaagaacttcttgcagccacagaaaatgagcaaattgataaaatattgcaatcagaaccaaaaataattagtaaaggtcaagaatccctcagtttctttgagagaaacagaattcaagtaaatttaaaaaatgggaccatagacagccatgaaaaattgtcaattattgaatgtaaacgtcgtgatggtctatctcttacaaatttggcatatgccccaaatattaaacttggctcaataatcaaagataaaaacggtaagtactttatctgcctacaacctttatgtgacagcgttcgtctaagttcagatgcaagttttcttttcctttctgtgaaggaagttaaagaaccaaaagggaaattcactcatgtaattcaatcaaaaaccggtgaaaatattcgtttaatggccaggtgttcaactcaatgtattagaaaatttgatctcaaacgtgacagaacaacacgtacagtaaaagcgtccaattcagctactaacagcgaatacacaattaagtataaaaaagaaaccggaggcactgaggaattatattgggttggtgagctaaaaaataatgttgcacaagcattatcaaatcaagtagctgcaagtatttcccgtattgggctagatactaatgaatggctgcgattaagctcatctataagcgttatataa

SEQ ID NO: 445584 - DNA, 585 bp, Serratia marcescens
atgcagccttttgctgctcgcaacgaaagatttaaaataatttatgatagagttcgtattgggtttgatcatcttgatgcttatataaaaacactaataccattaacgaggcagacaggacgtagacggacacttataacaggcaaagccattagcgaatttattatttctgtctttgaagaacgcttacaaaaagaacagattactatcaattttactgaaggtttttacaatcaaagtgtcgttacctttacttctaccatatacccagtatttataaaccttattgacaatgccatctattgggtagccaaaagcacaggacaaaagtcaattactcttgattcatgtgttaatggatttcttatcaaagactctggcccaggtattccgacaattgatcaacaaaatgtatttgaattcggatttagccgtcggttgggtggacaaggcatgggattatatattgcccaccaaactttaactcgtgatgattttgaactctctcttgaaccatatgatccgaatacaggtgcagttttccggattgtaaaaaacgaacataacgacattgatatggagtga

SEQ ID NO: 445585 - DNA, 612 bp, Serratia marcescens
  misc_feature (41)..(50): n is a, c, g, or t
atgtttaccgtgacggtatacgtattttaccatatggtgannnnnnnnnntggtgattcagatgttgattttcttcgaattgagcaacgccgttcgaaaagtgcatctgaatactttttctcatatcgaagaatgtttggagcattagaattaactaaagaactcaatgctgaattgaaagaaaaagcagggcgggaaggcttcattgagaataaagcatataagcaattcaaagctattctggaaaattttttcattcaggtcgctgcagattactttaatgaaaaaggtgatcaatcagcaacatttatagaaactagagcgcgtcaacaacgtgaaaatgaattactaaaaaaacgtgaaagttttaaaacagccaagcggaaacgttttttagtgtctcttgaaaatttctttacgaagcttgataatgggactttcaaaaaatcaatccaagacttaaaagaaaaatcacagacagcttttgataactttgatcctaaaaaaatttcggttgatgaccttgtttttaatgtagaaagaattagacttaacgaatttggaagattattggaaaatatagagatcacaaaaccatctggagttgattaa

SEQ ID NO: 445586 - DNA, 984 bp, Serratia marcescens
  misc_feature (969)..(978): n is a, c, g, or t
atgccagatgttgatccctctaagcggtctcgtcctattatgggagaaaaagggattggtcgcctagccatcgcatcaattggcccgcaggtaatggtgattactcgttcgcgtaggaatggcactagtggtaaaattgttgcagcttttgtcaattggacattgttttccttaccaaaattaaatttagaagacattaacattccaataattgaacttcctctaaatgagtcacttcgtaacgagcacgttgaaaagcttatactagaagcaaaggaaaacgtactaagcctaagtggcaaaatatcgcaaaaaaaaatcaatttaatcataatgcagttagagcatttcaattatgatccagagttctggaacactaatttaaacattcaggatgataatctcagtttagggcgtgactatctatcgctagaaggtaaccgcgggggaacacattttattataaccccagtggaagatattttagcagacgatatcgagacccttaatactactcggcgtacagaccaatcttcaagattagaaaaatctttacttgggttcacaaatacaatgtacgaaagttcacatcctccgattatggctcgttttcgagatcatactttgcatggagaatgtattgatagaattagtgaatctgttttttttacaccggatgaatttgctattgctgatcatcactttaatggtgtgttcaatgaatttggacagttttcaggaacaatcagaatatatggtgaagagagagatgtagttatcccatggcctgaaggcagtagtaaagaaactttatgcggaccatttaaacttaatttggcttatttgcaaggacttcaaagagatacaaaaatccctccagatacttggaaagaactcagagataaaactgacaggatgggaggattgtatgtttaccgtgacggtatacgtattttaccatatggtgannnnnnnnnntggtga

SEQ ID NO: 445587 - DNA, 1059 bp, Serratia marcescens
atgagggttatagactttttctgcgggtgcggtggagccagtaagggttttgagctggccgggtttgatatcgccttaggtatcgacttcgatgaaagcgctgaagccagctataaagctaactttcctcatacaaaatttattcgtgatgatataaggaatatcaaggtacgagatgttgctaagttagtaccagacagagatagcacagaactagtgttctgcgcatgtgcaccttgccaaccattctcttcacagaacaaaactcgaaatgcagatgatatacgccggactcttctaggagaaacgaagcgcttcataagagcatttcgccccgctttcatttttattgaaaatgttccaggtattcagagtatcaaaattgaagaaaatggcccctttgcagatttccttcattttattggacgatttggttatcagtatgattttaaagttgtttcaagtgaattttatggtgttcctcaacaaaggaaacgcttggtaattcttgcaagattggggggggctccctacttcccggcaccatcacatggcaacgaagaacatccgtttgcaacagtcagagactatattggcgatctaccccgtttacaggcgggcgaatgcagtcctaatgatcccctgcataccgcagctgttattagccccatcaatatagaacgccttcaacacactcccgaaggtggggatagaagagactggccagatcacttgtggttaaattgccatcgagaatataatggtcatactgatgtttatggcagaatgaagtgggatacaccatgtaaaacactaactactaaatgtacaagcatttctaatgggcgttttggacatcctgatatcactcaaaatcgagctattacgtttagagaagcggcctgtcttcagactttcccaaaaagttttatttttgaggggagtaatatttcgaagtctaagcaaattggtaatgccgtaccagtgcttttggcacagtgttttgcagaagcaattctcaagcaggctaaaattaacaaggagaccggggataattga

SEQ ID NO: 445588 - DNA, 1386 bp, Serratia marcescens
atggtattaatcagcggggttttaaaggggccttacggtgattctcgtactggcgtaactattactatgcgctcaatgaaaacatcatccacggtgttgaatttggcaaagtcgcaatctgtcactgatgatacgggccgctattcgcttaatgtagagcctggtgcctacgaggtgattgtgtcagtttatggcgcacaaccggagcgagtaggcacgatagaggtttataccgactccctacccggtacacttaatgatttcttgcgtcgtccaggtgaagatgacattactcctgagattgtgcaaaccgtcgatcgcctgcgtgccgatgcagcgttatcagcagataaatcagcggcatcggcagcggcggcaaaaattagcgaaaacaatgcggcgggaactcttgccagcgctataaaaaatggtggttatggtcagattgttcctccacgaattaatggtccaataggtgcgcgacgttattgtaaaattgcagaatgtcccatatcttcaaccggagccaccgcggtgcattttgccgttattggaggtcgaaattatggcgttataggaatggacattaaatatgtgtattttactggcagagggtcaactataacgtcgttacatgcgcgtgggcttgaaattctctcgctaggtttaacaccaaattcagtaagtgatattgagtttggcaccctctataacaatacaatttcacgttgggaactatgggtttgtggtccggcattcaatgtgccaaatataacactgctaagcagcattcgtgaaagccccatgttggatgttgtaccaatgggtgattacaaatggcaggctgagcagcctctaggatataaagcttacgccattaaaaatacctggtcagattacaacgctaccgtagacggtaacggattcctgaaagcagcatcgccgatcgccaggttggcgagttctccggagtcaatgcaagacgactatctttctggcggtttttcactctctggttgcgcggctgtgaacggtgaagcggcaggagtatctgctgagcgggtatccactggcatttacaaagttactggcgcgttaggttttgcggaagagggctggaacatcgaagtgccgcaggacgtgaacggcaaccgcctgtgctttgtctcagctaacaccggcaaggatggcacgatctatgtgaaggtcagcaagcgccgctttgacatcgacacagccgcgattgtggccggtgagccgatggatattccggctgggcgttggattgatctgcgcctggaaatgcctgtgcgcgaggttgaagtagcaccggaagccggggaggaaactgcggcccttgaaaatgggaacgttgaccctatctaa

SEQ ID NO: 445589 - DNA, 1392 bp, Serratia marcescens
atggccaacattaatgtcatcgtcaaacgcaaacagttcctgtgggctggcggcgttgcgctggcgcttgcagcggccgttggcgtgggctggtacgtctcgcaggacagtgagagtgaaccgacgcaggccagcgaaccggcccctgacatgaccggggtggttgacaacaccttcggcgagcgggcgaccgagaacgccatcacgcaaacccaggtggcgcaggccgaaatcaacaagcagttctcctcgctgcgtcaggagatcgacatgctgagtaaggcgcaccaagaagaccagaagcgcatcagcacactggaagacgaaaaccgcaagctcaataaccagacaggtggcgacgggcccccaacaccagggagcaccacgcccggcgccaccgccattccccctcttgctgctggtgtgacgccggaaggtgagccgatgccgtcagctttccctccggcgccaggcggcccggtgccgccgccaaccgccttctatccggggcgcggagcggttcctccgccggtggtggattacacgcctgttccggtgccgggccagctgtatcgcaaggtactgcgcccgaaagacgccgggaagccaaagaaaaagtacccctatatcccgaccggcagcttcgccaaatccatcctgattgagggggcggatgccaatgcgtcggtgaccgggaacacggccacggtgccgatgcaggtgcggttgaccggccggatcgagatgccgaacagcaagacctacgacgcgaccggctgctttatcagcatggaggcctacggtgacgtctccagcgaacgtgccatcgtgcgcacccgcaaaatcagctgcatccggggtgacgacattatcgatcaggacatcgacggtcatgtcagctttatgggtaagaacggcgtcaagggcgaggtggtgatgcgcaacggcaaaatcctcggctttgcctggggcgccgggttccttgatgggttaggtgaaggtgccggccgggcggcgcagccgaccgttggcctgggcgcaacggccagcatgggcgccggcgacattgccaaatcggccctgggcgggggcgccagcaaggcggcgtcgaccctcagcgactactacatcaagcgcgccgaacagtatcacccggtgattccgatcggcgccggcaatgaggtcacggtggtgttccaggaaggcttccagatgaaaaccatcgaggaagtggcggcggaaaaagagagccgtcagcaggcgctgaccgacgggggcgatcagtccaagtccgggcagaacctgaacgggtttaacaccgatcagatgctgaatcacctcggcaaggttgatccagcgcaattcggtattggcacagggagtggccagtga

SEQ ID NO: 445590 - DNA, 747 bp, Serratia marcescens
atgaaaacaaataaccccgtccacggatggctgattgcctgtgcgctgactgctgcgggcactgcacaggccggcacggtactggcgccggtcaccattcctttgcagaacggcagtcaggcggccgtggcgctcagtaacagcgaacccaacctcttcaacgtccccggcgacagcgtgctggcggtatccggcgttgacgagaacctagtgcggtatgaaccgaccgccaacggcgggctggtgctcagtacgctcaacaaaaagcccttcaccttcgtcattgaaaccgagcgcgggatgaatttctccattcgcgcagtcccacgcgccggcagtggccgcacgttccagttggtcagtggtgatcgtggcgtgtccgagccggcccggatctgggaacagtcacagccgtatgagtcgatgctggtcgacctcaaccgctcactgatggaagggcggttgccggtaggttatggccaggtgcctgtgaccgccgagcagctggcagcgccttacggcctgcgtgccgaggctgcccaggtctggaaaggccacaacctcaaggtggtgcgctttaccgtcagtaatcccggcacgtccccgcgctgggtgaacgagcacgatttctggacggccggtgtgcgtgcggtgatgttcgacacaccgacccgccagattgttgccggcggtcgtgcaggtgtgtggatcaccttctctggggaggcagccgatggccaacattaa

SEQ ID NO: 445591 - DNA, 567 bp, Serratia marcescens
atgaaacattcagccagacttaattccaataggattatcgccctgagtttcgtgttactcggtgtgctgttattcctgagcattgtttctatcgtcattctctccgtaaccaattacaaactgcagggcgatcgtcaggtcgtcgccgttcctatgctgtttaaggcgccgtttgcgatttcagagaacagtatggacgccggctatctcgagcagatggcgctgagctttgtctcactgcgtctcaacgtctcccctgagacggttgatgcctcgcatcaatttctgctcacgatggtcaagcccgccgcacagaaggaactcaagctgacgctggccaaggaggccaaccaaatcaaaaagaatgacgttaatgcggcgttctttaaaaccggtgttcgcgtctatcccgccgaaggccgggtcgatatccgcggtgaactcaaaacctggttcggtgacagcaagccggactcggtgctcaagcattacgccctctatatcgacagaactgacggtgtgacctggctggccaaatttgtcgaggtatccgatgaaaacaaataa

SEQ ID NO: 445592 - DNA, 306 bp, Serratia marcescens
atgtcgggagacgatatcaatctttaccgtttcccgaaaacactgaacaaccagggccgctggtttggtttaacccctgacgaattaattcccattgtgctttctgcctgctggttcttttggcagggcaaacagattgcgggaattatcgtggcggctctggtttatctggcaatacgcaaggttaaaaaagggaagggcagcgtctggttgcgcgatttggcgtactggtatctgcccacctttatgttgcgtgacctttataaaaaagtgccgccttcgtgttttcggcaatggattaaatag

SEQ ID NO: 445593 - DNA, 366 bp, Serratia marcescens
atgaatgctttattaagcgctcaggggccttctgttgcccaacgtcaggggttttcacttcgtaagctgttttctcggcaacgcgtcgtgaatttcctcaaactcgttctgccttttgccgttctgaccgcgttattcccgcagctggcgttggctgccggggcttccggtgacttgcttaaaacgggtgacgataccgttaagcagaccgccggcagcggctccaccatgtacaagtggatcatcctcggtgaggtcgtgaccgggctgtgcctctatgtcttcacgcacagcttcaagttcctgttcggcttcatcatcctgtccatcatcggcaacgtcggcatgaaggtcgccggctactga

SEQ ID NO: 445594 - DNA, 429 bp, Serratia marcescens
atgaacacacaaaacgtcaacgtcaacgtcaaaaccgccacgaaggaacgctctgaaagatatgggtggacggaagcctatggttggggcttgtcgcctgctgaacgcatttctgagcaacagggctacctgaacgagctgcgccattttaacgatcagtggaaaccggaaagagcggagcggctgatggagctgctgatggccatcgccgataacgtgctggactcggtgatgaactggaaagacgtgggcgcttttggtgataaaccccgcgttccttacatgatcgtgcgttgctggctggacgcgatggcgttggcgccagagatgtgcggtgaaatgggcagcaacgccgtggcgtatgtgctcgaaaatttggaggggaaatttgagtttgaatgcgcgatggcccggatggatcgcccataa

SEQ ID NO: 445595 - DNA, 219 bp, Serratia marcescens
atggatacgttttgcatacatgaattagaggataatatttcaaaattgcgtagtggtaaagtggttgttcgcgtagagtcctggatgcctgacgagtatatcggtaagatgctaagaaaaaaactggaacaggcgggcggtgcagctttaatggtaacgtatgacgtgattactgaagaaatacagaaagcagcccatacatttcctgtacagagttaa

SEQ ID NO: 445596 - DNA, 1059 bp, Serratia marcescens
atgattgatgacactcatgatgaaccttccagggatgttcaggcattaattaataatggcttggattttctggaaaaagcccgtcaagagcttgatggctcggagccaaaattttcaattgtcagtttctggacagctgtggagatccttctcaaagtgccattggcacatgaacattggacactggtctgttccggaaaaaaaattgtgcgcagtaaatataaatgcggtgactttcaatccgtgaattatgatgaaacatgcgctcgtcttgctgaggtattagaatctcccttgccgccggaaacgatagagaagtttaataaaatcaaaaatcaccgtaaccgggtagtccatttttttcattcttcttttactgattcagatcagaagcaaatactcacagaacaggctgatgcctggttcgctcttaatagactgatgcgtgataattggtgttttctttttggggatgtattggattcaaaactggcactggatgaaggtcggatgttgcgcagctcatatttctatgctgacgctaagtttaggtttatcaaacctcagttaaagaaactcattgataacggttgcgtaatacataactgctatcactgtaaaaagaaagccgctgtagagatgattattaatgaggagagcggaaacccactctatgagatatcttgtgatgtttgtggacgccgtgctgataattatatctatgctacttgccccgcatgtcagtctaggcagagagtcgaggctgatggggaaccggattttatctgtaggagctgtaaccatgaggaaagtcgttatgacttgctggatgagtgggttggtcgacacgatgaatatagtgagtcgggattgcctgccagctgttctgagtgtgacggttacgagacagtttgcgaatatggaggtggatatctttgcacgggatgtctgacatttcatgattccattagtaattgtgaattctgtggtggaagctcgacttcagtaggggatatgagttctcttgttggctgtagtttctgtgatggaagaacttga

SEQ ID NO: 445597 - DNA, 246 bp, Serratia marcescens
atgacggggttcgaactgaagctgtggcggactggtctgggattgacgcaagaacaggcggcaaaggagtttggtatttcgatgcgtacctacattcgttatgagcatggaaacccgccgagggcgatagagttagccattcaggcgctgtcattggccgcgctgttaccggagattgatgcactaccggcagaaacgttacgacaacgagtaagaatgctggctattgataacagcatattgtaa

SEQ ID NO: 445598 - DNA, 555 bp, Serratia marcescens
atgcataagacgcggcgactccccgcccgtgtgtttggcgttgccgccctggtgctcagcggctggctgcctgcgtcgccactgttggcggctccatcgatacaggtggggttttcgccggaagggtcggcgcagcagctggtactgagcgtaatcggtgaggcgcagcgtgatattcgcctgatggggtacgcctttacctcgccggaggtggcgcgggcgctgattgcggcgcaccggcgcggggtggccgtcggggtggtggtcgatgcgaaggccaaccagaacggcgccggccgggcggcactgaacctgctggccaacgccggcgtgaacgtcaggacggtgaacagctataagattttgcacgacaaggtgatcgtcgtggatggcgtgacgacagaaacgggcagcttcaatttcagccgaacggcacaccgcgccaactcggaaaatgtggtggtgctgcgcgacatgccggaagtggccaaacagtacctggcgcactggcaatcccgttgggcgcagggccaggactggcagttgacttactaa

SEQ ID NO: 445599 - DNA, 219 bp, Serratia marcescens
atgaacacaactcaaaacgtatcaacgacgcagggcgtcttgttaaccactgcggtcttgctgtccggggccgtgatgctctggggatatgtgcagtgggatgtgctgagcgacctgccgctgtattggcgcaatgtgctcgtcccgctgccgctgctggtcttcatgggcatgaagcacctgcaggcgcggctgaacagggctgccccgcatgcataa

SEQ ID NO: 445600 - DNA, 5307 bp, Serratia marcescens
atgatgagcattggccaggtcggccccgccggtaaagccggcgactactacacccatcaggacaactactacgtgctgggcagcatggacgaacgctgggtgggccagggcgcggaagccctgggcctgtctggcaaggtggacgttaaagacttcgtggccgtgctggaaggcaagctgccggacggcagcgacctgacccgcatggtcggtggcgagaataaacaccgtcccggctatgacctgacgttctcggcgcccaaaagtgtctccatcatggcgatgttgggcggcgacaaacgccttatcgcggcgcataaccacgcggtagaggtcgcggtgcgagagatagagaaaatggcctcgacgcgggtgatggagggtggcgtctccgagactaagctaaccggcaacctggtggtggcgctgtttaaccacgatacctcacgcgaccttgacccacagatgcacacccatgcggtggtggctaacgtcacgcagaatgacggaaaatggcagacgctgtcctccgatacggtcggcaagaccgggtttatcgagagcgtctatgccaaccaggtggctttcgggcagatataccgccatgtgctgcgtcaggatacggaagccatggggtatcaaaccgagaacgtcgggccgcacggcatgtgggagtttaaaggtatggagaacgtaattgacgtgttctctaaacgcaaccatgccatcgacgccgccgccggcccagatgcctcactcaaatcacgcgatatggcgacgctcgacacccgcaaagccaaggtcgccagcgatccggctgccctggcggtcgagtggctgcaggaaatgaagtccgccggctttgatgccaaagcctatctggccgaggcgcagtctcgcacgatggtgacgccgtccccgacgccgctggaggcggggggcgacgtgcttgtcgaccaggccgtggggcaggccatttcagcgctctctgaccggcaggtcaacttcacgcacaaccaggtggccaacaaggccatcagctacctctccggggagccgggcatgctggacgcggtgcgtgacggcatcgaccgcgctatcgagcgcgagcagcttattccgctcgacaaggagaaaggcgtatttacctccgatattcatctgctcgatgagctgagtgtggcgcagttgagccgcacgcaccttgacgagagtgcggtggtgataggcgcgccaaagtctgacccgcgcaccggcagcatgtcaacctacagcgatgccgtgcagcagctggcgcagcatgcgccgacgatggcagtgttgtcgggcatagggggcgcatcggtaaaccgttcccgcgtggcggaagtggttgagctggcgcgcgagcagggccgcgaagccaccgtgctgaccgttgaccggcagtcacagcagtatctgcagcaaagcgtacatctcgatgaaagccgcgtggtgacgcgcgctgcgctcggcagcgaggcgctgtttgcgccgaacagcacactggtcgttgaccaggcagagaaactgacgctcaaggagaccgtggcgctgctggatggtgccgtgcgtaacaacgtgcagctggtgttgatggataccgaaaagcgcaaggggacgggcaatgccctcgccgtcatgaaagagaccggtgtaccgcgctatcagttcagtagtcgtcaggctgtgctggcggaggtggtaagcgagccggacaaggcccagcgcttcggtcagttggccaaaggcgtggtgcaggcattggttgaagaccggtcggcggtcgcgcaggtaaacggcccggccgaccagcggatgttgacggccatgatccgtgacgagctgaaagacgccgggctgctgggacgcgaagagacccctgtggccacgctgaagccggtatggctggacagcaaaaatcggggcgccatcgatacctaccgggaaggcatggtgatggagcgctgggatgcggagagccggcagcgtgagcggttcgttatcgaccgggtcggtgcgcaaacgcgcaacctggtgttgcgtaacgccgagggtgaaaaacagcggcttgccgtcaaagacgtggacaaggactggtcgttgttccgggccggtacgatgggggttgccgacggcgaacgcctgcgggtattaggccaggaaggacggggcaaggatgcgctgaaggccggcacggtgctgacggttgttcgtgccggcgccggcgagctgcaggtgcgcgtggccggcgagccggatgcgacacagaagccggcggaccgagtgcttgcggtcggcagcgacatcttcaacgccgtcaaggtggcgccggcgtatgtggaaagcctcggcgcctcggtgaacagtacggcggcggtctatgccgcggtgaagaaaaacgagcttaaccgtgccacgctgagtggcatcgcgcgaagcggcgggcacatcaccctgtattcagcgcttgatgcgcgcaagacgcaagagaaagtggctcagcatccggcgtaccgtctggcgggcgaacaggtcaagcaactggccggtgaggaggggcttgatgccgcgatcgccgggcagaaatcggggctgttcaccccggaacagcaggccattcatctggccattccgacgctggaaggggatagcgtcgcgtttggcctggccaaactgctggccggtagcctcggtttcgcggccaaaggcgtgtcgatggaagccatccagacggaaatcgaggcgcaggtcaaacgcggggagttgctgaaagtggatgttgcgcccggcgtcgggacggacttgctggtctcgcgcgccagcttcgaggcagagaaaagcattatccgactgatcgccgacggcaaggacagcctgccgccgttggtaacaaccagtagcaaaacccacaacgaggacggccccggtcagcgggagggaaaggtgactccgtatctgacccagggacagcagcaggctgtcgaccttattttaaacacaaccgaccgatttgtggcaatacagggctatgcgggtgtggggaaaaccacccagttcaaggcggtgctcgccgggatagagcagttacctgaaagcgagcggccccgtgtggtcgggctggcgccgacgcaccgtgcggtgggggaaatgcaggcggccggcgtcgatgcgcagaccctggcatcgttcctgcacgatgaggggctgaaggttgccggcggcgagaaaccggactaccgcaacacgctgtttgtggtggatgagagttcgatggtgggcaacagcgacatggcgcgcgcctacgcgttgattgccgagggcaacggccgtgcggtgatgagcggtgacgaagcccagctggaagcgattgcgccgggcgcgccgttccggctggcgcaggggcgcagcgccatcgatatggcggtcatgaaagagattgtgcgccagacccccgagctgaagccggcagtgtacaagatgattgataacgatgtgcccggtgcgctgggcgtggtgcgcaccgtggcgccggccaacgtgccccggcaagccgatgcctgggtcccggcgcagtcggtcattgaatatcccgccaaggggccggatgacattcatgccgccattgtcagcgattacctggggcgtaccgaggcggcccggcgcgatacgctgatcatcacccaccttaatgccgaccggcacatcatcaatgccggcattcaccaggaacgtaaagcggcgggcgagctgaagggggaagccgtcagtctgcccatccttgagagcgccaatattcgtgacggcgagctgcgcaagctggacacctgggcgcgcaaccgcgacgccgtcgtcctgctggataacacctactaccggatggccgacatcgacagtcagtcccgtaccgtcagtctgcaggacagcgagggcaatacccggcagttttccccggccagtgcggtgcgcgaaggcgtcacgctgtacaacccgcgcaccatcgaggtaagcgtgggcgaccgcatgcgcttctccaaatcggacgtcgagcgcgggcatgtggccaacagcacctggacggtcgaggcgataaaaggtgacatggtcacgctctccgatggacaacagacccgtaccgtcaatccccgcgagcagcaacaagaccggcacgttgatttggcctatgccatcaccgcccacggtgcccagggtgccagcgaacgttttgccatcacgctcgagggggtggaaagcgggcgtgagcagttggtcaaccgggcgtcggcctatgtggcgctctcgcgcgccaaggagcacgtgcaggtgtacaccgataacgaagccgggtggctgaatgccatcggcaaggcgaaggcgcgcaccacggcccatgatgcggtgctggggatggcaccgggcagccagaaagcggccgccgacctctacggcaaagcggtccctttatccgacaacgccctgggacgcgcggtgctgcgcggaagccagcttaccggcgacacgctggcgcactatgtgtctccgggtaagaagtatccgcagccccacgccatgctgccgatgtatgacgccaacggcaaaccggccggcgcctggctggcgccgctggcggacacacaggggaaaagcgtcgggggactgccgacgcaggggcgagtgttcggcagtgacagcgcgcagttcgtggcgctgcaggggagccgcaacaacgagaccaggctggccgggacgatgcaggacggtatccggctggcggcacgctatcccgacagtggcgtggtggtacgcctgcagggtgacgacgtaccgttcaacccccaggcgatgactggcggcagggtgtgggtgaacgacgagacgctcaaggccactgcacgggagagcggcgcgtccgacagtgccattaaattgccggagagcccggaagaacgcctgcagcgtgaactgcagacgcaggccgacaaactgggccgtgaaccgaacgcccctgaccctcagcgcctggccgggcttaacgatgagcagctgcgtgcgttgcttgcgcgcggcgaactgcgcgccgaggacgtgaaagaccgtctgccggaggcggtcatgcgggaggtgatgggtcaggatgcggcactacgggtcgatgccgctgtccgccaggtggcgcgcgagccggtatcgacacgcagccggctgcagcaggacgagcagaatctggtgcgcgatacccatcctgagcgggaactgaacaaagagaaaaccctgggcggcgactga

SEQ ID NO: 445601 - DNA, 2202 bp, Serratia marcescens
atgagctttaacgccaaggacatgacgcagggcgggcagatcgcctttatgcgtctgcggatgtttgcccagattggtaacctgatcttctacggcctgtttatcgcctttcttatcgtggcggtcaacgtcctactgtggcgcatttcgatgcagaacctcaccaacggcctgatttactggtgggtacgaatgctcgacagctggcccagcattacgccttccgagtcggtttatcacctcgactactacggcaagcagctggtctacaccgccagtcaggtcttggccgaccgctatgtcgtctattgcgggcaactggtctggcgtgaggccgtgtttgccgccggcgtgggcgtggcggcttgtgtggtgggcggtatcgtcaccatttgggtgttgggacgtcagggtaagcagcaaagccaggacgaagtcaccgggggccgcacgctgaccgacaagcctgccgacgtcgccaaaatgctccggcgcgacaaccgggcgtcggatatccacatcgacgcgttacccttggtcaaagactcagaaatcaagaacatcctgctgcagggcagcgtggggaccggtaaatcggtcaccatgcgcaagctgatggactatgcgcgggcgcgcggcgacatggtggtggtgtacgacaaatcttgtgacttcatcaaggactactacgatcccaaaatcgacaaggtgctcaacccgctcgatgggcgctgcgtgtcctgggatctgtggtcggagtgcctgacgctgcaggactttgagaacgtagccgatattcttattccgatgagcggcagcgaagatccgttctggcagggttcggcccgcaccatctatgcggaagcggccaaccgtatgcgtaacgatccggatcgcagctacgccaagctgctcaatacgctactgtctatcgacctgccgcgtctgcgcgcttatctggaaggcacaccggcgtcgaacctggtggacggtaaaatcgagaagaccgccatctccatccgttcggtgctgacgaactacgccaaatcgattcgctacctgcagggcatcgagtcgctgggtgacacattcactatccgcgactggatgcgcggcgtgcaggacggtggcaaaaacggctggctgttcctgacctcgaatgatgacagccacaaatccctcaaaccgctgatctccatgtggttgtcggtggcttcacacagtttgctctcgatgggcgtcaaccttaatcgccgggtgtggatctttgctgacgaactgccgacgttgcataagctgccggatctggtctcacttatcccggtgacacgcaagtttggcggatgtttcgtactgggtatccagtcgtatgcccagctgcaggacatttatggcgtcaagtcggccgcttccctgattcaggttctcaacacccgattcttcttccgctcccccgataaagaaaccgcagagttcgccgccggtgaaatcggcgagaaggagcagaaaaaagcctccgaacaatactcctacggcgctgacccggtcagagacggggtgtcgttgggtaaggacaaagagcgcgaagggttggtgagctacagcgatattcagtcactgcccgatctgtgctgttacatcacgcttcctggcccctatccagcgataaaaatgaagctcaagttccaaaagcgcaaccagaaggccccaccatttatcgagcgtaagctcgacctagaggcagataaccgtctggagacagcgctggatggacgtgaactggtgctcggcaatgttagtgcgctcttcgcgccgctggaagagagccatcagaccgtgacagcaccggggaccgccaggataacggacaaaggcgataagaagcctgtcgccgggccggctgacagcgacaaaccggcgatatcgactgcggccaacacgacgggtgccgccacttcaggcggcggtacggaacaggaactcaagcccagggtggaagaggccgagcagttgccgccggggatcagtggcgacggcgaagttgtggacatcgcacagtatgaagcctggcaggcgcagcagcaggccatggggcagcaagccatgcagcgccgggaagagaccaacatcaatatcgacaggcatcggcgcgaactggccgaagttcatcatggggacagcgaaccgggagatgaattctga

SEQ ID NO: 445602 - DNA, 210 bp, Serratia marcescens
gtggctaaagcgcacaacaagaaccatgccaccaccctgcgtctggatgacggcgcattggggcgtctgcagcgcatggtggctgagaatcccttctacaacccctcgcatgtgatgcgtggcgccctgctggcgctcagtcggttgacctacagcgagcgggaggcctgcattctggacgcggcgaagggaggcgttgatgagctttaa

SEQ ID NO: 445603 - DNA, 561 bp, Serratia marcescens
atgctgaagataaagatatttaacggagtaactatggataacactgctttcaaaaaagatatcaaacaattaaaggaatatttgagtcatcaaaatgtggatataccatccttttggagctgtgtctggccaggggtgctgatgatgctgtggataatcttatgtccagtgatagctatgcagatgtacatttacacatccctggaagaattacaggctgtttctggtggggtgtttgtaggtgctatttatgctttcctagtatttgatgttaggtccaagtttttggctatacccaaagaggttaggattcggcttgggtttttccgcatgttgagtgcgaaacttaaagtatattatctcgcttatggggttgttgttgctgctgctgcattctttaccaggtacacaaatttccctgcatttttatacgttgctccgctattaattgccgttgttttatctatgtctattggttttatggacttaagcaggtatggggtatctgtaattgtatcccttttgcagcaaattaaatcccgtaagcagggaggggagtaa

SEQ ID NO: 445604 - DNA, 2835 bp, Serratia marcescens
atggcagcagaaatctacgttatcggcggcggtgactggatgcgcgagaccctcaatgcggtagcggcgttcctgcattccgacagctggtactacatacgtcatgtgggcacactggccggcctctatgtcctgatggtgcagtggatacgcacgcacgacatcatgcatatcctgacctggatttttgtgttgataggcgttgccatagtagtgagcagtggaccgcgggtgcaggtcgtcgatatcaccaacccgcgggacgtctatgtcgtcgataatgtgccgctgggcatcaccctgccggcatcgctgtttacccagttcggcatgctaatggtgcgaggctatgaggtggtattcagtcagccggatgtggcgacctacagtcaaaccggcatgctgttcggcgcttctttaatggcgcgcagcaccgactttaccgcgcaaaacccggagctgaccgacctgtttgccgattatgtgcagaactgcgtgattggcgacatcctgctaaaccgcaaatacagcctgaacgagctgatgaactcggctgacccgtacacgctcatcttcagcaagccgagcccgctgcgcggcctgttcggcaaggacggcaagttcatgacctgcgagcaggcggctgcgccgctcaagaacatgctgggtctggaagggcagaccggcagcccgacctggcattactatgcccgtcagctgttcggcggaaaaccggatgccgacctgctgttcggccaactgctcggcaacagctaccaatatttttaccagaacaagaactcggcctccgacatcatcaaacaaaatgtggtgatgaacggcctgcgcagcggaatactcagctacgcctcgcgcagtaacgacaccgccggcatgctcaatatcgctaccacctcggcgctggagaaacagcggctgtcgcaggccaccatgggccaggtggcgatgcgcatgttgccgaccctgcatgtggtgatgatggggatcatgatgggcgtattcccaatgattatcctggtggggctggtcaatcagggctggcaggtattcaagggctacgtgttcgcctggctgtggctgatgagctggccgctgctgtacgccatcctcaacagtgccatgaccttctacgcccgcaagatgggcagcccggtggtgctggccaacctgtcggtggtacagctgaactactcagacatcgccaccacggcggggtatatctcgatgtttatcccgttcatctcctggtatatcgccattggtctgggcaacgcactgaacagcatcggccactcgttcaacaacgcggcggcaggcgccagcagtgcggcagcgagcaccacgacggacgccaactacagcttcaacaacatgcagtcggataacgtcacaggcagcacctgggataccaacagcgtggtgcgcaccgggcagatgaccaaacagctgggcaccggcggcagccagacccggaccgccgacggcagccaggtgttcgatgctaccggctcgacgtcgcgcattccggtagatattggcgtgacgcgccaaatctcgacggcgcagcagcagatggcgcgtgaagcggagagccaggcagaaacggcgatgcacggctttaacagtaatatcagcagcgcctggacgcagctgtcgcagttcactggccagcgtggcagtagcgatacgatgaccagcggtgccgatacggcgcagaacagccagtccagcatcgccgcgcacaagatggccagcgcggtggacagctatgccaaggccaacaatatcagccatgaacaggcgacaagtgagttgatgcaacgttcaggggatatttcatggggctgggatagtaaaggtggtgtaagagggagtgctggcctaaaagctttggggaatggagttactatagaaggttatggtggcgtcagtgcgggcggtaagcaatcagaccatgactcccactcagccagcagtggttctcgtggtagtcaggatgcacgccacgatcagagtgctcaggctgctgccgacttcaaggaggggatggattatctgaccagccagcggaccagccagtctggcagtcatacggataacaatgcagattctcgcatcgatcagctctcctcatccttgtcgggtgccaagagcagttacgagcagtacagcagcgcgcatacccgcagtcacgaactgtccgagcaggcttcccgtaccgaaagtctcagcgccgatatgcgtgaaaacctgagccagcagtttgctcagtatgtgatgcagcggtcgcctgatgaggccggaaatattttgaccgggcattcatctgaagcagtgtctgcgcgtcagcaactggctcgcgagtttgtacgtgaccaggtggcgccgcaggtggatgcacaatatcaggtcaatcgtgaggggctgggggcgacgatggggtctacagggggcggtggtagtgccggcgacatcaccagcgaccatcaacgccatcaaagtgcggtagacgagcgaaccgcagcggccgggatcaaaagtgatgtaggcgatcaggttaaggggatgattgataataaccacgcagaacaacaaaacttaaaaaataatattgcttctcagaaggaaaatataaatgacgcgcgtggtgtggtgaaaaataaccatgaagtagaggtgcgagatcaaaaaaacaaatataataaagaagtagatgatcaaaaattccttcgggcaagcgaggataaaagtattagtagggcgaaatctcgggcgatgaagtccgcgggtgatgctgaagataaagatatttaa

SEQ ID NO: 445605 - DNA, 1371 bp, Serratia marcescens
atgacacgcaggctgacacagttgtgctgtggcgtggtgatcgggttgtttgtcggcgccgcctcggccgacatgaacagcgacatgaaccactttttcgacaagctggggtttgaatccaacactaccatgccgggtgtctggcaggggcaggccgccggttatgcctccggcggctccatctatgcgcgcaccggggtgcgtcaggtacagctggtgtcgatgacgttgccggatatcaatgccggctgcggcggtatcgatgcctacctgggatcgttcagctttatcaacggcgaacagctgcagcgctttaccaaacagatcatgtcgaacgccgccggctacttctttgaccttgcgctgcagactacggtgccggagctgaaggatgccaaggacttcatccagaagatggccagcgacatcaacagcatgaacatgagcagctgtcaggccgctcagggtattgtcggcgggctgttcccgcgcacccaggtctcgcagcagaaggtctgtcaggatatcgccgggcagtcgaacatcttcgccgactgggcagcatcccgtcagggttgtacggtgggcgggcagggcgaatcggtgcgcgaccgtgccggggagaaggacaaggaacgcgtctccaaaaacatcaacatcatgtgggatgcgctttccaaaaatcagatgttcagcggcaacaaggagctgaaagagtttgtgatgacgctgaccggctcactggtgtttggcgccaacggcgaaattaccccactggcgccgaaaaccaccgaccagagcattatccgggcgctgatggaaggcggcacggcgcgcatctatcactgcaatgacagcgacaagtgcctgaaagtggtggccgacagcagcgtcaccattagcccggaacgggcacttaagggtcaaattctcgacatgctgaccagcatcaagagcaaggcgcgggacgatgtgccgctgaccgaaaaggaaaaggggctgatttccggcacgcatgtgccgttgctgacctacctggtcgacccgcagatgctgggtgtcgataactcgctggtctacagtctggcggattacgtcggctacgacatcatgctgcagtacctgcaagagctgatgagcggcgcccgcgccatgctggcggtgggcaactacccggaggcgacgatggagcaaatcaacagcaacttcactcaggccaaccagctgctggcttcgctgcagtcccgggtgcaggtgcagaccgatgcgctgctggttgttgaccagcagatgcgttacatgcgccagcaggtgtcggcacgcatgctgacgcgttatcaggacaattatcgtttcgggggaggtcaataa

SEQ ID NO: 445606 - DNA, 555 bp, Serratia marcescens
atgcgccaacgcactgagcgaatgatgatgacattactggcgctgctcggcctgggcatgtcgacggccaacgcgagcacgcgcgatgagattgctcagctgcagcattcagcgcagcagcgggcacaggcgggaacggcggccgatagccgcgccgccgcccctcaaccggcacggtggctgacactcagcaacggggcgcgcgtcaacctcaatgactggacggtggtgctgttcatgcagggacactgcggctattgccagaagttcgatccgcttatcaaggcaatgtctgcacagcacggcttcccgctgtttgtctacaccttcgacggccagggcgaccagacgtttcccgaagccattccggcgccgccggacgtgatgcgcaccttcttccccggcctgccggtggcctcgccgacgacgtttttggtgaatgtgcatacgctggcgacgtacccccttatccagggggcggcggatgaagccggctttatggcgcggctcgatacggtgttgcaagacgcaacgatgcggggaggtgcacgatga

SEQ ID NO: 445607 - DNA, 315 bp, Serratia marcescens
atgcgtaaattcaaatttccccaggttgacgttgccggcatgtggatggtcgggctgggtttgtggtgcaacatgatagcgggctgcgtctggtctttgcctgattttgcctgggggctggccaagctgttagccgtcagcctgatagttatcggcggctatcgcattctgaatgctattgcgacccgcgtggcggatgaaaggctggcacctgagaaggcggcctatcgtgcgcagcatggtgatactgaaagcaccgatgcgtcgcgggcggatgaacctgttcaggagaagccccatgcgccaacgcactga

SEQ ID NO: 445608 - DNA, 795 bp, Serratia marcescens
gtgaaaacgcgcgggacttcaaatgtcaatttggcggcacgcgggttggccaaccgcagggcggcagcgctgttgggcctgagcctgcttggcgcggcgttcaccgcgcaggccggcggctggcagtggtatgaacgggaggccaaccccgctgacgacgatatgccacagcaggctgtagccccggccgctccggccggcgcactgcaaaagttgcagctgctgcagcagtcgctcaaggagcggctggcagacgccatcctgtaccccagcacggagaacttcgtgaagttcttccagatgcagaactacttcacccagcaggcggggctgtttgagcgctccgctcagcgcgcgttcctggcgcacccggagctggattacaacctgaaacacagtcattacaacggcacggtaaagagccagttggcggccgatttcgctgcccagcgcgaggccatcggccagctggcgcagcgttatggcgtgatgctgttttatcgcggcgccgagcctatcgacggtcagctggtgagcgtggtgaagggctttcgggatagctacgggctgtcggtggtgccggtgaccgttgacggggtggttaaccctgcgatgccggagagccggcgtgatgcggggcaggcgcagcggttgggtgtcagtcacttcccggcactgatgctggttgatccgcgcagcggggcggtcaagccgctggcctacggctttatcagtcaggacgacctggcgcggcaattccgcgacgtgttaaccgatttcaaaccgaactattaa

SEQ ID NO: 445609 - DNA, 675 bp, Serratia marcescens
atgacgacatacagcaaggcgatagggctgctgacagtgctcctgacgggggcaaccgtaccgatgatcgctgtcgggcaaacggcggcagatcctgttgctaccgcacagcagcaggcgaccgtccaggtggacagcaaccgggcatggctgcgcgagcaggaaaagcgctcggccgaactgcacaaaaacgcaccggtgccagagttcctgcgtaaccagtcaccgcgttcgctggcgcaggacgaccagtcctttattgaccagctggcggcaaagcagcgtcaggatgcaacagaacaaccggccgagggggcgctgtacttcgtgtccttcgctattcccgaggaaggtatgcgccgcatgctgcaagaggcgcgccgcttcggcattcctgccacgttgcgcggcatggtgaatggcgacatgcgcgaaacggtgcagcgggtgcaaaaactggtggaagccggcggcatcgacggcgtgcaaatcgacccgcagccctacacacagtacggcgtgaccgccgtgccggcgctggtcgtgcgctgcgcggccggcttcgatgtggtgcgcggcaacctgctgatggcgcaggcgctgaagaaggttgccaaagacggcgactgcgcggctacggctcaggcgctgctggacaaggagagcggaaaatga

SEQ ID NO: 445610 - DNA, 378 bp, Serratia marcescens
atgtttgtgacacgtaaacgttttattgcgaccgagaatcagctgcagagctgtcgccaattgctggccgcgtgccacggcgagttgatggccatccgccaggcggcgtcggcaaagggggggatctacaaatgcattcttgagtgccgtgaggtcgcccacgagctgcgtgaacagctgcctgccgaacaggacggtcatggccattatctgttcgacaagctggcgcttatcgatagcttgctgagcaccctggctgcgttattgccgccgcaggatgaggcacgtcccaccgcccggatggttgccgccggtgatgtgcaagagatttaccggggaacgcagtgggcgacgcattgccaggagcattgcgtatga

SEQ ID NO: 445611 - DNA, 636 bp, Serratia marcescens
atgcgcgttgtctgcctggtgttctccttatcactgctgccttgcatggcggtggccaaagacttcggcacctggggcgacctgtacccggtcgccgagccggacatgctgcagaccattcacgaacggctgaccgaattgcagcgcagcggccgttgggatgaggaaatgacggcgttcaaagagcgcaccgtgaagcacagccagcggcctgagccggtcgccggcatcggcaagaccgaacgctatgccgaacgcttcttcgatccgagcgtgcagctctcttctgacctgaaagacgacaaggggcgtgtgtttgcccgcaagggcgacgttatcaacccgctggccaccgtgccgttcgcgcagacgctgtatttcatcgacggcgacgatccgcagcaggttgcctggatgaaggcgcagcagccagagaccctgatggtgaagatcattttggtcaacggcgacgttcccaaaacctctgccgcgctggacagccgtatctacttcgatcagggaggggcgctgtcgcgccggttcgggctgacgacggtgccggcgcgcatcacggcggcgccgagcggcctgcggctgcgtatcgaatccattcctgccgccggcagcacgaactga

SEQ ID NO: 445612 - DNA, 939 bp, Serratia marcescens
atgaatcgaaatctccgagatagggtgtttttgctggcggttattgctctattccctgtggctgccgccattgttgcccttcaattcttaccggcgaagaacaagcagccagaggccgcgacgtcgacgcccccccaagttcactgggagacacctcgactgcgtggcatcgattatccgccgacgttaccgtccgttaacgccttgcccgagccgagtccggtgtttactccggcgcagcaggaggccatcggcccgcttgcccgcgattacctgctggcgcacccggaaatcctgatgcagatgagcgagaagctggaggcgcagcagcaacgggcagccgatcgcacggtgcaaaccacgttgaccacgcagccggaactgcaggcagcgttattgcacgatccggcgacgccggttgtgcatcctgacggggctgtgaccgtggtgcagttcttcgactatcagtgcatctggtgcgcgcgtatggcgccggttgtggctgagtttgtacgagacaatcccgatgtgcgtttcgtgttcaaggaattccccattttcggcagtcgctggccgatttcggtgcaggcggcacgtaccggcctgacgctgtggcaactcaagggcggtgaggcctatctgacctaccacaatgcggtgtttgcctccggtgagaacgaaggtcggttgtcgcaacctacgcttaatgcggcactcctggcggccggcgccgcgccgatgaccgtactgcccgagacggagaaaacgctgctggccacacgtgaactggcccagcagctgaatatcagcggcacccccgcctttattgttatgccgacccgtgatgcgcgggcggagcaggtgacgccgctgtacggcgccgtggatgtgaaggcgttgcagtctgcggtcgcacaggcaaaagcaggaggccactga

SEQ ID NO: 445613 - DNA, 234 bp, Serratia marcescens
atgaacctgagtgttggcgccaggctgctggttcttggcgtggtcgtggtgtgctgggcggcgctgtactggccaaaagataacgacgcacgccaaaacgcgtttgttgacgtggctcgcgagtacctcctggcacacccggaggcactggcgccgatgtgcaagacattagaaatacggcagcaggggaacatgaataaccccgctaatgcagtgaaaggagttcaaccatga

SEQ ID NO: 445614 - DNA, 429 bp, Serratia marcescens
atgacaggcactgaactgcaggtgattgagcgggggaacgcgggcggacaacggtcagaccgccggctggcgctgtggggctgcggcgcggtggtactggccgtgctgctgagcagcctgatggcgctgtggctggtgcatcgccagcctgtgattgtcaccttcaacatgaagcagaccatggaagcgttctacgagagcgccgggaaaaaggccctgcccccggaacaaagcaaacagctggcagaacggtttaccggtgcgctggaagccagtatcacgcactaccagcagcgcaacaacgtggtcattctggtctcgccggcggtggtgggcggggcaaaagacgtgacgcgcgaactgcagcgggatattgcccgtcgcatgcaggggaatgctgccgtgcgtcaggaaggaggccatccatga

SEQ ID NO: 445615 - DNA, 2631 bp, Serratia marcescens
atgaatttgctcgacaaggtcacccatacggcaaacagcctgctgtcggcgctaaaaatgcccgatgcgtccagtcaggctaaccagctgctcggcgatatgcgtttcccgcagctgagcagcctgttgccttatcgtgattatgacgaaagctcggggctgttcatcaatgacggctctatcggtttcatgctggaagtgcagccgctgaccggcgccagtccgaccgaggtgctggccatcgagagcctgctgcgtaccaaactgccgcgcggcgtaccgctgtctatccatctgatgtccagcaagcgcgtgggtgaccacatcgagtccggcctgcgtgatttctcctggtcgggacgggatgccgacaagttcaatgccatcacccgcgccttttacctgacggcggcggaagaccggtttgcgctgcccctcggtgtcgatattccgttgaccctgcgtaattaccgggtgttcatctcgatgtgcatcaaggccaggcgcaataacaaggccgcctttttacagatggagaacctggtgaaggtgctgcgtgcgtcactgatgggcgccaagataccttcctggccggttgatgccggcgcctttatcaacgtggtcggcgagatgatcaaccacgaccccgatcagttgtatgacacgaaacgcacgctcgacccctatcaggatttgaactttcagtgcatcgacaacggcttcggtatgaacgtttaccctgactgcctcaagataaacttgcgcagtgcgggccgtgagaacgagagcgtggcacgggtgatgaatttccagctggaaaagaacccagatatggcatttttgtgggccagtgccgacaactacggcaacctgctgaaccccgagttgtcgatcgcgtgcccgttcatcatcacgctgacgatggtggtcgaagagcaggagaagaaccagttcgaggccaaccgcaaatacctcgacctagagaaaaaatcccgcacatcctatgccaaggtgttcccgaacgtggtggcggaagccaaagagtggggggagctgcgcgaggcgctgtcgtccaatcagacggcgctggcctcttacttctacaacgtcacggtgttttgcgaagacaacgataacgtggcgctgcgctgtgagcaggatgtcatcaacacctaccgcaaaaacggtatcgacctgatcgccccacggttcaagcagcactggaatttcctggcctgcctgccgttcatggcccatcacggtgtgctggatgacctgcgcaaacacggcgccgtgcaccgggccaagacgctgaacgtggtcaatctgatgccggtggtagccgacaaccgtctggcaccgtccggcctgctggcccccacctaccgcaaccagctggcgtttatcgatatctacgccaaaggtatgaaaaaccccaactacaacatggcggtgtgcgggacgtccggcgccggtaaaaccggacttattcagccgatgatccgcagcgtgatcgacgccggtggtgtggcctgggtgtttgatatgggcgccggctacaaatcgctttgcgagaacatgggcggcgtttatatcgatgctgagtcgctcaagttcaatccctttgccaacatcgtcaacattaatgaaagcgcggaacgcctgcgcgatcagctgtcggtgatggccagcccggacggcaacctggatgaagtctccgagtccctgctgctgatggcagcgaaagcggcctggctgtccaaggggcgttcggcgcgcatcgatgacgtggtggattttctgaaagaagccatggatgccgaggagtaccgccagtcaccgccgatccgcacacgtattcatgagatgaccatcctgctcgacaagtacacccgagggggcattcatggcgagttcttcaactcggacgaaccgacgctgcatgatgacgcccgcatggtggtgctggagatggggagtctggaagaccggcccgatctgctggtcgccgtgatgttctccctcatcatctttatcgaaggtcggatgtatcagacgtcgcgtaagaccaaaaagctctgcgtcatcgacgagggctggcgcctgctggactttgagaacaagaaggtcggcaagttcatcgagaaaggctaccgcgtggcccgtaaacacggcggtgcctacatcaccatcacgcagaacatcaaagactttgactccgaagaggcatcgagcgcggcgcgggctgcctgggccaactcggcgtacaaagtcatcctgatgcaggaggcgatggcgttcaaaaactacaaccaggagtacccgaacaatttcagtcagttggaacaggacgttatcaatcgcttcgacgatgcggtggcgcagggcttcagctcgttcctgttgatggtgaatgggcgcagttcctggcaccggctgtttgtcgacccactcagccgcgcactctattcgtcgcgaggggaagactttgagtttatccagagccggcgcgcgcagggaatgtcggtgcacgatgccgtttacgcgctggcctgccaggagtttggagacgagatggcgcgactggagcagtgggtcgcgcggcaggctaaccggaggatggcggcatga

SEQ ID NO: 445616 - DNA, 1173 bp, Serratia marcescens; identical to SEQ ID NO: 14203

SEQ ID NO: 445617 - DNA, 1134 bp, Serratia marcescens
atgaccgacgatttcagtagccgctggcaacagctggactgggacgacattacgctgcgcatcaacggcaaaacggcgcgcgacgtggaacgcgcattgaacgccgacaagctgacgcgcgacgactttatggcgctgatctcccccgcggccgcgccgtatctggaaccgttggcgcaacgcgcgcagttgctgacccgtcagcggttcggcaacgtcgtcagcttctatgtgccgctgtacctgtccaacctgtgcgccaacgactgcacctactgcggcttttcgatgagcaaccgcatcaagcgcaaaacgctggatgcggcggagattgcgcgcgagtgcgaagccatcaaggcgctggggttcgaacatctgttgctggtcaccggcgaacatcagaccaaggtcggtatggactatttccgccagcacattccggcgatccgccgccacttcagctcgctgatgatggaagtgcagccgctggcgcaggaggaatacgccgaactgaaaacgctgggcctggacggcgtgctggtgtaccaggaaacctaccatccggccacctatctgcagcaccacctgcgcggccagaagcaggatttccattggcgcctggccacgccggatcgcctggggcgcgccgggatcgacaagatcggcctcggcgcgttaatcggcctgtcccacagctggcgaaccgactgctatctgctggcggaacacctgttctacctgcagcaaacctattggcagagccgctactcgatctcgttcccacgcctgcgcccctgcgccggcggcattgagcccgcgtctatcatgagtgagcctcagctggtgcagctgatctgcgccttccggctgttcgcgccggacgttgagctgtcgctgtctacccgggagtcgccgtacttccgcgatcatatgatcccggtggcgatcaatagcgtcagcgccggatccaagacgcaacccggcggctatgccgacgacgtaccgcctgagctggaacagtttgagccgcacgacggccgcacgccgcagcaggtcgccgaggccatcagcaacgccgggctgcagccagtgtggaaagactgggacgattatctgggacgcagcgcgcaataa

SEQ ID NO: 445618 - DNA, 582 bp, Serratia marcescens
atgttcgaaatgtcaaatgaagcacaaaccatcaaggtttataattttctggctgatacaaaagaatttattggcgtcagcgattgttatattcctcccggtactggcctccccgcatactgcaccgatatcaaggtaccagaagctactgagggtagtgtcgcttgcttcgataatgatgaatggttactaaaagaagatcatcgaggaaaaactgtctgggataaaacaactcgaagggaagtgctcatagaacaactaggccccattccagaaacctttacacgcctaaaacctacgtctgattttgatgtctgggatggcgaaaaatgggtcaaggacgagaaggcagaaagaaaggcacttgtatctgatgccgagaatcagaaaatctcacttttgcgtaaagccaatgatgtgattactccattacaagacgcagtggaactggagatggcgtcagacgatgaacaaaaaaagctcaccgtctggcgaaaatatcgtgtgcagcttagtagggttgatacaagcactgcccctaatgtggcatggcctgagtcaccaactgagtcaccaaactag

SEQ ID NO: 445619 - DNA, 564 bp, Serratia marcescens
atgaagatgaaaaatgaccgttttgtcacattaaagagatgtttacacagtgaagttatagggttagagaagccattctcatggagaaggctgattcaccgggtgatttgttgtccagaccgtcggtttatgttttggtggcgtatagctaactatttgtaccactctggctcaaagaacaaacgcaagatagccaaaaaaattgagtataaagtccggctaaaatatggacctgaaataggtttaggggcaatcattggtgaggggtttggcataccacatgcagccggaattgttgtatctgatcgttgtataattggaaaaaattttcgtattagacagaatacaaccatcggcgtaaaacgcggtgataccactggtcatattaatatcggcaacaatgtcaatgttggttgcaacacatgcattatcgccgacaacataactatcggcgataatgttaccataggtgcaatgtcatttgttaataaagacataccagacaatgctgtatatatcaatattgttacaccatcgataaagattgtagatacgcaaccatag

SEQ ID NO: 445620 - DNA, 759 bp, Serratia marcescens
ttgagcaatccaatcatcccatgggtaggtggcaagcgtcgcttggcgaagcacttactacccttgtttcctgaacataaatgctatgttgagcccttctgcgggggagctgcactatttttccgcaaagatgcatcaaaagttgaggtaatcaatgacatcaatggtgagttaatcaacctgtatcgagtagtaaaaaaccacttagaagaatttgttcgtcagtttaaatgggcgctaagtagtagacagctatttgagtgggagaaggcaactccggttaacgtattgactgatatacaacgggcagcacgcttttattacctacaaaatatggcattcggagcaaagattgaggggcaaacttttggaactgcgacgactgctccagtcggtgttaatctgttacgactggaggaaaacctctcagcagctcacctgaggcttgcacgtacaacgatagaacatctgagctggcttgaatgtatagagaagtatgatcgtcctcataccctgttttatcttgatcctccctattggggcacgcagggttatggcgttgagtttaggctggatcagtacgatgccatagccagcatggcccgcacaatcaaaggcaacatgatcatatcggtgaacgacattccagaaatgcggcaagcgttctccggattgcacattgaagcagtcgatctcaaatattcaataggtagtaaccgctatcagggaaaagagttaatcatcagaaactttgactga

SEQ ID NO: 445621 - DNA, 219 bp, Serratia marcescens
atgtatctctgcgttagcggttgcgaataccaggataacggcgatcggcgcatctaccacctgaccgataacagcaccgtggtggagtgcccgaagttgccgggtaaatcccggttcaagttctacgacaggcataaccgtaccgtctacgccagccaggccaaaacggcgatgaaaagcgccgtcgaacgccataaaaagcagtggagaattcaatga

SEQ ID NO: 445622 - DNA, 189 bp, Serratia marcescens
atgaaaaatagcatcgtaattacaggccgtgcattcgttgaatttcgccgcgcaataagcggtgtcgataacgaagaaactagagcgattgtcaacaaccacgagttggcagcgcatcaggttgaacttgagcattgccataccattgttgaaatcaacgatatcgacattgaggtaaatccacagtga

SEQ ID NO: 445623 - DNA, 525 bp, Serratia marcescens
atggctaccaaaccaaagcgtattaaatccgcagccgctgtttatgtccctcagtcaaaagaggatgtgatcggtgatatcaagaagattggcgatctgcagcgtgagctggaacgcacgcagacggtcatgaacgatgctattggtgaaattactgagcgacatgcgccggcgatcgagtcgctaaaaaaagatatcgacctgctgagcaaaggtgttcaaggctggtgtgaagcgcatcgcgatgaactaacgcagaacggcaagaccaaaacggccagcttgatcaccggtaagattgaatggcgcaatcgtccaccgtctgtcgcagttcgcggcatggatgctgtgcttgagacgctccgccgcctgagtcttaatcgctttatccgcaccaaggaggaaatcaacaaagaagcgatcctcaacgaaccgagcgctgtcagcggtgtggcaggaatttcggttaaaaccggtattgaggattttgccattgtgccatttgaacaggatgcgggggtgtaa

SEQ ID NO: 445624 - DNA, 291 bp, Serratia marcescens
atgcaagccagtgattttgataacaacgcgaatgcgtcattaatctctgcaatggtacgagctgaatccgtcattttgtctttatcagctcgcggtattacggtgcaaagcattatgtttcatggtggcaatccggttattcgcattaaccgtcatgcgtattgtgaacaattgacccgctcaggcaaagccagttacctgcattttggtaacggtcgccagggcgagtttaaacaaggcgttttcgtccaggacggatgccgggttatttggtctgaatcactacattaa

SEQ ID NO: 445625 - DNA, 366 bp, Serratia marcescens
atgaaagctaaagagatctcaacgcgagattattgttcgtcgggcctgttagcaagcggctttaaggttgaggacgttaccgcgttaacgcaatttttagatgcgcccgccaagagcctgccaatcctggacgagctggttcatatcaatcagctgaaaatggccgaggccttaagcctgcatggcatcgtgagtaacttacgacgcctgacccaaagttccgatcaccaggccgctgtttccgctgtgggattgctgatgcatctgtcgcaacacctgggaattctcagctttgagattagtccagaccttggtgctgcgcatacaaacggacaagggggagaagatggccaaatcagcgactga

SEQ ID NO: 445626 - DNA, 648 bp, Serratia marcescens
atggggttgcagggtctcgatgcgcagcagcttatccgcgtggggaatgatggcacgcgcgggaacgggataccccagcgccgccgaccgcttgaccagctcggtgcgcaggaactcctggaactgcaccgactcgatgccccagatcaggcagcggtattcgatgtgcaggtcgatgatgtcgctgattatcttgtccggcagccgtttgcgaatttgggcctccaccacgtccagtatgccggtcgcgcggttgaaaccgcccaccagaagcgccgacgggtcacggctggccccggccttgcccaggctggggtcgcacacgccgtaaaacagccattcattgagacggttaacccagaaatgaatgcaatgggcgaagatcgcgccttcaccgctaaccggatcgttctggtattcagagtcgaaggtgccatggccgtcacgggcacggataagcatcaacgccagcagcggacgcgccgaccaggacaccacagcgccttcgttcatctccacctggtgcagggtgtagaagtcgttggcagcatcctcgccgtcgttgcgcaggatctcctcccagctgtcccacagcgccatattggcgggccactggcgcagggctttaaagcgcgcatgacgccatag

SEQ ID NO: 445627 - DNA, 1848 bp, Serratia marcescens
gtgctggagcagcctggctgtaagtctgtcggcctgccggtcaagcgtaattcagcggttaaaccgcgtgaagaactggagatcatgcgccagtgccccgcactggtggagcgtgaggtctccacgctgaccgacgaccagaagagagtcgccgatgcccgtgccctgctggcgcaggaagtggagaaactgcgcgccgccggtatgtccagaatcgcggcggtgacattcatcgccgacggttcacgccagggaacgttgcccgcacgggtcatggtggcggctggattggccaacgcccgcaaaggctccagccgtgttggcgtcagcaaaagctgcctgcaggagtggctgaccatttatctgaccaccaagccaggcctggagcggttggcgttattggcacccggtcagcctaaacgcaagcgcccggaagacgtggtctggttctacggcatgttctggccgcactacagcaaccagaacggccccagcgtcaaagaggcttaccgttcgttcaagcgcgaatggttcgagacgtacagcgaccagcccgccatgctgatggcgctgccctcgtatgacgcggtgatccgtttggtagataagctgccattgcgggagcgtatgcgcgggcgagtgacggggtcggcggcaaaagcctttgaagtttatcagcagcgtgactggtcacaaatgccggttaacggttgctggatctcggatggtaagtcgctgaatctgaaagtggcgcatcctatccatggcagaccgttcacgccggagctgacgttggttattgatggtcggacacgttatatcgtcggctggagcgtttccctggcggagaacgccatcgcagtggccgatgcctaccggcacggcatgaagcaccacggcaagccgctgtttgtgtattccgataacggcggcggggaaaccaacaagatgctcgatgcggacattaccggtatttttccgcgcttgcacatcgagcatatgaccggtattcccggcaatccgcaggcgcgcggtatcatcgaacggctgaacggcgtaatgcctgaccgactggccaagcgtttcctgacctacaacggtatcggggctgaccctaacgccgtcaggattcgcgggcaacagatgctgagtctgtctaacgccttacgggatggacgtgaactgaccgcgcagaacaagaagacgttgaaaatactgccaacctggcggcaattgattgacgccgttcaggaggagatcgacgagtacaacaatagccacgagcacagcgaattaccgaaggttaacgggaaatggatgtcgccagcagcttaccgccagtgggtactggagcaggaaggtgacgacatcgaatacatgacggatggcgaattgcgcgaaatgtttatgccggaagttattcgtgttgcgcagcgtggctggatagcgctggagaataaccaatatttctcgaaagaactaataaacgttgatcggcaggaagtccgggtggcctttgatattcatgatccgaatgaagtcattatccgccaaatggatggcacctatgtttgtaccgccatctggaacggtaacaccgcctcgccggtgccggtggccaaagtccagaaagccctggaagagcgcgccaaacgtaagattaaactggctgagaccaaaattcaggatgcggaggacgaactgcgacccgctctggagcataaggccgacactgatttcagcaagttcattccggcggaatcagagccggagcgcataagcagcaaaccctacttattcgaatccgaatatgaagatgatttaaaaaagtacggtaatcaccgttaa

SEQ ID NO: 445628 - DNA, 438 bp, Serratia marcescens
atggcagctactacccaagaccgtaataccccgtaccgcgacggcgaattaacgccgatccccgttgccgccaaggagaagatccccgctggcgtcattgtctgcatcaatgcggaaggctacgccatcaacggcaaagaagcccctggcctcatctatgccgggcgttccgatgattcggtggacaacaccgacggcgagaacggcgatcagtacatcctggtgcgcagccataaggcgttctgttgggagaacgacggcagcatcacccaggcgcacctgggcaaacgggcctgcgtgctcgataaccagacggtgacggcggacgacggcagcgccccggcatccggggacggcaaggcagacgccacggcggcgacccgttcccaggcgggcaccatcatcatgatcgacaccgacggtgtctgggtctactaa

SEQ ID NO: 445629 - DNA, 1065 bp, Serratia marcescens
gtgaaatcaccgttacgcctcgccgcgctcagtgtcgtcatcgaaaacgccgggccgcgtgtgcagctgtttcctgccggtgcctttcgtgccatggacggcagacctgacgatatcccgcactggtatatcgatgccgccctggcgcaagtgctgatagacgtggcggcccagcgtaatacgccgtactgcttcgactacgaacaccagaccctgcacagcaagaccaacggcaaacccaacccggcagcgggctggttttctcgcctggaatgggtcgagggcaaaggcttgtttgcggtcgatgtggaatggacggaggccgctcgcgccatgattgaggcgaaggaatatcgctttatttctccgctgttcaattacgacgcccagggcaacgtgaagcattttattaacgccgcgctgacgaatacgcctgcgctggatgatatggaagcgctgcttgcggcggcttctcaacaactgacgggagagaacaccgtggacgaactgttagagcaattgcgctggatgttgaatctgccgctgtcctcgacagaggacgacatcaaaatcgagctgcaaaagctgattgaccgcctgtcggacaaccagggcactgcagcggccagcgtcaacctgctggagttgctgactcagaaagatgagcgcattgcggcactgtcagcgcagacgacggataacccagacccggccaagttcgtacccgtcagtgtgctgacctcggtacagcaacagctggcggcactgagccagaaagtgaccggcggcgaagtaaacgggcttatccaggccgccctcagcgatggccgcctgctgccggatatgcaggagtgggccgaaacgctgggcaataaagacattgcctcgctgaaggccttcctggacaaggctccgaaggtcgcggcgcttaacgcgatgcagaccggcggcaaatcgccaaccgatgtcctggacaagtccgggctggatgccgacgccctggcggtgtgcagcgtgttcggccatgacccgaaagacgtcgccgcgttatcacaggagatttaa

SEQ ID NO: 445630 - DNA, 306 bp, Serratia marcescens
atgcatgaacgcttagcggcattgctcacttgggctgacaagcattatgacttgattgttattgatacgccgccaattttagctgtgacggatgcggcgattatcggtggctatgccgggacaacattgttggttgccagatttgagcaaaataccgcgaaggaaattgaggtttcgatcaagcgctttgaacagagtggtgttgtagttaaaggctgcatcttgaatggcatggtgaaaaaagcaagtagctactatggctatggctacaatcattacggctactcttattcagataaaaagtaa

SEQ ID NO: 445631 - DNA, 258 bp, Serratia marcescens
gtggacaacaccgacggcgagaacggcgatcagtacatcctggtgcgcagccataaggcgttctgttgggagaacgacggcagcatcacccaggcgcacctgggcaaacgggcctgcgtcctcgataaccagacggtgacggcggacgacggcagcgccccggcgtccgaggacgggaaaacaaaggccacggcggccgcccgttcccaggcgggcaccatcatcatgatcgacaccgacggtgtctgggtctactaa

SEQ ID NO: 445632 - DNA, 216 bp, Serratia marcescens
atgttggccatcggtttgaacggcatgggcgatcctctttttaagctgttgttgggtggtggccagttggcgctgtgcggcttccagactcaggctcaacaagcgcgcctgttcggccagctccgcctgtttggccagcgcggcctgcagcacggcctgatttttctcggcaagctggcggcgctcggtgtcccagtcggactgctggcggcttaa

SEQ ID NO: 445633 - DNA, 189 bp, Serratia marcescens
gtggtgggtgcctttgtcgtcagttccctggtgctgctgtggtgcgccttcacccgccagattaatgacctgctgttcggggcatatctggcggcctgggtggcgcagaatcaggcgtcgaagttcgccgccctgaaacgttaccgtgaggtgcccaaagatggcaatcgtcctgacaacgctggctaa

SEQ ID NO: 445634 - DNA, 276 bp, Serratia marcescens
atgtcttctattgacagcgacgccgacaacaacatggcggtggttggcaccaacgtggtgtatgcgcgtatccataacgaaggcggaacgacacgcccgcatgtgatccgcccgcgctacaagcaggcgctggctttcaacggtcgggtggttaaaaaggtcaatcaccccggctcggtaatcccggagcgccgcttcctgagtctgaccgacgacgaccacaacacgatccatcacaccatccaggactacctggacagcgcgctggacgattag

SEQ ID NO: 445635 - DNA, 372 bp, Serratia marcescens
atgccgacgccgaaaaaaggccaggcgctgctgcagcctttgaccgcaagcccgctcggtacagtggggttgggtcaatcagccgccctgacgcggctggcggcgctggcgtctaccggcacgatggtggaaaacgacccggtgcaggtcgccatcgacgatgccccgccgtcggtggcaaatcacgtcggccaggcgatgagcgtcatgctgtcaccggcgctggcggctctggaacgggggcattcaccggatgaggcaatggccatgctggcgacggcctacccgcagttggacgatggcgagctgcgccaactgattgcccaggccattttcgtggcggacgtgtgggggcgactcaatggccgttga

SEQ ID NO: 445636 - DNA, 1029 bp, Serratia marcescens
gtggtgctgaacgtggccgacagcagcctggaatacggccgccgcgaaatcctgagccgcgataccctgaccaacgatctgcgctacaccgccggctccgcgctgtatccgttctcgatttcgctgttcggcccgcagatcggcatgctggcgctttccgcactgccgcgccatattccgctggcgctgctgatcagtctgttggcggcctatgtggtctatctgctcaccgccaaccgcatgagcctgtcttaccacatcggccatgccatcacccatcgcgagttccgtgtctactgccagccgatcatccacagcgataccgggcgctgcgccggcgtcgagatgctgctgcgttggaaaaagaaacggcaagggtggatctcgcccgacgtgtttattccgctggccgagcagcatgagctgatcattccgctcacccgctacctgatgagcaccgtgacggaaaatctgcagctgttcccgccccggccgtcgttctacatcagcatcaacgtcgccgccgagcattttaaaacgctcaatatcatcgacgatatccgccagatctggctgccggcgcacccgatgccctcgctgatgctggagctgaccgaacgcaccgcgctgtcggcaattcagtatgaccagatccgcacgctgaaagacatggggatcatgctggccatcgacgatttcggcaccggccacagctcgctgagctacctgaagaacctcagcccggacgtcttgaagatcgatcgcgggtttaccgccgccatcggcaccgacgcggtcaacgccacggtgaccgacaccatcattacgctggcgcagcgcctgaagctgaaactggtggcagagggggtggaaacggaggaacaggccgactatctgcgctcacgcgaggtcaatgccctacagggatattatttcgccaagccgatgccgatccacgttttcccgctgtggttgcaacagtacgaatcgcgcgtcaggaaagcggaagaggatccgccggaggcctga

SEQ ID NO: 445637 - DNA, 549 bp, Serratia marcescens
atgagtaactcttcggatgaaatttcttttctaagtgagagcaaagaaaccatgaaagatcgtctgttacagctgataggtacgcgctctagaaggcaagctgcggaggattgggggatcaagtacgctacgctaaacaactatttgactgctcgggaatcgctgccgcgaccaaatgttgttaagcagattgcagatgcagaaggtgtggattcaaactggattctatatggggcgtctaactcaaataaagagaccactagcggcacccctctgaatgctaacgtccagttcatttgcgacatgatgtcagttcttagtgagagcgaaaccgagtccctgagaaatgtgcttattcgagaggggattaagaccttgttggctctgaccgaagaggataacttgcatctgataaacctgaatcagaagcagaaaaaggcagcgctgatgctcgaacatttgagcgaggagagggtcagagagattttgcaaggggatgcgccgagcacaacaacccccactgtgaatatagcgaattcaaaaggctaa

SEQ ID NO: 445638 - DNA, 249 bp, Serratia marcescens
atgatgaaaagaaatgaagtggcgtgtgctgattggcaccgtgtcgacatcgttgccgccctgcataagaacggcaccacaatgcgtgatttgtcccgtaaagcgggcctagcagccgatacattgaagaatgcattgacccgcccttacccaaaagcggagcggattattgccgccgcgattggccaggagcctgcaatcatttggccaagtcgttattccgatcaacagcaacagaaggtggcgtag

SEQ ID NO: 445639 - DNA, 2040 bp, Serratia marcescens
atgtttctctgcgtgaatgagctgatcggcttacctgggatgcctgggactgcgccaggggtgagagctgctttgaataagcgtgctggcacttcacctgatctgaaacaaaaacgcgctggcaccaaggctttcgaatatcacattgactgcttgccgacagaaactcaggcagcagtacgtgaacaacattttaatagccttttaaaggtcgatgaaaagcccgttacagttgcccgccaggcgtctatcagcgccaatgaccagttgcagatcctgcgcagttgtcctgcaattttgcaaaggaaaaccgcagagttaacggccgagcaacgtgccgccgctgatgcccgttcccagatagtggatcaagtgcttcgtctggagcgcgacggtttgtcacggattaaggccatcaatttcatttgtgaccggtcacgtaaaaaagaactgcctaaccatctgcaatctgctgttgatatagccaatgcccgtaaaggcaaccgtgttgggattggctctcgtaccctcaatggctgggtggttgattatctgagagctgctgatggcgctgaacggctggccctgctggctcctggctatcaccggccaaagcctgttgagtcgattaactggatgccgcttttcatggccaactatcggacgacgaacggggtttctatggctgaggcttatgagggcttttgcgctgactggaaaactcaatatgcagatcaaccggccatgctcgcggcagtaccgtcaatttttgccgtgcgccgcgcaatggacaaaatgccgctggttgtgaaacaacgcgggcgagtaaccggttcggcttatcgtgcgttgcaaacatatgttaagcgtgactggtcacagatgccggttaatggcgtgtggatcggtgatggtcatagcatgaaaatgaaggtggcccatcccgatcacggtagaccattcacaccggagattaccctggtgattgatggccgcacccgctacgtggttggttggagcctgagtctcgcagagaacgtgatagcggtcgccgatgcactgcgccacggtatggaacggcatggcatcccattactgtattactcggataatggctctggccaaacggcaaaactgttggatgctgatatcaccggtattctcccccgccttggggtcgatcacccaactggtattcctgggaatccacaggctcgcggcatcatcgaacgtttgaacaaagagataccggcaagaattgccaggaaatttgccacatataacggcaaatctgctgatcgggaaaccgtccgtttaaccagcgtcggcattaactctgcgctcaccgcgcaggggaataataaagagctcaatgatgtccagaaacgcgccatcagcaaactgccgtcgtggaatcagctgattgatgaaatcgaacaggaaattgaccgctataacacccagcaccgccatagcgaattgccgcgtaaaagcgatggccgtcactatacggcggcggaataccgggccgagctgttggttgaagaacctattgagcgcctgtctgagttggagctgcgtgacatgttccgcccaagtgtggtgcgtgtagctcagcgtggatggataagcctctataacaataactatttctcggaagaactgatttatgtcgatggcgaaaatgttcgcgtcgaattcgatattcataatgctgaaagcgtcattattcgtcgtctggatggttcttatgtttgcacggccatatggaacggtaacacccgtgctgcattccctgttgaatatatcgagaaagtgaagaaagaccgccatagccgccgcatggcgctggtgatgaacaaagccgatgaaatcaatgctgaactgaatccactcctcacagcggaggcagcccctgattacagcgctttattgagtggttttcagcctgttggtaatgaaccggaaccgatgttcttttttgaatcagataaagaagagtatttgcagaagcaattaaataaaaaagcggctatttga

SEQ ID NO: 445640 - DNA, 894 bp, Serratia marcescens
atgactattcaaaacgaacttgtcgagttgatggaacgtaaaggcctgagccaaacccaggttgcccgcgccattggcatgagtccagctactatcagtacctggttacggggtaattatgccggtcgttctgacgaggtcgcagaactcgtttccgcactcattgcccgtatggctgaaaaagataaacagcaacgcattaaagcggagtttgtcgcgacatcgaccagtaaaaaagcgatggagctgattaccctggcccatgtggatggtgagatcaacgtgctttacggcgaggccggtctgggtaagacaatgacggtaaaagcctatgtggcaaagcatcgcgatgccatcctcatcgaagccgatccaggttataccgcgcgtgtcgttctggaagaactgtcaaacaagctggggctgactgttcgcggcaatatgcatgaactgagtgaggcctgtatcaataagttaatggactccgggcgggtgctgataattgatgaggcggaaaacctgccctatcgggcgctggagtccattcgccgtatccatgataaaaccggtatcggcgttgttctggtcggaatgccgcgccttattattaaccttaaaggtaaacgcggtgagtttgttcaactctatagccgtgtggcttttgctctcaatatcggcaatgcattacccgctggcgatatcgacaccattgccggcagtttattgccagaagataaacgggatgagctgagcgacgtgctttatcaagagtcgaaaggtaatgcccgtcgtttgttcaaattgttgcgcggtgttattcgtacgagtgcgatcaatgaaattcctgtcaatgccaaagcggtgcatcagtttgcacaaatgctgattaactaa

SEQ ID NO: 445641 - DNA, 258 bp, Serratia marcescens
atgtgccagttacctatcaacaatcctaagctgatggctcctattaattgcctgatgcgtgcgggtttaacagtggttgattataacgataagtttcgcatgccgatcatcaaggtcaataaaccgttgtcatcttggattaatgactctttcgaaatgactgaatgtaaaaacggtattaatcataccgtcaacatgtacatctggcggggtgcccgcattgtctgggagagcagtaatggcaaaggtaatcattga

SEQ ID NO: 445642 - DNA, 639 bp, Serratia marcescens
atgtccactgaaaacaagcaatttaccgaaaccactgccccagatggctattgggtcgacgcaaaaggtgtattaaccccagagggtctgattaaggatatcgataaatcccgcgatgccttggtgggtgaaatcatccttaaagccatttcgttaaataaagtcatggcggaatttaaacaatccacttttgcagatattgccgcattcgttgatttatctgccaatgaatacaacgtcaaactcggcggcaagaaaggcaatgtcacgctttatacgttcgatggccgctataagatccagcgtgcaatggctgaccgactggcttttgatgagcgcctgcaagcggcaaaggcattgattgatgaatgccttaccgactggacggaaggtgccaaaccagagctacaggtgttgattaatcgtgcgttctcgacagataaagaaggcgaagtcagtactagcgccgttctggcactgcggcggtatgatattgccgatacacgctggcagttggcgatgaaagcgatcggcgaagcattgcaggtcattggcagcagtgcctatgttcgcatctatgagcggatcggcgacagtgaccaatacacgcctatttcccttgatatgtcggcggtgtga

SEQ ID NO: 445643 - DNA, 744 bp, Serratia marcescens
atgaacaatgtgaccctgaatattcgccagcaatacgccgctgccgccatgcaagcattagtaattagcggtctaaataccggtgcctggtctgattactccgacctagccaaatcggcctacaacatggcggatgccatgatggatgccgagctattgacgacttgcgtcgagatcaatctgcgggagcctgcattccattacatccgcacccatagtggccgtcagttctggtatgaagctatcagcccaaacatgattgatattggcgacattgcccaagcactttccaatatctgccggttctgcgggcatctggatgacttctacagcgtcgcgcagcattcggttctggccagccgccttgttccgccagatctggccatggaggcgttgctgcatgatgccagcgaagcttactgccaggatatcccggcaccgctcaaagcgctgctgccggattaccgcgacaccgaggctttagttgatagcgccgttcgtcgcaagttcggtttgccaattcagcaaagtcctgaagtcaaacgcgcggatttgatcatgctggccacagaacgccgcgacctcgacattgacgatggcgataaatgggacattctcaaggggatcgagcctaccgataaattcaccgtttgcccgcttaatccacgccaggcacgtagcctattcattactcgatttaatgagttgttgcatgatactcaacctgcgccttttgtagattag

SEQ ID NO: 445644 - DNA, 528 bp, Serratia marcescens
atgaaactaaaatcaatttctcttggggtgtttttatttgctgtgtcatcttctgttatggcagttgatggttataaaggggttaagtttggttcaagtgttaatgaactgaatgccgggaagttatgctcatggaaaaaatatgaaaaaaacaaaacagatggagtagaatattactcgtgcgagaacttcaagttttcaggtaagaatacattagcaatggcattttttattgataagaagtttgaaagaattgctatatctattgatagtaatcaaatggcgcttatcgaaagtttaaagaaaaagtatggtgagccttcatctaccttcactgctgacgaatttgaaaaagcccagaagtttgggggttccattagtgttaagtttgatgctgatacagtaattgttaatgtaacccgagatgcgcagactatgcaggatacaacttacttaatctatacatcgaatgatttcgatggtatgtataaaaagataaatgaaaagagtatggaaagtgacatttag

SEQ ID NO: 445645 - DNA, 555 bp, Serratia marcescens
atggcggaattcggcattgataccccacagcggcaagcggcatttctctctcaaatccgtgttgagtcagcaggattcaaacgcaccgttgaaaacctcaattattccgtgcccggcctgttgaacacgttcccacgcaaacgcatcagccgtgtcgatgctgaacgcctggggcgtaaagccagtgagatcatcgttccgactgcacggcaggcggagattgccaacctggtctacggcggtcgctttggcaatgtgcatgccggggatggctggcgctaccgtggtcgaggtctcaagcagatcaccttttacgataactacctgcgttgtggtcatgccctggagctggacttgattacgcatcctgagttgctcgagctggatgctcatgcagccaattctgccggctggttctggttcgacaatggctgcaatgcctacgctgaccgagccgacattgccggacttacccgcgtaattaatggcggcgataacgccctggcggagcgccagaactactttacccaggcaaagggtgtcctatgccgctga

SEQ ID NO: 445646 - DNA, 267 bp, Serratia marcescens
atgccgctgagaacgcttttcctgagtcgcctggctgagctcgtgaccaatcccgccaccggccgtctgtccacgtctgatacgaccctggtcggcgcgttcctggtggcttccatcgtgctgatttgggtgacggccgctggccatcttgaagaatggctgtacgtcgcttacctgggcgcgtttgtgttccagtcccaggcatccaagcacgtggcgattaagcgagacaaggccactgcaggagggacttccgatgccaactga

SEQ ID NO: 445647 - DNA, 600 bp, Serratia marcescens
atgccaactgagttcttcattctcccttacctctggcagcacattaaaacttactggcttgcctacctgttcgctttgggcagcgccgcgatcgcttacaaggtaggcgcaggaacacgcgccaatgagctgcaggcatcacagaccaccatcagccaactgcaggcgcagcgtgccaacaacgccgagcagcaggcaatggcattggcagacgccgtggccaaataccagcaggcggagctaaaatcccaattgctcgccaggcagttacaacagcgtgaacaacagctactgcagacctcaaccaagctgaaaaaggcaatcaaagatgcggttaaaaatgatgtgggctttaccggtattggccctcgcgggctgtgtctctacacctccgccctcggctattccgattgtgacgaacgtctgtccaatgccgcccccggagctgctggccattccaccgaaaccggcagaaccggtggcggactctctgccggcggcatcatcaatcacgccgccgactacggcgaatggtgccaaacactagaggcccggttgcaggggcttaacgcctggtacaaacgggagggccacccatga

SEQ ID NO: 445648 - DNA, 258 bp, Serratia marcescens
atgaataccgatctcatcgttaacaccgtgttgggcctggctacagccggactcattggttttgttcgctcactctttaatgagctcaaagagcttcgccgttctatcgaggccatcagggctgattaccagcgtcgtgatgatgctatgcgtactgagaactcattttttcaattgctacaagacgttaaacgcacagttgagcatatcgaccaaaaattagaccgcaaagcggataagggaaaccatcatggttaa

SEQ ID NO: 445649 - DNA, 225 bp, Serratia marcescens
atggttaaacgcgcgacgcgtcatcgtcgggggccggcaacaacaactgagctggcgctgctgtccgagatcaatcaacgcctggaacggattgaaaacaacatcgatgaagtgaaatccgttgctacacgccagggcgcgattgccggtggtatcgccgggacgattggcggtggtgttgtcactaccggcatcctctttattaaagcgcgattggggatgtaa

SEQ ID NO: 445650 - DNA, 501 bp, Serratia marcescens
atggcgtactcgccggaaataagggacaagctgcgcagggcttacatcttcgggcagatgtcgctggagatcgccgcgtcgcaggtaggcgtgtctttcgtatccgctcgccgctggaagaaagaggcgcaggataaaggcgatgattgggatgcactacgctcagcgcacgtgcttgcaggcggcacagtggaagaaaccggccgcgccattttaaccagcatgctcgtccagtatcagaccacgatggagctgttgaccaatgacagcgagttgaaagcccctcagcgtgtcgagctgctggccagcctgggcgattcgttcaacaaggcaatttcggccagtaagaaaatcctgcctgaaacgaaccagttggcgatagccctggatgtgatcaacaagctcagcgccttcattgccgaaaagcaccctcagcatcttgtggcgttcgtggaagtgttagagccctttggtgaagaggttgaaaaactgtatggctga

SEQ ID NO: 445651 - DNA, 216 bp, Serratia marcescens
atggctgacaaactcattaaagtctcggatggccaatacgtaatggccagccaggtcatccgcgtagaacgctatgagttcagcgataactgcacggtcgtaacaagcgacggcgagcggctttctctgatgccaaggtatggcgaacgcatctaccaggcgcaagagcgtttcatcaatgccgttaacgaggcattggccggcaatgaagattaa

SEQ ID NO: 445652 - DNA, 189 bp, Serratia marcescens
atgcagctcgcttttgtcctggtggcggacgtaatgcgggaaatagttttcgacgaaatatgcatacccgccaaccgggtcattcacatgatcccggcgttgcgcgatggcggtagccgaagggtcaaagccgacatcctccgcctcaatagtacggcgcaggctggcggcaagttcggcgagctctaa

SEQ ID NO: 445653 - DNA, 1314 bp, Serratia marcescens
gtgctgtggtgcatcattcgcgccatcaagcattacccggtcatcgtaatggactccatcgaccaagcctatccgatgctggaagccatcaaagctgaactggaattcaacccccgtttgctgatggacttcccggaggtgtgcggtcaaggccgcgtgtggcagatggggactatcctcacccgcaacgatatcaaggtgcaagtggccggttctggcaagaaactgcgtggcttgcggcatgggccataccgtcccgatctgtgtgttctggacgatattgagaacgatgagcaggtacgtaatcctgatcaacgtgacaaggttgagaactggctcaaaaagactgtactgccgttaggcggtgccggcgcgaagttcgatgtggtctacatcggcaccatcttgcactatgactcggtattatcccgcacgctccgcaatccgctatggcggtctgcccgcttcaaggcgttgatcgcctggccccacaacatggagctctgggacaagtgggaggaaatcctgcgtaataacgatcaggacggtgaagcgctggccaatgccttctatatgttgcaccagttggagatggaagccggcgcggtggtgtcctggttggctcgcccgctgcttaccttgatgttgatccgcgccagggatggccacagtacctttgatgctgaatatcagaatgaccctgtcagcggcgaagatgcgccatttaccggctgcatcaacttctgggtgaacagactgaatgagtggttgttctatggctcctgtgacccgtcgctcggcaaggccggggccagtcgagacccctcagcgttactcgtcggcggctttaatcggcacaccggcattctggatgtggttgaagcgcgtatccgcaagcgtgttcccgatcggattatttccgacatcatcgagctgcagcgcgaatatgcctgcctggtctgggcgattgaaactgtccagtttcaggagttcctgcgcacggagttggtgaagcggtcggccattgccggtgttcccgttcccgcccgcgccgtacagccccatacagataaattgctgcgtatcgaatcgctgcagccacatatggctaacggcctgatccgcctgcacccgagccaaaacaccttgattgaccaactgcgtcatttccctaaagccgatcacgatgatgggccggatgccctgcatatgctctgggcactggcggtgtcgggtgccggcaattttaattttacccgcgttccgcgccgtggcgatagccgtggtagccggttcggttctggaggttggtaa

SEQ ID NO: 445654 - DNA, 1581 bp, Serratia marcescens
atggtacaaatcctcgaccagtttggtcgcccgattaatcgcgaagtgttgaagacgccccaaacgaccaagatggcaagcctcaaccgcatgtggccggagcatccttcaaaggggatgaccatccgccggctaccgcgcatcctggaagcggctgagcgcggtgatttggccgcacaggctgacctgttcgaggacatgatcgagcgtgatggtcacatattttctgagatggccaagcgcaaaaatgccttgcttaccctggactggagtattgagcccccagagaacgctacgggcgaagagaaaaagatagctgaaatggtgtccgcctggatgaaggatatcccggagtttgaagatattactctcaatgctgccgatgcgatcgggcatggctttgccgcacaggaaattgaaaagtgggagctggaagataaaatctggctcccgagcaaaatcaagctgcgtccacaccgttggttctgtaccaatccagaagccggcgatgagatccgcctcagtgatggcagtatgaacggtgccgagctctggcctttcggctggctggtgcatacccataacgccaaatccgggtatgtggcccaatcagggctctatcgcgtgctggtgtggccatacctgttcaagaactacggcattcgtgatctggccgaattcctggagatctacggtttacctgcacgcgtcggcacctacctcgccggtgcgacggacgacgacaaagaccggctattggaagccctggtgacgttagggcatgatgccgctggcattattcccgaaggcaccaagattgaattcctgacggcggccagcggtcaggcagatccgtttgttgctatggtcaattgggccgaacgtaccgcatcaaaagtaatactgggcgcaacacttaccagccaggccgacggcaaaagctccactaatgccctcggcaaagtgcataacgatgttcgccatgacatcttgatcgccgatgcgcgtcaaatcgagggcttctatcgcggtttcatccgtatgttattggccatcaatggctatcaggtgagctctcgccgtcagccacgactcgtcttcgatacccgcgaactggagagcatcaaggagtttgccgagggggtatctaccttggtgacggcaggcctgaaaactatcccggcctcctgggtacataagaaaattggtatcccgaacccccaggagggtgaagcagtattgtcgcccccggctactgcgccggtattgccgggtgcgcgattgtcacagcaacaatcccggtaccgttcctttgccgcgctgagcacggaagcggatattgccgacccggcacaggtggcactggataatgcgcagacggtgccagacgccatcaacaacgccatgcaacagctgatagccccgttggttgctgcgcttagccagggtaataccccggatgatgctctggacatcatcgcggccagctatcccgacttggatgatagccaactgcagcaattgctgacccaagcactctttgtcgctgatatctgggggcatctgaatgccgacagctga

SEQ ID NO: 445655 - DNA, 1263 bp, Serratia marcescens
atgccgacagctgatgtggatctggcctatgccatcgggttgaaaccggcagaggccattcgttacttcgagagcaagggctacaccctcggtttcaactggcatgacgttgaagcacgagcgcatgcaacggccttcaccgtggccggtgtactcaaagtggacgtgctggaggacattcgcaacgggttaacgagcagccttaaggaaggcaagacgctcgctcagtttgaaaaacaactgatgccttacctggtgcaaaaaggctggctgggtaaaggcctggtggccgatgaagatggtgtgttggaagggaagcaactgacgccgcgccggctacgtaccatctttgaaaccaatatgcagtccagctacaacgctggccgctatgaagaacagttggccaacgtggagtttcggccgttctgggagcgcgttgccgtcatggacaggcacacacgcccacgtcatgcggccctcaatgggtttactgcccgctatgatgatccggtgtggcagtttatgtatccgcccgatggatatggatgccgttgccgtgtccgggcgcgttcgtccgccgacgtcgagcgccatggcatccaggttcagtccagtgaggggcgcattgtcactgtgcagcaagcctgggggccaagcgatacgcgggaagtccaggccttgcgcatcaacaatgagctctataccccggatgccggttttggtcacaatcctggccagggaaaccttgccgcgctggggcagcggctcatggataaatccgccactgccgcaccccggttagcagcaacggcagtcaatgaaacactggctgataacaccgtgttaaacgccgtttcagggggcgttaaacgttgggttgatcaggtgcttatccgccagaagcccagcggtgacttgcgtcacctgggtgcagtttcgcccaagacactcaccgcgctggaaatgcgcggccgtgcgccggcatcggcgattttgtccgcccgcgatcatgatgttgtttcttctcctgggccactgtggcaagaattgccggcaatgcttcgatcggcagaggcgaccctgttggatggggataacctggtgtatgtctgccgccagggtaaacagcaatttggcgtaatggcctcaccggatactgacgtttcggggcttgctatcacgctgatgcatcagggggatgcactcacgccggcacagctgcaggagcttggccaactccctatcgtcaacggagggttatga

SEQ ID NO: 445656 - DNA, 552 bp, Serratia marcescens
atgtctgcggtctatcacatcacatacaatgtcaccgactttgagaatgccctgggagagctcatcaagaagctggagcaccgcgagccgctgatgcgtgagctggcggccgcaatgggtgatgccgtcgaggagaacttcaagaatcagggccgtccggcctggatgggatggagtccggcttatgccaggaaacgcgctggcggtaaaattctgcaacgttccgggcgactggccagcagcatcagccagcagagcagcaatgatgaggccctggttggcaccaatgttgtttacgcccgcattcaccaggaaggcggcagcattaacatcccggcccgcagtcagcgggcatactaccatcagcgcaaggacggctcgctcaacaaccggtttgccaggaaatcgaaagccaactacagcgagtggaataccataccgggctatcaaatcaagatgccggcgcggccattcctgcacctgaccgaaagcgacgttgatggtatggaagagacggcaaaaacctaccttcaacgcgttattgattcataa

SEQ ID NO: 445657 - DNA, 1155 bp, Serratia marcescens
atgcgtattctcggcggcatgaaactaaaaatcgccgcactggccatcgaaatcaccaaagcgaatcacggcactatccagcttttccctgctggtgaattccgtgctcgtgatggtcgcccaacggaatgcgatcactggctgatgacggctgagattgccaagccgcttattgcgactgcggtggaacgcgccacgccgtatgtcattgactacgaacaccagactttgcgtgcagcgaccaacggccagcctgcgccagcagccggctggttccacacactggaatggcgtgaagaaggtctgtttgctgtcgatgtgcagtggacggacgctgcagcagaaatgatcgccaagggcgaatatctctttatctctcctgtttttacctacaacgaatctggccacgtggtgcaaatcatcaatgccgcgctgaccaatacaccggccctggatgggatggaggaagtgatgcttgctgccgcctctctcctggccgctggctcaacctcaaaaggtacttccacaatggatgaactactcgaacgccttcgctggatgttgaatctgccgatcaccgccacgaaggaagacattgttgccgagctcaacaagttgattgatcaactgctcggcgctgatgccggcacggctgcagcctcgtttcagacgctgtcggctaatcccttcaacctgattgacaagttgacccaggacgccgcccaaacggctgcactgagcgcccaggtggaaaatcctgatccgtccaaatgggtagcggtagccgtcatgcaggagtccatcacccaggccgttgcccatgcaggcgtaacctctgccgctgatttggctgcgcgtgattgtgacaccttgatcactgctgcactttccgatggccgtttgctgccagcacaagagccctgggcgaagggactggcgaaagccaacccggacagcctcaagacgttcctagacaaggctccgaaaatcgcggccctcacgactacccagaccggtggccaaccacctgcaggggcaaaaccggcaccatcgttggacgattcggatgatgaattggccgctgcggtagcgctcagcgccatgatgggtactgacccggcagacattgccaaatatgtgggagacaagaaatga

SEQ ID NO: 445658 - DNA, 396 bp, Serratia marcescens
atgaccgatcgcaataccccttataaagatggcgagctattcccggttcccatcgcggccagcaccgaaatcttcggtggccatattgtcgcgggcaatgctgccggctttgccgtactggccaccgctgtggctgcgcaggtgacgctgggtgtttcggatggctatgccgacaacagcgccggcacagcaggcgatactgtcgccctggtgcgtcggggcaagtcctggttctttgccaacctgggcggcgatgccgtcacccaagcggatattggcaaagagtgttttgttgccgacagtcagactgtggcgaaaaccagcaacagcgacgtgcgtcctgttgccggtaaagtgctgggcgtggaaagcgccggcgtttgggttctgatttaa

SEQ ID NO: 445659 - DNA, 909 bp, Serratia marcescens
gtgattgttaacgtaaaaaatattaaagcgatcttcatcaacctgaaaaccacgttccagaaggcgtttgaccagacgccgagtgactggcagaaagtggcgatgaaggtgccttccacaagcaagcagaacgattacagctggcttggccgttttcccaaaatgcgcaagtggattggcgacaaggcggtaaaagccctggaagccttcaactattcgattgtcaacgatgactttgaagccacagttgaagttgaccgcaacgatatcgaagacgatcaaatcctgggactcgctcagcaagcccaggctgcaggccagtcagcagcagagttgccgtcagatattgtttttgccttgctgagtcaggggtttaccaacctgtgctacgacggtcagccgttctttgatatcgaccacccggtaaacggcgtatcggtttctaacaaaggcaccaagaagctgtcagcggcaacccaggttgcggcgaaagccagttatggcgcggctcgtgcagccatgcgtagcttcaaggatgaggaaggtgcgtcgttgaaagtccgtccgaccattctggttgtgccaccggcactggaagatgaagccaatttcctgatgactgccgatcgcttcccggacaacacgccgaatatctataaaggtactgctgaggtgttggttgtgccagagctgacctctgacacgcaatggttcctgctggatacaacgcgcccggtgaaaccgcttatctatcaggagcgtaaaaaaccggaattcgttgagcaaaccgactacaacgcggacaacgtctttatgcgcaaaaagttcctgtttggcgctgaggcacgtgctgcaggtgggtacggcttctggcagatggcgtatggctcaaccggggagacagcataa

SEQ ID NO: 445660 - DNA, 399 bp, Serratia marcescens
atgccgattcaaatcactgcacgccgtgagggttttcgccgctgtggcatcgcccacagcgccaaggccaccacctacgaagacggtcactttacgccgaaacagttggctgagctagagaacgatccgcaattggttgtggtgcgcattacagccggcgcagcaacggatgctcaaggcctggacaagcagttgacactggccggggaaaccatcacccgccaggagcaagaactggtcacgctgaaatcgcagttagatgatgctcaaaagactatcgcttctcagcaggaaagtatcgcggcgttaaccactgcacgcgatgatgcgattgaaaacagcacggctctggcaactgaactggccgcgttgaaagaaccgcctccggcgaagaaataa

SEQ ID NO: 445661 - DNA, 429 bp, Serratia marcescens
atgtatgccactcaagcagatatggtgctggcgttcggtgataaggaatgcatctctcttaccgatcgcaagtacaccggccagattgatgctgaggtgatggcacaggcgctggagcagtccagcgccgagatcgacggttatctcgcgggccgctatccaacaccctggcctgatacaccgcgtgttctggtcggtcgttgctgcgacatcgctcgctataaattgtgcggcagtggtacgcagtgtaccgacctcattcgggaacggtatgaggatgcgatccgctatctggagcgtgtggcagatgggcgcattaccctgggccgccaaccggatggcagcgtgatccagggcggaaccagtgcccgctttgtctccgccggcagggcttttagccgaaaatcgaccaatggaggtgcattttga

SEQ ID NO: 445662 - DNA, 645 bp, Serratia marcescens
ttgattatcgccaacactgagctggccattgtggaacgtctccgccagggactcggcaagatggttcacagcgtggagtcctacggtggcgagatggacggcgagccggcggagatcatccgccaactgcccgcggcctgggtaacattcggcggtgtacaaaagaccgaaaacaccaacctcaccaagagaaaatacaccgtgcatggccgctttgtggtgatagtcggtgatcgcaacctgcgcaatgaaaacgccgctcggctcggtgggccgggattcgatgaggtgggtacgtatcgcctggtgatggccgtgcgtcgtctgttatccgggcaggatatgtcgctgcccatcaagcaccttatccctggtcgggttcggacgctgttcaatacgcaggtggaggcggcagcaatgtctgtttttgcctgtgagttcgataccgcctggattgagtccgctctggaggaaggcaaattccctctggttaacgcgccggctgaccatcctgacaacctctttaatgggtttgatggtgtgtccagcgagccagacgccgagtggctgcgcacccatttgaactatgacataccgcagacggcgcaaaagccggatgccgtggacattatcaatcatgaatga

SEQ ID NO: 445663 - DNA, 156 bp, Serratia marcescens
atgctgctcgggatactgtcgaatgcaatgttaggactcgccacggttaacctccgtttttacggccttaccctgattaactggcgcggccgcgttggcatcgccctcaataatcagcagatcgccggcggcaatctgccgctggtaatacgctga

SEQ ID NO: 445664 - DNA, 837 bp, Serratia marcescens
gtgactgtggtgaccatgaccggcggtgaagttgatccggatatcgcgccggcgctggcggcagtttttgcggccggtcataacattgtggcgacaccgttctctaccgctgctgcgctgacggcactgcgcacgcatctggatgaaaccggcggcccgctggaaaaacgcggcgcaataggcgttgcaggctggcgcaaatcgttatcgaccggcaccacgttggccagccagattaacgccggccgcatcaccctgggatggcacaacggctcggccaaactgccggcagaaatcgcggcctcctacgcggccgttatggccagcgaagaagacccggcccgtccgctcaacacgctgcagttgaaagccctggacgtcacggcgctggccagccggccgggacgcaatgagcaagagaatgcgctgcataacggtttgacgccgttcgtcgtgggggcgggtgacaaggtgcagattgttcgcgccatcagcacctacaccaaaaacgcccagggtgtagacgatgtggcgttactggatatcaccaccatccgcaccctggactatgtgcgcaaggcgtgtggcgatcgcatcgcgttgcgtttcccgcgtgacaagttgagcagccgaaccccggcaaaggtacgcagcgaactgctggacgtgcttatcaagctggaagagttggagattgtggaaaacgtcacagagaaccaggctgcgctgattgtggagcgtgatgcccaggacgttaaccgactcaatgcggcaatccctaccgatatcgtcaatggtctgcatgtgtttgccggccgtattgacctgctgttgtaa

SEQ ID NO: 445665 - DNA, 378 bp, Serratia marcescens
atggcacttgaagaatatgtaggctcgatcatcctcgagatggatggccaggaaattgaggtgactgacctcaaagaagacgtgaccacgggccgtaagctggtcaagaccatgaacaagaccgggcgggccaaaggctttagccgtgggattgccgagtatcagttgacgatctctgtcgtggttccactgaccggcgatctcaattgggagggtatggaaggcgcaaaaatcacgcagtacccgctcagcggcagcggcggcaagcgtgtttcgttcctggactgcttttccactcaggtgggcgccagctacaccgtggacaacgaagcgaaacgtgacattactgtgagcgcattgcgccgggtggaagaataa

SEQ ID NO: 445666 - DNA, 387 bp, Serratia marcescens
atgacggaatcaggttctttactgcttggcgtgccgttcggcgacaccttccactttgcctttacggtaaagctgcccgtggtgcgggacaccatgaacgccctggaagcgacgatggaagaatgcggcacgaccgaaggcccggttgccgggatgttttaccgtgcggccgtgatggcgtcggcattggtttctttgggtgatataccagcggagcagctcaccccacagctattgtgtgacgggctaaccgatgatgattttgacctcatcgacgcccagatctccgcccttaaaaaaaagcggatggcattgaatcccgtcttagcggctaccgaacaaccgtccttgccctcggaaagtacggattcaccgagccccaaatag

SEQ ID NO: 445667 - DNA, 2151 bp, Serratia marcescens
atgcgtaatcttgccctggcgttaaccctgtccgccaaggatgccgcctctaaagtcttgcgccaggcgatgcaggatgctgtcaaacaatccaaagccgccgaaaaggccggcgacgaactggccaaatcacagcaacagaatgccactgccggcattcgggcatcgcgcacgctgtcggatgagtaccgccgagcatcaagcgcccgctcaacgttggggatccgttccgagcgtgaggttcaacgcgagatccaacagacgcaagcggcatacatgcgccttacccgtagcggcgttatgtctgccaacgagcagagccgggcctttacagcgatgactcagcgtgtcggccggctgcgtgatgagcttaaaggggccaccaacgaaatgagccgcatggagcgtgctcgtggttggggttcgaacgcgatggctgttgctgggggtgttgctgccggtgctgccgtggtgagccaaccggtcaagaaccaaatgacctatgagcagcgacttgccatgatggctaacaccgcttacgccgagcaaggtgtttctggccgtaagacagggatgcaaagcatggatcagcttattcgccaggcggtgacaaatggaggcggtacaaaagaaggcgctgccgatactctggattccttgctcgcatcaggtgcggtgaccatggactcggcgaaaaccttattgccgctgatacagcgttattcgacggcgaccggcgcagcgccgactgatttggcgcagattgcaatccgtgcgaaacagaccttcggtatccaggataatgagatgggtaaggcattcaacatggctatctctgcaggacaagatggctcatttgaactggccgacatggcgaaatggttgcctcagcaacttgcagcgggcagtaacaacggcatgagaggtctgaatgattttggcgttctgctcggagctaaccaggctgccgccatcacagcgggcaccagcgatgaagcaggtaataacctggtcaacctgttggctaaaattggcagtgctgatgccgcaacgtctgctgcgaaaatcaaggtcaatggcaagggtatcgacttgcctggtagcctggcggcggccagggggaaaggcattaactctctggatgcctttgtggggatcgtggataaagtcgttggtaataacccagcctataagaagctggagagtaagctggccacagctaagggtggcgaacgccaggaaacagtggagtcgatggcaaaaatactggaaggctctgctgttgggaagatgattgctgaccgccaggcgttgatggcgttaatcggttatcgcagtaaccggaaatacgcgcaggacgttgttaaaaatgcgaatgcgcagcgtaacctgcctgaggggcagactgccggcgatcttaactatgcgctgatttcagatacaaacgccttcaaagtccaacagttggataatgcccgtgattttggtcagatggactcaatgaaatctttatctgatcttctaggacgtctgtcgaaagaattagctgaatattctaaagagtatcctgggcttacaacggctcttgctggcgcagaaattggcatcaaagcaatgaccgttgctgcagtagctttcgccggtatcaaattcctttcgggaggcggcggtggtgtaaatgtcccaccaacaattcctggaggggctaagccctcaggaagctttggccgtgcagctggagctctaggtcgctgggctggccgtattgcggcaccactcatgctctatcaggcatcgcaagatgccccccttgtgcaagttgagcgcggcgacggcgatgcacgcaaacgcgtccaggcgggccaatactccgacgaccttagccggctgaaagattcagctcgcgcccaaccgggcctgctggatgcctgggatgaggttaaatcctggtggagcccgccgacgtcgatcggcaagggtgacatggccactgccggtgcaccgtcctacttgttcccacaacagaaccaaaagcctcagcctatccaggtgacgaccaagctcgagcttgatggccgcaccatcgcggaatccgtcaatgaatacaatggtaatcaggctgagcgtggcccaacaggaatgcctcaatga

SEQ ID NO: 445668 - DNA, 1320 bp, Serratia marcescens
atgagctggaatgacagtatgttagatgcctcattcaggggcattaaattcgacgttatcaacacccgtgacaccttctccagggacgtggcgcaatatgaatatccgttcgtggatggtggcgatgtagacgacctggggcgcaagccacgtaacctgcgtatcaccgggttactctggggtgacgactacgaaagccggctacagacgttgctggccgaatttgacaagcgcggcaacggcgagttgatccatcctgtgttcggctctatgccgaagatgcagctcatcgagtgccaggtttatcacgaggcggaaaacgtcgattattgcgttattgaactggtattcttggaggctggcaccaacatcccattctttacccgcgagtatccaacggcaaaagcggacatcatttttaaccaggtgcagtctgtacttgacgatgctcagacgctgattgataacgccctagcacccctgcgcaacacacaacgcctgatggccaaagccaaggcgatggcctccacagcggccaacatggtgacaattttccgcagcgatatcaccggttttatcagcagcaccacggactttatcaattatcctggtgcgtttatgtccgacctgcagagtgcgcttagcctaacctccagccagtccaagtcgagcgtcagcaataataccggcacttatgcgacggttggggcaaccaatatcgtgatggcagattggggtgagagccgcaatcagcttgacgcagtggccgcgctgccggcagcgttggcatcaggcgaacgaaccgcgccgttacccatgcctatcatcgttaccgacagcgatattgccgagctcgttgtgttgacctatctgcagatgtcactgcagttggcactggacgccgccgacttgcttagcgacgacggtttaattaccacattgtcgcccgccgagattgaacttgtcgccaatgacacccgcaagacgctgcagaacgctatcgacaagcatcgggcgctctatgaagcaacgacgcaggacgtcagcgccagcactaccgatgtcggtattacctggcaatcggtggttgatggtctgaaagatattgcgctatcggtgcagcagctggcggccaatatcatcaccacacgcccgccgctggtgcagcgccgggtggaaagtgccggtaacctgcatctgatcgcacatctgtggtatgccgactacacccgagcgaccgaactggcccgcctaaaccctcaaattcgtaacccgaacaggctgcaacctggagacgtgctctatgcctatgcccaataa

SEQ ID NO: 445669 - DNA, 1203 bp, Serratia marcescens
atgcctatgcccaataacgataccgttagcgtgctgattgctggccgtgtgcatagcacctggagccgctaccagattgatagcgattttctgatcccatcggatgcctggtctgtgacactcggcctgccgggtgggactttcccggcctacgtcgagcgcggcgcacctgtgcaggtaaaaatcggtgacgataccgtgatggtcggccgagtggccaaggtacagcgtcgtgtgtcccgccagcagatgagcctcagtatcacagggttcgacggtgcaaaagtcctggtggactgtgcatcgcccatcttcacatcccgaatgttgagccttgaagaagtgatcgccaaggttgtacggccgctcggtgtgaccaacatccgaattgaggccgagagttcgatacgcagcgataaggtttctgtcgagcctggcgagcgtgcctgggatacgctggtgcgtgcggcttctgctcgcggattatggccttggttcgcacctgatggcacgttggttatcggtgggcctgactataccgcagagccggtggccactcttgttttgaacctagacggacggggtaacaacatcctcgacctcagcgacgcatcatccattgatggcacctattcggagctcaccgttcttgcccagggccatgcgcaaggctccaagtcctccgcagaccttggcattatcgacgttgattcgttatctgcagctgttgctgaggaagctcaggacgatgatacgccagcagccggcacaccagaaaccgggttccacggtctgaaagccgttgtgcgtgatccaacggtgccgtactaccggccacaaattatggtggtaggtgatgccgataatctggaacaggtacgttatcgtgcccgtaaggcgatggcggatgcccgtcttaatgcctatgaactgacggccgttgtcaaagggcatcgcaacgatgccggcgagctttggcagccaggccaacggattcgcgtcaggagcgaaccccacggcattgatgatgtgtatttcctgatgggccgtgagttctctggcggtcggccagataacactgtgactatgctgcggctaaaagaagacggtatttggataccggacgcttacccgaaaaaacgcaaagccaggaagcgtaaagccaaggtgaacaaggagctcgcaattgtcgatgtggaataa

SEQ ID NO: 445670 - DNA, 660 bp, Serratia marcescens
ttgtcgatgtggaataatgttgaccagcgtattagtcgtgctttaaacggcattcgaatggcctttagaggggtgttaacacgcgtgaacagtgctggccaggtgcagactatccagggtaaagggttagctggcgaacaactgcaggacaacgagttgttccagcattatgggtttacctctaacccgctgccaggaacggcggcgattgtactacccctgaatggcaaaacatcccacggaattataattgccaccgaacatggcaattatcgacttaaggagctccagcctggagaagtcgccttatataccgatgagggagcgaaaatagttttaaagcgtggtcgtattattgatgttgactgcgatatatatcgtgtgaattgcaaaatctatgaagtcaatgcggaaaataatgccgactttaatacgccgatggttaatgccagcgaacaaattaccagccaggataaaattaccggtaatggtggtatgtcgattaagggtggcaatggcgcgacgtttgaaggtaatatcaaccagaccagtggtagctttgaaactgatggtgatgttaaagctggtactgtttccttaaaagaccacgaacatccgaacggcgatggtggcagtccaaccggtaaacccactcaataa

SEQ ID NO: 445671 - DNA, 1062 bp, Serratia marcescens
atgccgcacattacccctgtcattgaggcgattcgcgaagatttattgcgtgatatccgcaaccaactgcccgatgccaacattggcaaggacagtgactattacatccgcgcctcgtcagtggccagttgcgccgagggcatctaccgcgatcagggttggattgttcgtcagattttccctgacaccgccgataccgagtatctggaactccattgcagaactcgcggcatcacccgcaaggctgctaacaccgcctcggggccagtatctctgacaggcgaaccaggtgcaaaggcttctgccgggctagccatcacgcgtgatggcgcgacctggacgaccactactgaggccatactcaatagtgaaggcaaagccacggttactgcacgtgcatccgttgccggcgctgcaggtaataccaccactgtaatgtccggcatgttaacgacaacgccggagggttttgatagtaccgtgattatcggcgtgatggggggcggaactgaccgcgagtccgactcggagctgctcgctcgcctgctggagttgatccgccgcccgccagccggcggcaataaatacgactataagcgctgggcacttgaggttcctggtgtgacctccgcttatgtttacccgctgcgtcgagggttaggaacggttgacgttgtgatcacctcatccgatggcttgccctctgccgaggttgtagaacgcgcccagacacatatagacgatgtacggccggtgacggctaaaaattcattggtgctcatgccaacaattaagacctttaatattgacgttaaagtgtcgttaagcggtctaaatattgatgatgccaccattcaaattaaaaaggtgctgactgattttgtcggtcgattagagccaggggcaacctttgttcgtagccaggctggcatgcaaatatcattgattgccggcattactgaccaggatattgttgatcctccaggtaatgtcgttcctgaggtcaatgctattgccgttgaatggctgcgcgtcggcgatatcacggtaaatctgttatga

SEQ ID NO: 445672 - DNA, 663 bp, Serratia marcescens
atgagctataacacgttattggcgctattactgccgcaggacagttacagccccgcgcaacctaacttatctgccgagttgctggcggaaggtaacgtgttggataagaccgcactttacgcgcaaaaagtattaaacggggtaacaccgttctttgctgctgatttaatcgcagattgggagcgtgtagttggcattagccctgggccaaatagcacataccaggaacgtcgcgaacgggtgctcattaagctgcgtgaaattggtggcctcagcattccgtactttgtacgccttgcgaccagtattggatacaccattaccattgatgaattggaaccattcagagccggcgtcaatcgaaccggcgagccattgtattctgaggatagtatctggatatggcgggtgaacgtatttaattcaaaccaaaagatttaccgttttagagctggagcatcagcggctggtgaaagtctaatgtcgtttggtgatgatattttagaaaccacattgaatgacctaaagccggctcactcttattgttactttgcatataacgttgatcgcttgcgactaccttactatgacggttcattctcctttgacggcgatacgtcattttcaatgcaaaattatatccaagatacaacagaggattaa

SEQ ID NO: 445673 - DNA, 1011 bp, Serratia marcescens
atgcaaactataatgccacccattaatactgaggacgggctgtttcacgaaggaaacccgtctcagggaacacaaggcacgattgttactgctctgcatcttaataatcagcaggcggcgactcgtgacatacagaaagaattaacagcagttttggcggaggctggcatgttgcctgatgggactaagcctaatcaggttttattagccatccaaaaactttttacagggactgtttccgacaagtatctcccacttacaggcgggacattgacgggaagtgctaaagcacctgcttttatcggtcaagaacttggtttgcgtgttcatagtgaaggaaacgcaggtttagtattcgctgatgctgcaggaaacgtagataaagttgctatttactcagagccaacaagcgatggccatcgtctagtttttaagtcaggaagtaatgcctcattcggcggcagtaattggatttttgaaccaaacggaaaaactcttgtgccatgccctattgtttggtcagcaagtggtggtagccaaggtagcattgaagtaggcgtgtttggcgcaggttctcgactttcctatatgcaatggcatatgtccactgccggtacatgggggatgtaccttgaccatgattcgagtaatggaattagttttggagtcaacggccgaatcactgcgcagggaaaaattgaaacttccggtgaagtcaatgcaggtggggaaatcacctggggtggtattaattgtcgcgcaaattctgatggtaatatttccgggcctatctggggtggctatttacgtgattggctaagtaataacaccattagtcgtgtgcttcgaggtgcccaggggtcgatgaccatggatggcggactggtcgaggctcctgctgggtgtgttttaacaggcggtaatggaaatgaaggcaatcaggttggggtggcactatatcgcccgttgcagatttggcgtggtggtggttgggtaacaattgaaggttga

SEQ ID NO: 445674 - DNA, 528 bp, Serratia marcescens
atgaaattagtaaatttgcagcgttatgttcctgacgtgttattcaacggcgaaggtatacaatattttattgatgcagatggtaatgactggttcaagtcgttacctaaattcaccaaaaaattcagcctggcgattgataatgatactggtgtcattcgcagtatcagcgaggacacctcacgcctttatccagtaggaatgaccgttgttgaaatcgattcattgccagaaggatgcgatatttttggtggctgggtgtttaaaaatggcgatattgttcctcgcgttattccacaagaagaaaaagagcacgctgctaaaaaaacaaaatcatacctaattgaactagcaacaaaggcgatggcaccgctacaagacgccaaagagcttaatattgccacaaatgaagaactctcaaagttgaatgagtggatgtcatatcgtattgctatcaatcgcgtcgatacatctcagttaaccgatattgaatggccagatgcgccacaggatgattccaatggctaa

SEQ ID NO: 445675 - DNA, 2310 bp, Serratia marcescens
atggctaatttaattgaaacacctggttgggagcaaggtgtctatcagcttgaaccagatgataaagccatcggcggcagtggtggagtggccaattatcaagctactcaattagctaatcgcacccagtatttgagatctgaaattgaatcggtaaaagactcaagagaatttacgtttataatttcagcaacagacctcgatgggacgatcgctggtatttcaggaactaaatcgggtagcttctttcgagtagctcaaggtccagggaaagggtttaaatattatttaaataactctggcgtggcgcttgaggtttctgaatctgttggcgcagatgcgtttaatcagttgaatattaagatagatgataccgatttaaaattagctcaaaccaatctgttagccgaccgtatcggaatttatttctcaaaaaaaattccgtttttcatatcatcgactaaagatgccacagacatccctctcgcattagattacgaacgtgggttgtggttagcgggattacaggcggcggttcaggattatgttaatcagctaattcctcgtgccgctggtgcttattataaaggattaacccatgtaattacagacatcaccgggaaaaaagcattgcagtatttcgatgctgataatgccgcgcactttgccggattaagcgaatcactgcaagcacatgtaagccagctaattccacgaggccaggctgttaaataccgtgacaccgcacatgtatttacagacgaaaccggtaatgccgggtttggtcgcattaatcgacgcggtgaatggttcatcccaggcgttgatgggccgctgcaggatgcgatcgggaaaacgtcagccgatattaagatggtaaacggtaagcccgcccttttctggaagggggcgcaggtatggaatgattattacgtcacgagtgccagaccggtttctgataatgcagcgcttttcacttttgaaaaagacgacggcaccggcagttcaggattgttgttcattccaagcattcgcgaaattccagtaatcgcggcatacattctttgctacatctgtttggggcagagtttgggggctccatttgataagccagggcaaaatattcgcgttgtcggcgctgatccactgctgcgcggccgctgtttgtctccgtcaggccgcgctgacggcaacagtgctcctgttagccagactgatttagaccgtatcacggacatgggatacaacatcgaccgccagggccacaatatcccgcttgcgaatgggctgatgtacgaaatgcgcgattctggtatgaatctgccgacgattattaatgcgccgtgcaacgctggcggccagccgctatctggaatttcaaaagggacgttcgcttacacgaagagcctcgccatgttaaccagaattactgagttgtctcggtctatcggtaagcctctacgtaatgatttcatccttttcgagcacggagaaaccgataacgataacggaaattgtccaacgccgggtagttacctgtcattgcttggcccgtattttaatgactgtcttacggacttcaaaggcatcactggcgccacaaccggcccgattatcgtgattgaccaagttggtagccgcatcaatacgaaagctaatgatgtggataacgaagggaatcctatcggcgatccgattgtggtgcagccgtattcagttaccgccaccgatcagctcacatatgtgcgtcagcatagcaattctattatgtgcggcacgaaatactggctcaactggctgtacaacgacggctcactttctcacctgaaccaatacggcaaagtgcttcagggagaggctattgaaaaagcagtttattggcatctttatgaccctgccaaaaagggaacatggaagggtacacgggtacagagtatcgctgtcaacggcaacgtgattgacgttaagtattacgtgccgttcccgcccctggtcatcgacaccgacttccttggcgactgcgctgggaaagggtactccctggaagcagggagtgcgtcggtagtatcggtggcggttgtcggcggtgatactgtccgtctgacactcgaccaggttccagcgaccacagaccacttgctaatcgggttcacaaacacgatacaggcgaataacggaaatacctacccgctggtttgcgtgcacgattcgtcgccttgggtatcacgttacatcacgaaaaacagtaatccagttccgctctataactgggcaaccctcgatcgcattccattaactggggagttttaa

SEQ ID NO: 445676 - DNA, 897 bp, Serratia marcescens
atggcaacaggcattaataccggcgtagcattcaacactagccgctgggcaccaatcgatctaactggactgattctgaatgcgacaacgctttttaatactcataaatcccgcgttcttgccgatggcggcatcattcccgacgaagctggttgtctggctcgttttaaattgcttgttgataacggcatgtatgaaaatatcgccgtttcattaacgccccggtttggtttaaagcttgctggtgacggggtttcagtacaaaagatttataatttgtcaggccccgattttattggtgtaacgcaagcggcaagttggttaccgcagtggaacgctgcaacggggtctgtgcgtatccaagtcaattcttctgtagcgggctatctccagtctgccagtaatatcacagttcaggtgggtaattcatatgtggtcagttgtgtagggaaagacacagatccaactgacgctgttgggctcaccctgggcgcagtgattggtaatttgccgatggcctattgccgtatccaaaaaacaccgactcaggatgaggcgtatcgatacggtacgcgagatagtgcgtatacgagccccagcagtgccggcggcgcggtcagtgccgttaaaacgccgtacatcgattatcagccgtctgccgcatttttcgatgtcagctcaggggtagttatgccgtttgacaacggccgcgcaggaacaccggcaacggcaacaacgggagcactttacgcgatgcgttctgcgacaccggtgataatcggcaatccagcattcacagggtcagttatgcagaactgcgatggctctttccgtgattttacgattcttagttcagcacaatccgcagatgctttgattttgtcacgtctttcgtaa

SEQ ID NO: 445677 - DNA, 558 bp, Serratia marcescens
atgaacggatccgccttgcctgccgctcatgcggcgacggctgcaccggctgctgcgccgccgccttcgctttcgacgctcgccgaccaagctggcagcgtgccgctgactcgcgtatcgctcgcctacatcgaaccgcgcttcaagctctacctgcgcttcggcgagccggcgcgcacgctgcggctcgaccgctggcggcgctgcgcggtgttcctgccgcgtgcaatgttctgccgcgtgcgctgggaagcaaacgactacggcacgatccgctggcaactcatggtgatgcaagccgccacgccgctggacgacatgcagcgcatccccggcgtgcggccgggcgcacgcctgctgctgcacgccgaaggcgaaaacgcggtgcctgccgtgctggaacgcatcgacggcatcgaagggcaaggcatcgccgccatcgacgtgtcgcccgcgtactggcgcacgctgggcaaccgtctggcggcccgcctggcgctgcccgaatacaccgccgagcggcacgccgcctggctggccggaaaggcgctgccatga

SEQ ID NO: 445678 - DNA, 264 bp, Serratia marcescens
atgagcagcccgcgcagcaagcgcgtcggcatcggcgcacgtccgcccgcgaatccgcacgccgaggcgtggattcgccagggcgatgccgatgcactcaacaaaggcgacctctacaccgcacgcctgacgctcgacgtgacgcctgcgctgcgcgcgcgcatcaagatcgccgccttcggccagggcgtgaccgtggccgaactgctgcgcggcctgctggagcgggagtttcccgacaagcgcccggagaacctgccatga

SEQ ID NO: 445679 - DNA, 798 bp, Serratia marcescens
atggctgacccgagcgccgaacactggtatccgaccgccgcgtatctctacatgctgcacctcgacggccccgcgctggcgtgggaatacctgcgtcgccaccccgactaccgccgcgactggctgcgccgccgccgccggccagaggccgccgcgcgctggggactgcgcctgctggaagatcccgccctggatgcgcgcgacgcgcacccggcctggttccccgatcacgatgcggtagtgcagctctacccggacgccgacccgccgcccgacgcggtggctttcgcgttctggtgccttcccggccagaagcacctgatccacgacggcaagcgcctggtgctgctgacacgctggctgggctgctgcctgcggctggtgatcgctcccggcctggccgacggcatggcttacgcctatgccattcgcgcctgcgccgcatcctgcggacgctatcaggcgctggcggccgaactggacaagctggccgccgctggcgatgcagcgccagcgggaacggcacggtcgcggccggcacccgctgcgctgctggagttgaacacgctccaggcgctcgacggcaccctcgcgggcgcgtccctgcgcgacgtggccgaagggctgttcggcgtcgatgctgtcgccgccgactggtacgccgatagcgccttgcgcgcccgcgtgcggcgactggtgcaccggggcgatgcgctgatgcgcggcggctatcgccgcctggcacagcttccgcccgttgcacagggacgcgctgcatcccctgcaaaacgtccctga

SEQ ID NO: 445680 - DNA, 351 bp, Serratia marcescens
atgacccagccgctcgtcaccgctgaacagcgggcgcaactgctcgccgtcggcgcggcacgcgccgctggccgaagcatcgacccaatgccggcggtgcgactgttcacccccgacgcgcacgccacctggctgctggccgcgctcgacccggccgatggcgatacggcatgggggctgatcgacctgggaataggcatgcccggcctgggccatgtgaagctgtccgatctggcgtccatcgtcgggccgcacaagcaacctgtgatgcgcgatcgctacttccagcccgtgcggcggctgtcggagtacctgcggctggccgaggaaaacggttcgatcaccgactga

SEQ ID NO: 445681 - DNA, 294 bp, Serratia marcescens
gtggcggcgaaagactcattggcgacagcaatacggacggtcaggaaagcgcgcggcttgagccaggaagcgttctccgacgtgtccagccgtacctacctgagtttgctggagcgcgacctgaagagcccgaccatgcacaagctgaccgagctgtgcgaggtcatggacgtgcatccgctcacgttgctgacgctggcctatgccggcgacagcacgcgcagggccgatcagcttctggcgcaggtgcgccaggagctggaggcggtgttgaaggaacgcgacacgccgtag

SEQ ID NO: 445682 - DNA, 210 bp, Serratia marcescens; identical to SEQ ID NO: 329228

SEQ ID NO: 445683 - DNA, 2064 bp, Serratia marcescens
atgaacgccgttacccaaaccgaaacccgcgccatcgaaactgccgcgccgctggaagtggccgacccgagcaagaacctgattttggttccactctcgcagttgctgccgcgccgctccaagcgcaacgcacgcaagaccccgcgcctgtccattcccgaactggccgcgagcatcgcccgcatcggcctgctgcaaaatctcgtcgtcatcctcgccgccgatggcgagcagtacgaagtggtggccggcgaccgccgactgaccgcgttgaagctgctggcgaagaagaagcgcatccctgccgactacgaagtggcgtgcctgctggtgcccgatgcttcggcccgtaccgtcagcctcgcggaaaacctgctgcgcgagcagatgcacccggccgaccagttcgaggcgttcgccgcactggtcaaggaaggccgccccatcgaagacattgccgccgacttcggcgtgaccccgctggtggtgcagcgccgtctcaaactcgccaacgtctcgccgcgcctgctggccgactaccgcgccggagccgtcaccctggaacagttgatggccctgaccatcaccgacgaccacgccgcgcaggaaagcgcgttctacggtgcgccagaatggcagcgtggcgcgtccgcgctgcgcgaacgcctgaccgaacgcgaaatcgacgccacgcatccgctggtgcgcttcgccgggctggacgcctacacggcggcgggcggcggcatccgccgcgacctgttcgcggaaggcgatgccggaacctacctgaccgacgccacgctgctggaaacgctggtgcgcggcaagctggatgcgctggctggggacgtgcgcgccgagggttgggcgtgggtcgaagccgtgccgcacatgagctacgccgagcggcaggcgttccagaacgcaccgcgccagcgccgcgaaccgagcgcccgcgaagcccgccgcatcgcctcgctgcaaacccgcctcgacaagatcgacaccgaactggaagaagcctacgacgccgaggacgaggacaagaccgaagcgctggaaccgcgccgcgaacaggttgccggggaactgcaagccgtggaggaagccttgcagggctacgccccggatgtgcgcgccgtggccggcgccatcgtcaccctcgaccgcagcggcgaagccgtgattcatcgcgggctgctgcgcgaggcagaagccaaggcgctgcgcacgctggaacgcttgcggcagggtttcggcagcgcggaaggcgaggccgggaacgacgacgaaggcgaggacaccgagcagcccaaggccgcgagcctgtccgaccggctggcgcagcggttgagcgcgcaccgcaccgccgcgctgcaaatcgaagtcgcccggcatccgcaagtcgcgctggccgcgctggtgcatggcatggtgcagagcgtcttgcaggacaaccactacggccacgacttgccgctgggcgtgagcctgaaagtgcaagaccggctggaaggcatggcccccgactggcccgagtcgcccgccgccgtcgcccagcgcgagttgcagcaggtcgcgggcgaagcgctgccgcaggacagcgccgaactgttcgtcgcgctgctggcgatggagcaaggcgaactggtgcggctgctggcggtatgcgtagcggcgaccgtggacgtggtgacgcctcgcgccactgcgcaccagccgggcgcggaactggcgcaggctgtggggctggacatggccgcatggtggcagcccaccgcagacgggtatttccagcatgtgccgaaggccgcgattctggaagccgtgggcgagttcgcaccgtcgcacgctgcacggctggcgaagttgaagaaggccgacattgccagcgaagcggaacggctggccgatggtacgggctggatgcccgccatcttccgcaccgaaagcccgcaacaggacgcgcaggccgtggcagtggatgcgggcgccgaagcgccggaggaagtcgccgccgtggcggatgagctgccgcaggccgaggcactggccgcgtga

SEQ ID NO: 445684 - DNA, 477 bp, Serratia marcescens; identical to SEQ ID NO: 329115

SEQ ID NO: 445685 - DNA, 603 bp, Serratia marcescens
atgccacgcagaacattcttttcttttcactatgagcctgatgtatggcgcgcctggaatgtccgcaacagttgggttgtgaaggaatccgatgaggaaagccggggcttctttgacagcagcgtgtttgaggcatcgaaaaaagagagtgacgatgcactaaagacttttctccgcaaggggttggagaatacttcggtaacttgtgtccttgctggaacccatacatggtcacggcgatgggtgcgctacgaaattgctcgcagtgttatcaagggaaacggcttgctaaccgttttcattcacggtgtccagaataaagacaaagcgacatctacaaagggtgctgatccattggcgcagatgggactttatagaaccgatcgcggcatatatctcgccgagtggaaggacggaaagtgggtggcctacgcagattacacgcttgcgattcctgagggtgatctgtggttcacagcaccaaaaacgaatagcgtagtccaactgtcaaatcactgcctgagttacgatttcataggccaggatggcaggaaaaatattggcggatggattgaaactgctgcgggaatggctggccgatga

SEQ ID NO: 445686 - DNA, 1188 bp, Serratia marcescens; identical to SEQ ID NO: 329114

SEQ ID NO: 445687 - DNA, 570 bp, Serratia marcescens
atgatagatatatttctatctgccagcgtgcctttgcctgatcgcaatcgggtatttttcgacaccgccgatgttcttgctatacgggaagcaatcaaggctttggttgaagtagtgttgccgattggacgaatcacgtgcggcggccatccggcgataacgccgctattggctctcttttcccgcgaggcaaaccttgaccgcaacagggtggcgatttaccaaagtaagctttttgagggtcgattgcctcctgagctagcggagttcgtcgacgtgcatatggtgccagcggttgatggcaacagagaagccagtttgacggccatgaggcaagcaatgatcgaaagccgccgtttcagcgcagcggtgttcgtcggcggcatggaggggatctatgaggagcataaattgttcgtcgaacaccatcccaaagctacagtgctcccgctttcaacaacaggggccgccgccaaaataatttatcaacagggagaatatgatccaattttttcacgcgaccgaacctattccagcttatttcgtcgaaagcttctgcctgtggattag

SEQ ID NO: 445688 - DNA, 663 bp, Serratia marcescens; identical to SEQ ID NO: 329112

SEQ ID NO: 445689 - DNA, 1131 bp, Serratia marcescens; identical to SEQ ID NO: 329111

SEQ ID NO: 445690 - DNA, 627 bp, Serratia marcescens; identical to SEQ ID NO: 329110

SEQ ID NO: 445691 - DNA, 468 bp, Serratia marcescens; identical to SEQ ID NO: 329109

SEQ ID NO: 445692 - DNA, 303 bp, Serratia marcescens; identical to SEQ ID NO: 329108

SEQ ID NO: 445693 - DNA, 384 bp, Serratia marcescens; identical to SEQ ID NO: 329107

SEQ ID NO: 445694 - DNA, 300 bp, Serratia marcescens; identical to SEQ ID NO: 329106

SEQ ID NO: 445695 - DNA, 1200 bp, Serratia marcescens
atggcgaagatcaagctcaccaagaccgccgtagagtcggcgcaaccccaggccaaggacatcgaactacgggataccgtggtgccgggtttcctctgcaagattaccccgaagggccgtcgggtgttcatgctccagtaccgcacgaactccgggcagccccgcaagccctcgctgggcctgttcggggaactgaccgtggagcaggcccgcgtcatggcgcaggactggctggccgaggttcgccgaggcggcgaccccggcggcgccaaggccgaggcgcgcaaggcgcccacggtcgaagcgctgtgcaagaagttcatggaggactactccaagaagcgcaacaagccgagcacgcagcgcggctatcaggccgtcatcgaccgctgcatcgtcccgctgatcggccgcaagaaggtgcaggacgtgaagcggcccgacattgccgggctgatggagaaactggcctacaagcccgccgaggcgaacaacgccttcggcgtgctgcgcaagatgttcaacctggccgaagtgtggggctaccgcccggacggcacgaacccgtgccgccacgtcccgatgtacccgcccggcgaggaaacccggctcatcgtggacgacgaactggcgctgatcttccgccagttggagaagctggaggcggaaggactggagaactacgtcatcccgctggcgattcgcctgcaattcgagttcgccggccgccgctccgaaatctgcatgcttgaatgggattgggtcgatctggagaaccggcgcgtggtctggcccgacagcaagaccggcggcctctccaagcccatgagcgcggaagcctatcgactgttctcgacggcaccgcgccgagaaggttgcccctacgtcctgccttcgcccaacgacccgaccaagcacctgacctttggcgagcactatggcggatggtgccgggtgctcaaggcagccggcgtcccacacgtcggcacgcacggcatccgccaccgctccacgaccgacattgccaattcgggagtgccgaccaaggtaggcatgaagctgacgggccacaagaccgtggcgatgttcatgcactacgtccacaccgaggacaagccggtgcgggatgctgccgaactggtggcgagtcggcggcaggccatcacgggcgcgcggcgccctgcggaggccacggcatga

SEQ ID NO: 445696 - DNA, 840 bp, Serratia marcescens
atggcgaactcaatcaacaagcttatcgacgacaagattattaaacgcgggaaaaacggcctattaatcagactgaaagacattcacgtccaagaaggcttcaacaaacgcgtagacgatgagcgcacgcaggccgccgacgatgatctgtttaaccacctgtttcaaggtaagcccgtcccgcctctggaagtgcgcccacgcgacgatggcggagtgtggattgttgagggccaccgccggcaccgcgcctatctgcgttgccgtgacgctggcaagcccgctgagtgggtagcaatcatgccgttcactggcagcgacgtggagcgcatagcgcgcatcatgaacagcaatagccagctggcacttaccccatacgagcaatcgcgggtggtaaaagagctcgctggcttcaacctgtcaccagatgagatcgccgcgctggtcggcaaaagtcgcgccacagtcgataaactgcttgccctcacccaggcaaatcacgatgttcagactctggtcaaagatggcgccgttgctgtcgatgccgctgttgagcgagtgaaagagcatggcgagcaagccggaaaggtactggccggcgacgtcgaaaaggccaaagccgcgggcaagaaaaaggtcacaaaatcctttatcgctccaaaattcagcgcgccaaagtcccgcaagctcgtcacgctcttagcacaggctgaagtccgggaaattgacggacagatagcctacatccttcccgccggcactcagcttgatgtgctcgccattctcgatgaataccgctccaccagcggcaaggagaatcccgatggttcagagatataa

SEQ ID NO: 445697 - DNA, 234 bp, Serratia marcescens
atgaaagagcgcccagtgatcatcaaactcaatcagcaatgttcggtagagcaccaggggaaatatggatgggagccagctactgcatatgagcctatttacatcgctgttgctcatatcgagtcgttttcatttggcggactcacatacctaaaaatgatatccggagaaaggattcaagtaaccgaaacgccagaagaaattatggcgatgatcagcggtggaggtgcatga

SEQ ID NO: 445698 - DNA, 471 bp, Serratia marcescens
atggacaataagctgagcgaactgagcaagccggtggcgtataaattcgaccacggagttatggggacaggtgattttaaatatggcacgccgcaaatgcacttagcggcaaaagatgaaaatgccagccccctccactcgcaagagtacgtctccgccctgctggtgcgcatcgccgagatggaacatgccaataaatcgcaggacgaccacataaatcagcaacaggacagaatcgactcgctggagaagacaaacgccgagttaggccgacggcttggcgacgcagaaaagcggctggctacgccggtgcggttgctgggtgaaatgctacttcacgattgggagcacagcactgaacggcaggcgactttccagcacaggaaaatagcgtggtacgcccgcctggcagaagacaagaaagccatcctggccgctggcttcacctttaccgtagagggggatgagtag

SEQ ID NO: 445699 - DNA, 498 bp, Serratia marcescens
atggataaattcagcgaactgaaagcggccgcaatggccgctactccggggccgtggagttggaagctggacggaattttttactatctgtcgcctgagggcgtaaacaatcccctgtttcgaattattgacgatggtagcgcatggggtgaatacgcagaaactatcgagcatgacggccacgacgcacgcttcatcgcagctgctaaccctgctgtcattctcgccctgttggccgagctggaagcgaaggatgagcaaaataaattgctgatgcgagaaatagaacacggtaagaagctgcgagtaaacatgcagaacaatgccgactcactcagcgaacgcatcgccgagctggaagccaagctggctacgccggtgcggttgcctggttccttttatcccaatggggatatcgactgcccactggttgtggagcttgatgcggccgttgaagccatccacgcagctggcttcaccgtagagggggatgagtag

SEQ ID NO: 445700 - DNA, 579 bp, Serratia marcescens
atgaaagagcgcccagtgattttcaactcagaaatggttcgcgccattctcgacggccgcaagacccagacgcggcgggttattgccaatgtcagccccgataactgcattccactgcataagccgaccaataccaaagacgggatttacacgcatgtcatggatgcgccggggcatagtttatgcccattcggccaggtaggcgatcggctgtgggtgcgggagacgtgggcgcggtacaacatcgaccaggacgcccacgatatggcataccgtgcgaccacgccggatgattggcctaaagaaggccgctggcgcccatcaatccacatgccgcgctgggccagcagaatcacgctggaaatcaccgccgtgcgcgttgagcgcctgaacgatatcagtgacggcgatgcgatacgcgaaggctgcagcgtcgccgacatgaagagtggcgactgcgtagctgacgtatttgcgcggcagtgggcatccatctacggctcagaaagctggagcgccaatccctgggtgtgggttatcgagtttcgtcgtgtggaggtgcgtgatgccagcgaatga

SEQ ID NO: 445701 - DNA, 279 bp, Serratia marcescens
atggatatcgaaatggataacctgaaatcagagctggtgctgtggtatggagtcgatccagcaagccagcgcgatcagttcgaagccgcggcgacgcacggctattccgacgaggcggtcgaggttttcacccacatcgacggcaacgccgccgacacccgagaccgcctgctgatgtccgtaatgatggcgacgcctgacaccctgcagcagcgccagcgtgagctttacagctggtattgcgacaacgtgaaagccgtagcgcgcgagaagttttaa

SEQ ID NO: 445702 - DNA, 207 bp, Serratia marcescens
atgctcagcgataacttgctcaacctgcgcggcgcgctgctgaaaatcgtcagctttcagctgctgcaccagtacctcggcgcggtcagcgttttcttctgcctgctgcagttgcggggatttctccgctggcgcgttggcgtaaacgccatagcccatttgatccagttgctgcttggcctgcgctgccgcagcgtcggtaactag

SEQ ID NO: 445703 - DNA, 324 bp, Serratia marcescens
atgttggaaaccatgactcgcgaacccaccacggtgggagaagtgctgcaggaagaatatttaacgccgctaggcatcggccaggaggaactggcaaaggtcttgggcgtcacccgcgccaccgtcaatcgcctgtgcaacgggcatcgacgcatgagcgttgccgaggccaatctgtttgccgatctgttcgaaacgaccgctgacttttggctaaacctgcaggcggcacacgatcgctgggaagccagacagtccgatgcgcagcgtgtgcggctgcggccaatcaaagaaatactggggcgcaatatcactcatgcatga

SEQ ID NO: 445704 - DNA, 528 bp, Serratia marcescens
atggtcgatgcgttggccgccgccggcatcgcgccttccaaacaggtgctgctgggcgatagctggcaggtgctgatgctggacagccaggtgttcggcgtgccgcacggcgaattgagcgaataccagctcgagtggatggagcgctgcctgcaggctcatcccgagcgctatacgctgttgctgctgcaccatcatccgctgccgtccggctgcacctggctcgatcagcacagcctgcgcaacccgcatatgctgggcgcgatcctgctgcgttatccgaaagtgaataccgtggtgtgcgggcacattcaccaggatctggatctggaatggcagggccgacgcctgttggcgacgccgtccacctgcgtgcaattcaagccgcactgcacaaacttcaccattgacgacgtctcccccggctggcgctacctcgatctgctgccggacggccgcgtcgagacgcaggtgttccgcctggaaaacgacgatttccgccccgatatggactcggatggatactga

SEQ ID NO: 445705 - DNA, 945 bp, Serratia marcescens
atgggacaaattatcggtctgtcagaaccctaccgtggttggcgttctcctgtagatttgacggggaaatacatcgaccccgaaacgattttttcaaattttaaatctcgcgttcttgcggacggtggggttattcatgatgaaaacgggttgaaggagcgaatcaatctgttaattgaccataacatgttaaataaaatcgttgtggctgcatccccgcgattcggtgtcaaggtagatgcagatggcgtatctgttcgcaaagtctatgggctgaatgggcaggattttatcgctgtacaacaacaatatcagcaggctcctgcgctaccgctgcccatttacaaccctactgctgggagcgttcgggtcaaagtggcttcatactcgggcggctatctgcgaactgaaaatctggtgtcagtcattacaggctctgcaacgacctacgctattcaagccctggcgaacgatacagacccaatggatcaggtcggcctaaccctcggactgtcgctctcaaatctggggctggcctatatgcgcactattgcaagtccatactcgacaggcactcgcgaggcatggcgctatggtacccgcgatggaaattataccggtgcaagcagtggttctggtgccgggggagcagtactggttaagcgcgaaccctatgaagcatatgtgccaagcgctgcgttttttgacgttaataatggcgtcataacagcctatgagaatggatgtaagcactcagatgtgacaaccccagttggtaagctggcaaatgtgactgcacctggttatgtcatcatcggcagcccaatttttgacagtgtcggcggtggctcttatatgcaaacgtgcgacggttcgtttaaagacctcattattctgcgcgatcctcttcccatccaggctcagatattatcgaccctaaactga

SEQ ID NO: 445706 - DNA, 2175 bp, Serratia marcescens
atggccaaatcattacccgagtccccggtatgggaagattcaattttccagctagagactgatacgccagtactcggtggggccgatgggccggataactggcaggctcagcagttggcaaatcgaacccaatatcttaaacaatacatcgaggcgctctcgtccggagagaccccgtataccaacgaagcagcggcgcagcaggcaatatctgctggtaaaatttctgagggcgcaaaattctccgtccgcagcgacgatacgtttatttgggtgctcgaatatcaaaatatttccggtacagcaacaccgacggggaaaacgctaccctcgtctgaatttgtcatgctggttgctaaaggattgaatctggccaacgctgacattgtcaaaattttaaatagaataacgccattagatacgctgatttccgataaaatcgacctggcatttaccagttctgccgggcctgtcgaatcagcgatggctctggataaaaactgggggctgatgttagcagggctggaaaagccattgcaggattatgtgataggcgttattccggatagcctgaagaatcgctttcctggtgtcctttggggggttattcatctccagacacggcaaggccttatactcttgatggaaaatggtgaccttcacatccctggtgttgatgggcctctgcaagacgcactgggcctaagtgcagctaccatcaagatggttgacggcaaacctgcgttgttctggcacggacagcgagtctggaatgaacattatgttaccagcgccacaccagtatctgacagcggcgtattgtttaattatgagcaatcagatggcagtggtcatagcgggctaatgtttatcccgagcttgcgtgaggtgcctgttacgaccgcgtacatattaatctacatttgcctcgggcagtctctcggtgcagcattcgataaaccaggacaaaatattaaggtctggggggcggaggccgaatttcgcggacgctgcatgtcgccgtcaggtcgcgccgatggtaatagtgcgccatatagcccaactgacctcgaccgaatcactgacaataactacaattttgaccgtcagggccacaacctgccactgcaaaactgcctcatgtatgacatgaagtctgcaggtttagacctgccatcaatcattaatgcgccttgtaacgcaggcggacagccattatctggcatttcaaaaggtactttttcgtacacaaagagcctgaaatatattgagcgctcggttcaatttgcgcagggtatcggcaagccttaccaggccgactttattttgttcgagcatggcgagactgataatgataacggaaactgccgtaatcccggagattatagaacgttgttggttccatatttcactgactgtttccatgattttaaaaacatgctcagtcagcaaaaaaatccgacgattgttatcggccaggtagggagtcgtattaataccaaagccggttcagtagacccggaagggaaccccacaggtgagtcggaaattgtgcaaccgtattcagtgacggcaacggatcagctggactatgtcagacagcactctactgatgcgattatgtacggttcaaaatacgtcctgaatcatctgtataacgatgggtcgctgtcgcacttaaatcaattcggcaaagtgctgcaaggtgaatatgcagagcaggccattttttggcatatctatgacccagtgaaaaaaggcacctggcgaagcaaccgcgttaagagcattactgtttcagggaatgtcattacctatacacggcatgttccgtaccctccactggtgctggattccgagtttatcggagattgtcctggtaaggggcattcgctggagcttggttcagccacggttgaactcgttgagttggtgggggctgatacggtcaaaataacgctggatcaggcaccatctcagactgaccatctcttaatcggattcacaaacacgacaccggcaaataacggaaatatttaccccgtggtttgcattcgcgattcatcaacgaaagtgtctcgtaaagttatgcggaatggtgctgcgtttccgctgtataactgggctgttttagagcgcgttgctctcgacggttcattcactgacaccctgtga

SEQ ID NO: 445707 - DNA, 804 bp, Serratia marcescens
atgaatgaaacgtactattatggccagggtaaagtttatttagcgcggcgtgatgaaaatggtcgtcctggctcatttcgctgggttggcgacgtctcggaattaacgataacgttggcgtttgagcaaaagacggtaaaaacatccaggggcggaaagctggttaacactcgacgctatctaacctctcaagcaggctctgtaacatcgaagtggcacaacttctcgtctgaaaatttatcgttgctgttgaattctgaggtggttcgtaattacccacgcattatcgaaaatgaagtgctgccgccaaatatttctgaaggtgaccgtattgcgctgtcatatcataatgtttggggtgttgaggttaatgggttaactgaggggcgtgattatacagtcgatggtccctggggaatgattgaatttctaacgacaccagttaaccagccggttcgtgttgattatgcaagagccaacagtactacattacccatttttaacggcaaaattgacgaatttgcttttcgttatgaaagcctcaatttggctgagtcaaatcagcgcatgcttgttgagttgtatcgactgtcattcgaaccgctgacaacgtttcagcttattaataacgatgtgaaaatagctgcgatagatactgcagcagaagtcatgtatgacctgacccgcgtggatgaccctatttttggcaggtttgggcgggtcacggtaatcgagacactgagtggaatcacacacaacggggccattaattatgatggccgttatctacatggtgggaactaa

SEQ ID NO: 445708 - DNA, 1164 bp, Serratia marcescens
atgttggtactgaaggcgctgatgcaggagcacggtattgaccagcagatggtcgctgacgcggcccaggtctctcaaccgaccatttcgcagatagtgaaccacggcatctggccaaaacgccgcaccgcagaggtgcgggaaagcatcagccaatttttagcagcgcgtgggctggatacagctggcgcatttgaagaggtgcaggcggcggacaccgcccgcaccgatatctcaccacacgccccaacggagggagacgacaatatgttactcgcaaaacaggtattacatccagcaacgaaaaagcacttcggtttgttccgcgacccgttcgccgacgatgccctgcagggctctgaggatgtgttcacgaccccggacattcgttacgtccgtgaggccttgttccagacggcgcgccacggcggattcctggctgttgtcggtgagtccggtgcgggcaagtccacgctgcgccgcgacctgattgaacgcatcaaccgcgaaaacgcaccggtgattgtgattgagccctacatcatcgcgatggaagacaacgacaacaagggcaagaccctgaaagcggcgtcgatcgccgaggcgatcatcaataccattgcgccgctggagggcgtcaaacgcagccaggaggctaggttccgccaactccaccgcgtgctgaaagacagcagcaatgctggttacagccacgttctggtgattgaagaggcccactcgctgccgttgccaacgctgaagcacctcaaacgcttctttgagttggagaacgggtttaaaaaactgctctccattgtgctggtcggccagccggaactggcgatgaagctgtcagaacgcaatcaggaggtccgcgaggtggtacagcgctgtgaagttgtcgagctgctgccgctggatacccagttggaggcatttttgacgtttaagtttgaccgcgccggtaagtcggtaaaagaggtgctggacaccagcgccaccgacgctattcgcgccaggctcagcaataatatcggcggccgcaaaggcgttgtcagcctgttatacccgctggctgtcagcaatttaaccatcgcggcaatgaacctggccgcacaaatcggtgtgccggtggttaatgccgacgttatcaaaggtgtttga

SEQ ID NO: 445709 - DNA, 366 bp, Serratia marcescens
atgacagctattaaacaatacgaaataacctggaatgcccatgaggacgctcctgtccttactgttgagattgatcatgatatttgcacctatgagcatcttcatcaaatcaataatttcttcaccggacacaagcatcgcctgagtgataacgacggtgatattacggtgacggtgctaaaaatgctggccgctgaatgctttgtacaacaggtgtcagaaggctggaatgcatatgggttaatttgccagtttaaggatggcaataatgaaggttggccgccaatggatggctccaacgggatcaagattatttcttgtgatgtgccgggggttaactgggacgatatggaagtgtcgtggtaa

SEQ ID NO: 445710 - DNA, 849 bp, Serratia marcescens
  misc_feature (785)..(794): n is a, c, g, or t
atgaataaatcaatacttatcataactcagtattactctatcggcgggttagagacctatatagacacccaggtaaaggatctggttgcccacggttatcaggtacatcttatgtctgccgctgtagcagactcgacattattgcccgaagaactgagctcataccatgaaaattccgatttgaatataggctcaatcagccagctcattcaggcgatcgacacgatacgtcaagtaatcaaagaaaaggatattgatctcgttcatgttcacccctttgattgcattttccccgcagtgattgctgcagattgtgagaaaattccctcgctattgacgctgcatggaccactgtcgctgcaacatttcaccaagaacatttataatcaaacgctggccatctactttctaaagacactgcaaacaatattctgcgtgtctcaagaaatagcagaccaactggcggaaattatcgaccatccgtcggtcatgatcgtccctaatctgatcgataataatcaaattcacaacacagagatagagtgccctgagaataaaagctggctgattgccagcagattagatagtgacaaatccgatggtattataagcttcatcgatttcgcaagccgctgcgaatccataagcggcttagatatttatggggacggtgataatgcacacctaattagaacttatgtaagtgataacggttacaatgagtgggttcattttaaaggtatcgtgagcgatattcccgcagtgatgaaaaattatgctgggtnnnnnnnnnnatgggacgtggcgtacttgaggcgggttttagtcagcttcctatctgcctggtag

SEQ ID NO: 445711 - DNA, 903 bp, Serratia marcescens
gtgtggcaaaacgtttaccaagtgcctttgtatgaattcgtcaactttaccaaacaatgcaaattgaatggtaaaacggcgctattcatcattactctgccagcacaggtatttataccagctatctacgatttcagagcgcaaggctgtcacattgcttacgatatcatggatgagtgggagtgcttcaatcaagtgggccaagcaccttggtatctgcgagaagcggaagaaactatcatattacaaagtgattatgtatgtggcgttgctccatcactgcgcgataaattctcctcgctccgaagtgatattgaggttattggcaacggttactcagagaacgtattgggcgatacacgaaatatcgcgcagagcacctcaaataaagtgggttacttcggccaccttacggactcctggtttgactgggatatcatttttaaactagccgaacataaccctcagtatcattttgaaattattggttatggcgagcccgaatgggttgtcgaaaaagtgaagcattttaccaacatcatgctagttggtaaagtgatgccgaaagatctccatcaatatgttaaagaatggtcgatcgggttaatccccttcaaaagtggtgagcttgcccaagcggtagatcctattaaaatatatgagtacctttattttggtttgccaacgttggtaacaggtatcgaacatattaaacgctatccgatgacttatttttccgacggaagtgatatccttgagttgtttaataaaacattaaattgcgagcgaaactcatccgaacttgaaacattcctgaaagaaacaacctgggcagccaggttcaaaaaaatggagtcagacattttgactcaaaatggaatcggagaactttatgcttcgtaa

SEQ ID NO: 445712 - DNA, 537 bp, Serratia marcescens; identical to SEQ ID NO: 149246

SEQ ID NO: 445713 - DNA, 396 bp, Serratia marcescens; identical to SEQ ID NO: 149247

SEQ ID NO: 445714 - DNA, 252 bp, Serratia marcescens; identical to SEQ ID NO: 149248

SEQ ID NO: 445715 - DNA, 687 bp, Serratia marcescens
atgaacaagagcgccgccgctggcctgctgggctatgcccgcgtcagcaccgacgaccaggacttgaccaaccaacgggccgaactgcacgcggccggctgcaccaagctgttttccgagaagatcaccggcaccaggcgcgaccgcccggagctggccaggatgcttgaccacctacgccctggcgacgttgtgacagtgaccaggctagaccgcctggcccgcagcacccgcgacctactggacattgccgagcgcatccaggaggccggcgcgggcctgcgtagcctggcagagccgtgggccgacaccaccacgccggccggccgcatggtgttgaccgtgttcgccggcattgccgagttcgagcgttccctaatcatcgaccgcacccggagcgggcgcgaggccgccaaggcccgaggcgtgaagtttggcccccgccctaccctcaccccggcacagatcgcgcacgcccgcgagctgatcgaccaggaaggccgcaccgtgaaagaggcggctgcactgcttggcgtgcatcgctcgaccctgtaccgcgcacttgagcgcagcgaggaagtgacgcccaccgaggccaggcggcgcggtgccttccgtgaggacgcattgaccgaggccgacgccctggcggccgccgagaatgaacgccaagaggaacaagcatga

SEQ ID NO: 445716 - DNA, 216 bp, Serratia marcescens
atgaaaccgcaccaggacggccaggacgaaccgtttttcattaccgaagagatcgaggcggagatgatcgcggccgggtacgtgttcgagccgcccgcgcacgtctcaaccgtgcggctgcatgaaatcctggccggtttgtctgatgccaagctggcggcctggccggccagcttggccgctgaagaaaccgagcgccgccgtctaaaaaggtga

SEQ ID NO: 445717 - DNA, 630 bp, Serratia marcescens
atgaaggttatcgctgtacttaaccagaaaggcgggtcaggcaagacgaccatcgcaacccatctagcccgcgccctgcaactcgccggggccgatgttctgttagtcgattccgatccccagggcagtgcccgcgattgggcggccgtgcgggaagatcaaccgctaaccgttgtcggcatcgaccgcccgacgattgaccgcgacgtgaaggccatcggccggcgcgacttcgtagtgatcgacggagcgccccaggcggcggacttggctgtgtccgcgatcaaggcagccgacttcgtgctgattccggtgcagccaagcccttacgacatatgggccaccgccgacctggtggagctggttaagcagcgcattgaggtcacggatggaaggctacaagcggcctttgtcgtgtcgcgggcgatcaaaggcacgcgcatcggcggtgaggttgccgaggcgctggccgggtacgagctgcccattcttgagtcccgtatcacgcagcgcgtgagctacccaggcactgccgccgccggcacaaccgttcttgaatcagaacccgagggcgacgctgcccgcgaggtccaggcgctggccgctgaaattaaatcaaaactcatttga

SEQ ID NO: 445718 - DNA, 216 bp, Serratia marcescens
atgagcaaaagcacaaacacgctaagtgccggccgtccgagcgcacgcagcagcaaggctgcaacgttggccagcctggcagacacgccagccatgaagcgggtcaactttcagttgccggcggaggatcacaccaagctgaagatgtacgcggtacgccaaggcaagaccattaccgagctgctatctgaatacatcgcgcagctaccagagtaa

SEQ ID NO: 445719 - DNA, 1074 bp, Serratia marcescens
gtgagcggtcgcaaaccatccggcccggtacaaatcggcgcggcgctgggtgatgacctggtggagaagttgaaggccgcgcaggccgcccagcggcaacgcatcgaggcagaagcacgccccggtgaatcgtggcaagcggccgctgatcgaatccgcaaagaatcccggcaaccgccggcagccggtgcgccgtcgattaggaagccgcccaagggcgacgagcaaccagattttttcgttccgatgctctatgacgtgggcacccgcgatagtcgcagcatcatggacgtggccgttttccgtctgtcgaagcgtgaccgacgagctggcgaggtgatccgctacgagcttccagacgggcacgtagaggtttccgcagggccggccggcatggccagtgtgtgggattacgacctggtactgatggcggtttcccatctaaccgaatccatgaaccgataccgggaagggaagggagacaagcccggccgcgtgttccgtccacacgttgcggacgtactcaagttctgccggcgagccgatggcggaaagcagaaagacgacctggtagaaacctgcattcggttaaacaccacgcacgttgccatgcagcgtacgaagaaggccaagaacggccgcctggtgacggtatccgagggtgaagccttgattagccgctacaagatcgtaaagagcgaaaccgggcggccggagtacatcgagatcgagctagctgattggatgtaccgcgagatcacagaaggcaagaacccggacgtgctgacggttcaccccgattactttttgatcgatcccggcatcggccgttttctctaccgcctggcacgccgcgccgcaggcaaggcagaagccagatggttgttcaagacgatctacgaacgcagtggcagcgccggagagttcaagaagttctgtttcaccgtgcgcaagctgatcgggtcaaatgacctgccggagtacgatttgaaggaggaggcggggcaggctggcccgatcctagtcatgcgctaccgcaacctgatcgagggcgaagcatccgccggttcctaa

SEQ ID NO: 445720 - DNA, 930 bp, Serratia marcescens
atgacgcaaaccaatatccccgccgacgtgcgcgaacgcatcattgccgctgccgccgagctgtacgaacaggccggccgcgagaacttgccgaccgttgacgccgtgcgccgcgcagcgcgggctgacatgaacacaaccagcgccgtgatgcgggaatggcggcgagcgcagaccgcccaggcggccccggtggccgtcaccgtgccggaggtcgtcacccaagcgaacaccgccgccctggccgccttatggcagcaggcccaggaactggcgaacgagtcattgcgggccgcgcaagcggcatgggaaaccgagcgtgtcgagctggacaccatgcgccaagagctggccgacgcctacgaaacccaggcaaccgagcttgaccaggtgcgggccgccgccgaagcggccgaccaggcgcaccaggtacaaagtcagcaggtcgccggcgagctggccagcgtgcggacagaattggcccaggctgtcaccagggccgaacgtgcggaagcgaaggccgacgagatcgagcaccgtgcccgcgagctgcgggccgagctggacagggcacaccaggacgccgaccaggcgcgggctgccgtgaccgatgcgcagcaggctacccaggcagtgaccgcgcaactcgaccaggtacgcgccgaactggcgacggtcaaagccaaggcagaggccgccgacgagaagcaccaggagcagcgaaaggcggtcgcggtcgaggcgcacaagatggccgaacggctgaccgcgacccaggccgaacgcgaccaggccagagaggaagccggcagcgcccgcgagcgagccgccgagctggccggccagctcaccgcacaccaggaacaggcggccgcgttgctggcacgcctggcaccggccgaaaccaaaacacccagggcgaagaagtag

SEQ ID NO: 445721 - DNA, 375 bp, Serratia marcescens
atggcggcagagaacgacaaaccaacgcgcaagggcagcccgccgatcaaggtgtattgcctgcccgaagagcgggccgagatcgaggcgctggcgaaggccagcggccacagcgcatcgacttatttgcgcttggttgggcagggctaccaggtcaccggcgtgaccgattacgagaacgtgcgcgagctggtgcgcgtgaacggcgaccttggccggctgggtggtctgctgaaactttggctgaccgatgacgccaaaactgccgaaataggcgcggccaccatccgggcgctgttgggccgcatcgaggccaaccaggacgaaatgagccgccttatggaagctgtggtgcggccgagggccgcgccatga

SEQ ID NO: 445722 - DNA, 1788 bp, Serratia marcescens
atgattgccaagcacgtcgccatgcggtcgcttggcaagagcgattttgccgacctggcgaagtacatcaccgatgcgcagagcaaagaccatcggctgggcttggtggccgtgaccaactgcgaggcgttttcagtgcgggacgccatcaccgaagttctggccacccagcacaccaacacccgcgcccagggtgataagacctatcacctgatcgtgagctttcgcgccggcgaaaaccccgacgccgacacgctcaaggcaatagaggcgcgtatctgcgaggggctgggcttcggcgaacaccagcgcatcagcgccgtgcatcacgacaccgacaacctgcatatccatatcgccatcaacaagattcacccgacccggcacacgatgcacgagccgtattacccgcacctggcacttggcgagctatgcacgaagctggaacaggaatacggcctggaacgcgacaaccacgaaccgcgccaacggggtgcggcgtccagggcggcggacatggagcgtcatgccggcgttgaaagcctggtgggctggatcaagcgcgagtgcttggccgagatcaagggcgcgcagacctggcaggagctgcaccaggtcatgcgtgataacgggctggaaatcacgcctcgcggtaacggcctggtgatccgggccgaggacggtacgaccgtcaagccaagcacgcttgggcgggatctatccaagccagctttggaaaaacggctgggcacttttgagccgtcgcccgagcggcaggcagagccgaaacggcgatacaagaaagacccgatccgcttgcgcgtgaacacggtcgagttgtacgccaggtataaggctgaccagcagaacctgacggccagccgggcgaaggccctggacgtggccaggcagcgcaaggacaggaaagttgcagcggccaaggcatcggggagcatgcgccgcgctgcgatcaaacatatgacgcaaggccggctgaccaagaagctgttgtattcgcaggccagcaaggcgctgcgcgatgaaattcagacgatcaacaagcagtacctggcagagcgtcagggctgctatgagcagcacagccggcgcacatgggccgactggctcaagcaggaagccacccagggaagcggcgaggcgctggccgcgttgcgagccagagaggccgcccagggcctcaagggcaacaccgtccagggcgatggccaggccaagcccggacatgcgcccgtggtggacaacatcacgaagaagggcacgatcattttccgggccggcaagactgccgtacgtgacgatggcgagcgcctgcaagtgtcccgagaagccagccgcgagggcctgcaagaagccttgcgccttgcgatggagcgatatggcaaccgcatcacggtcaacggcacgaccgagttcaaggcgcagatcatccgcgccgccgtcgattcacaactacccatcacgttttccgacccggtcctggaagtccgcaggcaggcgctgataggcggtagtgatacgcctgccaagccgacgatcaagaagccaggcgttggcccggtagggcacgttccgccggcagcgcgtcagggccgattgcgcacgttgtcgcagatcgaggcgctgcacatcgagggcgcgagcatcccaacgccgaagcctgcaccgattccggcaatcaatgaccaggaacggcgaaaagcgaagctgcaagccgagttgaacgccaagaaagagaaggcgaaacagcggaaaggacgggggcggtag

SEQ ID NO: 445723 - DNA, 789 bp, Serratia marcescens
atgaagcacgtccgccttttagcggctaaaaccgcgctcgctgccgtcctggctggcagcatcatcaccattccggcacaggccggcatccctgttatcgacggtggcaacctggtgcagaacgttatgtctgcaatggaagcggttgcccaaactgccaagcaaatcgagcagtaccagacccaattgcagcagtacgaaaacatgctgcaaaacacgatggccccggccgcctatatctgggatcaagcgcaggcgacgatgaacaagctgttggctgcacaagacacgctggcctactacgaaaaccagcttggcagcctggatgcgtacctgagcaagttccaggacgtggcttattaccgtggctcgccttgcttcaatggtaccggcggctgcaccccggccgaacgtgcagcgatggagcaaaaccgcgccctggcgtccgagtcgcagaaaaaggccaacgacgccttgtttcagggaattaaagagcaacagaaagcattgacggccgatgcccgcacactggaacagctccaaggcaaggcgcagggtgcaaccggccagctacaggccatcggctacgccaaccagctcgccagccaacaggccaaccagctcttgcagattcgcgccatgttgcttgcgcagcagaacgcagtggctgccaagatgcaggctgatgccgacctggatgcgaagcagcaggccgcacatgctgcatctacagagtctcggatcgagaaaacggccgcgccgaaaaactggcttgatctgacccgctaa

SEQ ID NO: 445724 - DNA, 255 bp, Serratia marcescens
atgaacagcaaatgtacgacggtgctggctgccgtcttggtgctccttatagccggttgcgacaaccaacccgccatgcaggcactgccggcagtcaatgatgcgaactgccagatcgagaagatcaagcggatccagaataaggcagcaaggcaggaatttgcggggcaatgctcgcgtagaacaagcggcatcgcacccacagaaaaccccaaaaactggcttgagcttaccggcccggatggagggaaatag

SEQ ID NO: 445725 - DNA, 1800 bp, Serratia marcescens
atgaaggcgattcataaagcggcgctcattggcgcctgcgtcatgctgtattcggccggtgcggccgcacaactgaccaatcagggcgtgctcgaccaggtggtgacggagttctctacaaaggcgacaacgtggcaggccatcgtactcaatgcggcgacgtggctgttttggacactgggcactatttcgatggtctggacgttcggcatgatggctttgcgaaaagccgatataggggagttcttttccgagtttgtgaagttcattgtgtttttcggcttcttcctctggttgcttagaaacgggccagactttgcacactcgatcatccagtcgctacaaaaactcggtgagcaggccagtggcgtgtcgtcggtcacgccctctggcattgtcgatattggcttcatgatctggaagcaggccgtttcaaacctatcagcgtggagtccgatcgacagctttgtcggtgttgtgttgagcgccggaatcctccttttgcttgccgtcatcgcagtcaacatgctgttgctcttggtgtcggcctggatactcatgtacgccggcattttcttcctggggtttggtggctcgcgttggacgtccgacatggcgatcaactactacaagaccgtgctgggcatcgcagtgcagctattcacgatggttctattgatcggcattggcaacgatctgctgttgagtttttacgccaagatgagtaagggaacgctcaactttgaagagctgggcgtgatgctggtgttctgcgttgcgctgctgatgctcatcaatcgtgtgccgccactgctggccggcatcatcacgggcagcggcgtaggcaatgccggaggcatcggcaatttcggggctggtgccgctatgggcgcggctatgggtgcagccagcatggccggcgcagccgtggcaacgggcggcgcagccctggccgccggtgcggcatcagcagccggtggtgcgcaagccgtgatggcagccttctcgaaggccagcgaaagcgcatcgagcggcggtggcgacggcggcggtgatcttatgtctgctttcagcggtggtggtgatggcggcggcggtggaagcgctgaagccggcaccggcgacacgccctttgctcaagccgccggctttggtggcggtgacggcggcggtggcggtggtgacaccagcaccggcggcggggccgattcgtcgggcggcgatggcggcggcaagtccggcggcggtgcttcgtccagctcgggcggcggtactggcggcggcgagtcgtcgggcggtggtagttcctccggttcgggcggtggtttcctggcctcggccgccaaggcggggcgcgtcacggccgatgccggcggcatcttagccaagggcatcggttcggtggccaaggccaaggcatccagcatcaaggattccgcaatggagcggattgccgacacaaccggcggcaagatcgcagccgcgatcaaaggcagcgggacagaggctgtcggtgctggcgcgggtgcagctccggcagccccgagtgctggtagcgagttcaccggaaacaacctgggcggcgacgccggcggcggtggctggatcaaccaaaccggcggattcagcgagctatcggaagccgaccaggcgcaggcaatggagtcccatgccgaatggcaggccaacagtgaaggcaatacgttcggggtcgaggactatgtgtcgtatgcccaggagcgacagcaggagcgaaatgccgaagtcgctagtttcgtcaacaaaaacccaaggggttaa

SEQ ID NO: 445726 - DNA, 231 bp, Serratia marcescens
atggcaactcaacatactacccaagcaacgcaaacagtgcagcacgcagcaacgctactcgccggactgtcctggatagaccaggcccaggcgcggcagctttcgccgatggccgaggcagtggcaaacatgttcactctggtgtactaccaggccgaaacgggacggttgacccaagcggattttcaagaagcaatgaccgctgtacagcagtcactgcaaagagcgtag

SEQ ID NO: 445727 - DNA, 405 bp, Serratia marcescens
gtgaagctggtctggacacggccagcacacgctgacaggaagaaaatacgcgagtacatcgcgcagcacgcgccggcggccgcgctggccctcgatgaactgttttcagagaaagccggcttgctgctcgatcatcccggcctgggcaggactggccgggtgcctggcacccgcgagctggtggcgcaccggaattacatcctgatttacgacacggccggcgacgtggtgcgcgtgctgcgtgtgctgcacgctgccaggcagtggccaccgcgctacacaatgggcatgggcgaactgctggaaggggccgaagcctccggggcatatccactgccgccggaagaacgcgaatgggtggatgctcctacggtcggccgggaatggcccaacgacgagaattga

SEQ ID NO: 445728 - DNA, 294 bp, Serratia marcescens
atgagcgaagccacttttacctttcgggtcgatgaatccctgaaaaccgagttctccacggccgccaaagcccgcgaccgcagcagcgcccagcttctgcgcgacttcatgcgcgatttcgtgcggcagcaagaggaagcggccgcgcatgacgcctggttccgtcgccaggtgcaaatcggcctggactcggccaatgccggcgacgtgatcccggcggccgaagtggaagccgaagccgaagcctggcgggctgaaacgcgccggaagatggccagcgttgctacatcgtga

SEQ ID NO: 445729 - DNA, 1101 bp, Serratia marcescens
gtgaattttagctctgatctttttgacctgaacagtaaaagcccggctttcagtatcaccattgaaggtaaggacgtgaccaccgcgctggatgcgcgcctgatgagtctgacgctgaccgataaccggggttttgaggctgaccagcttgatctggagctggacgacgccgacgggcagattgttctgccgcgacgtggtgccgttattcagctggcgctggggtggaaaggccagccgcttttccctaaaggggcgtttactgtcgatgagattgagcacagcggtgctcctgatcgtctgactatccgtgcccgtagcgctgatttccgtgaaaccctcaatactcggcgcgaaaagtcatggcaccagacaaccgttggcgatgtggtaaaggaaattgcagcacggcataacctcaaaatggcgctgggtaaagacctgacggacaaggcgctggatcacatggaccagaccaatgaaagcgatgccagtttcctgatgaagctggcgcgccagtatggggcgattgcttccgttaaggatggaaacctgctgtttatcaggcaggggcagggaagaacagcgagcggtaagccgttgccggttatcactattgaacgtaaagccggtgacggtcatcgttttaccctggctgatcgtggtgcttataccggtgtaattgccagttggctgcatacccgcgaacccaagaaaaaagaaacaaccaaggttaagcgccgccggaagaaaaccaccgcgcccaaagagccggaagcaaaacagggtgattatctggtgggaacggatgaaaacgtgctggttcttaatcgtacttacgcaaaccgcagcaatgctgagcgtgcggcaaaaatgcaatgggagcgcctgcagcgtggtgttgcgtctttctccctgcagctcgctgagggccgagcagatctctacaccgaaatgccggtaaaggtgagcggctttaagcagcctatcgacgatgccgaatggaccattacaactttgacgcatacggtcagcccagataatggttttactaccagtctggagcttgaagtaaaaattgatgatttagaaatggaatga

SEQ ID NO: 445730 - DNA, 486 bp, Serratia marcescens
atgatgatggtgctggggttatatgtctttatgctgcgtacagtgccatatcaggagctgcagtatcagcgaagctggcgacacgccgccaacagtcgggtgaaccgacgaccatcaacgcagtttattggcccggataatgactcgctgacgttatctggcgtactgctgccggaggtcaccgggggcaggctgtcattactcgcgctggagcaaatggcagagctgggcaaagcatggcccctgattgagggaagcgggaccatttacggcatgtttgtaatcgagagcctgagtcagacaaaaacggaattttttgaaagcggaatgcctcgccgtattgagtttacactgaccctgaaaagggttgatgaatcgctgtctgatatgttcggcagtctcagcgatcagctcagtaacctgcaggactcagcaacgtctgcgataggtaatattaaaaatacggttggagggttgctgcagtga

SEQ ID NO: 445731 - DNA, 3075 bp, Serratia marcescens
atgagtgacaacaacctgcgcctgcaggtgattcttaatgcggttgacaagctcacccgcccattccgatccgcgcaggccagctcgaaagagctggctgcagccattcagcaaagccgcgcccgtttaaaagagttagatgctcaggcggggcgcattgacggtttccgcaaggccagcgcgcagttggcagtcaccggtaatagccttaaagccgcacgcgaagaagcggcgaaactcgccacacaattctctgccaccaaccgcccgacggcagcgcaggcgcggctgcttgagcaggcaaaaattcgtgttacggagttgcagagcaaatataacggtctgcgtcaatcggtgcagcgccagcgtcttgcgctcaatgaagccggactggacacgaaaaagctcagtagtgcgcagcgggaactacggcagaatgccgacgaaacccggcaggcgctggaccggcagcagaaatcccttaaacgcctgggcgaacagcaggcgcgaatgaacgctgtccgcgatcagtattcgcgccgtcttgaggtacgggatcgcatcgccggggcaggggctaccaccactgctgcagggctggcaatgggcgcgccggtcatggcagcggtgaaaagctacgccagcatggaagatgccatgaaaggtgtggcaaagcaggtaaacgggctgcgggacgataacggcaaccgcacgacacagttttatgacatgcaggatgccatcaaggccgccagcgaacagctgccgatggagaacggcgctatagactatgccgcactggttgaaggtggtgcgcgcatgggcgtgaccaaacaggacgatccttacgaagaccagaagcgtgacctgctagcctttgcctccacggcggcaaaagccgcaacggcctttgagctacccgctgacgagctggcggaagggctgggtaaaattgcgcagctgtataaagtaccgacccgcaatattgaacagctgggcgatgcgcttaactacctggacgataacgctatgtcgaagggcgcggatattatcgacgtgctgcagcgcatggggggcgtggctgaccgcctggactatcgaaaagcggcggcgcttggttccacgttcctgtctcttggcgctgcgccggaaattgccgccagcgcctcgaatgccatggtacgcgagctgtcaattgcgaccatgcaaagcaagcggttctttgagggtatggatctgcttaaactcaatcccgctgagattgagaagcagatgacaaaggacgcaatggggaccattcagcgcgtgctggagaaggtcaacaaactgccgcaggacaagcgcctgtccgccatgacgatgatatttggcaaggagtttggcgatgatgcggctaagcttgcaaacaacctgccggagctgcagcgccagttgaaactcacatcaggcaatgaagcgaacggctccatgcagaaagaatctgatatcaacaaagactctttatctgcgcagtggttgctggtcaaaacaggggcgcagaacgctttcagtagtctgggtgaaacgctgcgccagccactgatggacattatggattccgtaaaacgcgtcaccggcgcattacgtcgctgggtggaggccaacccgcagctggcaggcacgctgatgaaagttgctgcagcgactgccgcgatcaccgttgcgctcggcacactggcagtggcgttagctgctgtgctggggccgctggcggtgatccggtttggcatgtctgtgctgggtgtaaaaactttaccttctgttactgccgcagtgacccgcaccggcagtgcgttgtcatggctggcaggcgctccactttccctgttgcgtcgtggtatggcctcatccggcggcagtgccgggctgctgagcgctccccttaattccctgcgacgttccgccggactggttggcaacgcactgaaagcggtagcaggtgcgccgcttaccatgctacgcgcgggaatgtcaggtattcgtaatgttattggtatggtgatgaatccgctggcggcgctgcggggtgggttatctgctgccggtggcgtgctgcgttttctggtatccggtccactggcattacttcgtgtcgcgctatatggcatttccggcctgctgggtgcgttacttagtccgatagggctggttgtggctgcgctggctggcgtggcgctggttgtctggaaatactggcagccgatcagcgcatttttgggtggtgtggtggagggattcaaagccgctgctgcaccgatcagtgctgcctttgagccattgcggcctgtttttcagtggattggcgacaaggtgcaggctttgtgggggtggttcactgatttgcttacgccggttaaatccacttccgaagaactgaacagcgcagctgcaatgggccgcaggtttggtgaggcactggcggaaggtctgaatatggtgatgcacccgcttgagtctctcaagtcaggcgtgtcgtggttgctggaaaaactcggcatcgtcagtaaggaagcggcaaaagcaaaactacctgaacaggttacacgacagcagcctgctacggtgaacagtgacggtaaggtggtgttgccgcctggcggatttccgtcgatggggtttgcaggcatgtatgacagcggtggcacgatcccgcgtggtcagtttggcatcgttggggagaacggccctgaaattgtgaacggccccgcaaatgtgaccagcaggcggcgcactgccgcgctggcttccgtcgttgcaggtgtcatgggcgtagcggcagcgcctgcagaggctgctccactacatccttacagcctgcctactgtggcatataaacaaagccagcctgcgaaatctgccagcgcgccgccagtgatgcactttgaaactcacgcgccgatcactatctatgctcagccagggcagagtgcgcaagatattgcccgtgaagttgcccgacagcttgacgaacgcgagcgcaagaccagggctaaagcgcgcagtaatttcagtgatcaagggggatatgaatcatga

SEQ ID NO: 445732 - DNA, 303 bp, Serratia marcescens
atgagcgataagctgactgaaaagaccgtaaaactggatacccccatcatgcgcggtaaagctgaaattaccgaaattgtgctgcgtaagccgcagtccggcgcactgcgtggcacccgtctgcaggccattatggatatggacgtgggtgcgatgatgaccgtgatcccgcgaatctccaccccgacgctgaccgcacaggaaatggcagagctggaccccgccgatctcaccgcgttgtcggttgaggtggtgacttttttgttgaagaagtcggtgcttgccggtttaccgacagcctga

SEQ ID NO: 445733 - DNA, 516 bp, Serratia marcescens
atggctttaccacgcaagttaaaacacctgaacctgttcaacgacgggaataactggcagggcatcgttgagtctctgaccctgccgaaattcacccgcaagtttgagaagtatcgcggcggcggtatgccgggcgcggtggacgtggacatggggctggatgacggcgcactggacacggaattttcaatcggcggcaccgaactgctgttatttaagcagatgggcaaggccacggttgacggaatccagctgcgtttcaccggctccattcagcgtgacgataccggcgaagtgcaggccgttgagctggttgtgcgcgggcgtcataaagaagtggattccggcgagtggaaaaccggcgagagcagcaccaccaaggtcagcagcaccaacagctacgcgaagctgaccattaacggtgaggtgctctatgaggtcgatctggtcaacatggttgaaattgttgacggcgtggacctgatggaagaacaccgtaatgcccttggcctctga

SEQ ID NO: 445734 - DNA, 1173 bp, Serratia marcescens
atggctcaggattaccaccacggggtgcgcgttgttgaagtcaacgagggcacccgatccattaccacggtgagcaccgccatcgtgggcatggtctgcaccggcgatgatgctgatgcgtccatgtttcccctcaataagccggtcctgctgaccgatgtgctgaccgccagcggcaaagcgggtgagtccggcacgctggcccgctcgctggatgccattgccgaccaggctaaacccgtgaccgtcgttgtgcgcgtggcacagggcgaaaccgaagcggaaacaacctccaacattatcggcggtgtgaccgctgacggtaaaaaaacgggtatgaaagcgctgctttcggcgcagtcgcagctgggcgtcaagccgcgcattctcggcgtgccggggcatgacacgcaggcggttgctactgagctgttgagcgtggcgcagagcctgcgcgggtttgcctacttgtccgcttatggctgcaaaacggtagaagaagcgattgcctaccgtgacaatttcagtcagcgcgaggggatgctgatctggcctgacttcatcaactttgacaccgtgctgaatgcagacgcgacggcttacgcctccgcccgtgcgctcggcctgcgtgccaaaattgacgagcagaccggctggcacaaaaccctgtccaacgtgggcgtgaacggcgttaccggcatttccgctgatgtgttctgggatctgcaggacccggcaaccgatgcgggactgctcaaccagaatgacgtcacgacgcttatccgcaaagacggcttccgcttctggggttcccgctgcctcagtgacgatccactgtttgcttttgagaactacacccgcacggcgcaggtgctggctgacaccatcgcagaagcgcacatgtgggcggtggatggcgtgctcaacccgtcgctggctcgcgacattatcgaaggtatccgcgccaagctgcgcagcctgaaaacgcagggctacatcatcggcgcagactgctggctggatgagtcggtgaacgataaagactccctgaaagccgggaaactcactatcgactacgactacacgccggtgccgccgcttgaaaacctgatgctgcgccagcgcatcaccgatcagtacctgctggatttctccagccaggtcagcgcgtaa

SEQ ID NO: 445735 - DNA, 597 bp, Serratia marcescens
atgcagtcagcaaaactggaatatggaattgccaccgtggcaggagaggttgttgtatttaactatgacggtgtaaccagagtgtatttatcatccaccacggagtatctgccagtaggagtgggacttccggcaaatgcctgtacggatgaaccacctgaacctaaaaaaggttttgttatttgtcgtaacctgaaaggggatagttgggcgtatcagccagatcatcgcggagaaactgtctggaatactcaaaccggtgagtctgaagtggttgcgctaccgggggattatccgacgggcacaacaaccattccacctgtaacaccctatgatgtatgggatggtgagaaatgggcgactgatgaaggtgcgaaaaatgctgcggaagttgcggcagcagaaagtaaaaaatacatgcttattcagtctgccgggaacagtattaacccgctgcaggatgccgttgagctgggcatagcaaccgacgaagaaaagagccgctatgatgcctggcgaaaataccgcgtattgctgacgcgcgtggatacatcgctggcaccggatattaactggcccgatccgccagaagattaa

SEQ ID NO: 445736 - DNA, 1314 bp, Serratia marcescens
atgagcgcaaaattttataccctgctgacggatatcggcgcggcgaaactggcaagcgccgccgcgctcggtgtcccgctgaaaattacccagatggcggtgggcgacggtggcggagtgctgccgactccaagcgcacagcagacagcactggttgctgaaaaacgccgcgcttccctcaatatgctgtacatcgatccgctgaacagtagccagattattgctgagcaggtgatccccgaaactgagggcggttggtggattcgtgaggtcggtctgttcgatgaaaccggcgcactgattgccgtcggcaattgccctgagagctacaagccgcagctggcggaggggagcggacgcacgcagaccgtgcgcatggtgctgattaccagcagtaccgataatatcaccctgaaaattgaccccgcagtggtgctggcaacccgcaaatacgtggatgacaaggtgctggagttgaaggtgtatgtggatgatttgatggcaaagcataccgccgccagcgatccccatacgcagtatgcgccgaaagccagtccgacattcaccggcacgccaaaagcgccgacggcggcggcaggcaataattccacgcagcttgcaaccacggcctttgtgcaggtagcgattgcggcactggttgactcatcgcctggcgcgttggatacgctgaacgaactggctaaagcattaggcaacgatccgaactttgccaccaccatgaccaatgcgcttgccgggaaaatggataaatcagctaatggcgcagatattgccgatatttccgcgtttctgaataaccttggtctgggggctggctccgccctgccggttggtgtgcccgttccatggcctcttgctacagcccccgcaggctggctgaagtgcaacggtgcagcctttactgctgcgcagtatccgaagctggctcaggcgtatccggggctaaaacttcctgatttacgcggtgagtttattcgcggctgggatgacgggcgcgggattgatgccggaagggggattttgtcagcacaaagtcacgatttagggccgcatgttcaccgctatgggttctggacggcacgccttaatgattcgtctttagcagatttcgcgggaacgacgattttaaagcaaattacgccgtccatgcctgtcattgattttgataattattcattacctaattctgtgattaccgacggtggtgttgtgagtgcgtccactcagccaatgagcagcactgaaacgcgcccgcgtaacgtttcatttaactttatcgtgagggccgcataa

SEQ ID NO: 445737 - DNA, 606 bp, Serratia marcescens
atgaatagcctgctgccgcccggttcatcgccgcttgagcgccgactggcgcagacctgcagcggtatttccgatctgcaggtgccgctgcgcgacttgtggaacccggcaacgtgtccggtcagctttctgccgtatctggcgtgggctttttccgttgaccgctgggacgaaagctggacggagagcgtcaagcgccgggtggtgcaggatgctttctatatccatcagcataagggaacaaccagcgccgtgaggcgcgtggtggagccatttggctttctgatccgcatcattgagtggtggcagaccggcgagcagccgggcacgtttcgactggacattggtgtgcaggatcagggcatcacggaagaaacctatctggagctggagcgcctgatcggtgacgccaaaccctgcagccgccatctgatcggcatgtccattaacctgcagagcagcggcccctattttgtgggcgcagccacctacaccggcgaagaaatcacgatctacccgtatatcaacgaaaccattatttccggcggcaccgcttacgagggcggggcggtccatgttattgacacaatgagagtgaatccatga

SEQ ID NO: 445738 - DNA, 909 bp, Serratia marcescens
atggcagtgattgacctttcccagctgcccgcgccgcagatagtggacgtgccggattttgagacgctgctggctgagcgcaaggccgcttttgtggccctttatccggctgatgagcaggacgcggtgcggcgcacgctggcgctggaatcagaacccgtcaccaagctgctgcatgaaagcacctaccgcgaaatccttttgcgccagcgtattaacgaggccgcgcaggcggtcatggtggcatatgccatcggcggcgatctcgatcagctggcagccaactacaacgtgaaacgcctgacggtaacgcctgccgacaacgacgcggtgctgccggttgctgctgtcatggaaagcgatgaggcgctgcgcctgcgtgttccggctgcgtttgagggtttgtccgttgcggggccgacggcggcctatgagtttcacgccaaaagcgcggacgggcgcgtggcagatgccagcgcaaccagtccggcaccggcggaggtggtgcttaccgtgctgagtcgtgagggtgacggtacggcaggggctgaactgctggcggtggtggagcaggcgcttaacagcgagaacgtgcgcccggtggcagaccgcctgacagtgcgcagcgccgaaataattccgtaccgcgtggatgcgacgatttttctttatccggggccggaagctgagccggtgatggcggcagcaaaagccagcctgcagaagtacatcgccagtcagacgcggctgggccgtgatatccgccgtagcgccatttatgccgcgctgcacgttgagggcgtccagcgtgtggaactggcgtccccgctggctgatgtggtgctggataagacgcaggcggcgtcctgtacggaatggagcgtaaccaacgggggcacggatgaatag

SEQ ID NO: 445739 - DNA, 360 bp, Serratia marcescens
atgacgctgtatatcggcatgagccagggcaacggcaaggccattactgatactgaccatctgcgccagtcagtgcgggatattctgctgacgccgcagggcagccggattgctcgtcgggaatatggttccctgctgtccgccctgattgaccagccgcagaacccggcgctgcgcctgcaggtcatgtctgcggtctatgtggccctgagtcgctgggagccacgacttacgctggattccatcaccatcagcagcaattttgacggttccatggtggttgagcttaccgggcagcgcaataacggcgagccggtttccctttcggtatcaacaggagcagacaatggcagtgattga

SEQ ID NO: 445740 - DNA, 579 bp, Serratia marcescens
atgaatgcacaactgaccgaaataatgcgccttatcaccaacctgatccgcaccggtaccgtgaccgaagtggaccgggaaaactggctgtgccgggtgagagtgggcgagcttgaaaccaactggattaactggctgacgctgcgtgccggtggtgcccgtacatggtggtgcccgtcgccggatgagcaggtggtggtgctgagcatgggcggcaatctggaaactgcttttgcgttgcctgccatctactccaatcagtttgcgccgccgtcggattccgtggacggttgcgtgacggagtacccggacggaggctggtttgagtatgaacccgccactgggcggtggcatgtcaggggtatcaaatccatggtgatcgaggcggcggacaatatcacccttaaaaccggtgagtttgtggtggaggctgacaccacgcgcattaacagcgaggtggtgatcaatggcggcgtcacccagggcggcggcgcgatgagttccaacgggatcgtggtggataaacacggtcacaccggcgtgaagtcaggcagcgatacgtcaggaggcccggtatga

SEQ ID NO: 445741 - DNA, 447 bp, Serratia marcescens
gtggatgagctgcagagggtggatgactggctgacggcgctgctggcaaatctggagcctgctgcacgcagccgtatgatgcggcaactggcgcaacagctgcgccggacgcagcagcagaacatcaggctgcagcgtaatcctgatggcagcggttatgagccgcgccgggtgacagcccgcagcaagaaggggcgcatcaaacgccagatgtttgcaaagcttcgcaccacaaaatacctgaaaaccgccgccagtgcggactccgccagcgtgcagtttgatggcaaggtgcagcgcattgcccgtgttcaccattacggcctgcgggatcgcgtcagccgaaaaggcccggaggtccgctacgcagagcgccgccttttgggcgtgaatgatgaggtggaaaccatcacccgtgacactctgctacgctggctggcggggtga

SEQ ID NO: 445742 - DNA, 432 bp, Serratia marcescens
gtgaacaaaccgcagtccttacgcagcgctctgaataaagcggttgcctatgtccgggacaatccggacaagctgcaccttttcgttgataacggctcactggtggcaaccggtgccagctccatgtcatgggaataccgctacaccctgaacgtggtgatcgaggatttcagcggcgaccagaatctgctgatggctccagtcctgctgtggctcagtaccagccagccggacgccatcaataacccggatctgcgcgaaaaactgttcacctttgaagtggatattctgcgcaacgatgtgtgcgatatcagcctgaacctgcaactgactgagcgtgtgctggtcagcactgacggcagcgtgtcgagcgttgaagcggtgccggagccggacgaacccgaagaaatgtggacggtgaaacgtggatga

SEQ ID NO: 445743 - DNA, 426 bp, Serratia marcescens
atgcgtgcgctggcggtagtgctggcgctggctcttgcggcgctgggctggcagtcatggcggcttaacaatgccagccacaccatcgaaacgcagggcgcggcgctgaaaagaaaaacgcaggagctgacgaagaaaaacagccagctgatcggcctgtccattctgactgaaaccaacagccgggagcagacgcggctttatgcggcagcggaacagaccaccgcactactgcgcagccgccagcaccggatcgaggaactgaaacgtgaaaacgaggatttgcgccgctgggctgatactcctttgcctgctgacattatccggctgcgggagcgtccggccctcgccggaggtgcagcttaccgtgagtggctgtcccagagtgacgcagtgccgcctggaaaggtcagcgccgcgcagtaa

SEQ ID NO: 445744 - DNA, 378 bp, Serratia marcescens
atgaaaaagaaagtcatgagcgtttttttccagctggcatgggctgcgctgttggttatcagtctgctgtatccgcgcagcggtgcgccggttctggttggtgcgtctgtctgggtgtcatgcttcctcgcctggctgcttgctgcgctgtgcgctgtcgggtggttcgccggagatcgggcacgcgatgaggtcagggcggcattgctgaaattcagggcgcaccccgtaaaacccatacgcacatgggtaatcaggctgcttattgttctgtgcctggcgttttcgggatgggtgatcaccctggtgttttacctgctgacgctggttttgtatcagattgcccgcgcgcagtttcatgagccgatggcagcctga

SEQ ID NO: 445745 - DNA, 510 bp, Serratia marcescens
atgaatccttcaatcgttaagcgctgccttgtcggggcggtgctggctatcgccgccacgctgcccggtttccagtcgcttcatacctccgtcgaggggctgaaactgattgccgattacgagggatgccgcctgcagccttatcagtgcagtgcgggcgtatggactgacgggatcggcaatacgtccggtgtggtgccggggaaaactatcacggagcggcaggcggcgcagggacttatcaccaacgtgctgcgcgtggagcgggcactggataaatgtgtggtgcagccgatgccgcaaaaggtctatgacgcggtggtgtcgtttgctttcaacgtgggcaccggcaacgcctgcagctccacgctggttaagttgctgaaccagcggcgctgggtggatgcctgccatcaactgccgcgctgggtatatgtcaaaggtgtgtttaatcaggggctggacaaccgccgcgcgcgggaaatggcctggtgcttaaaaggagcataa

SEQ ID NO: 445746 - DNA, 216 bp, Serratia marcescens; identical to SEQ ID NO: 76037

SEQ ID NO: 445747 - DNA, 204 bp, Serratia marcescens; identical to SEQ ID NO: 76036

SEQ ID NO: 445748 - DNA, 465 bp, Serratia marcescens
atgaagtttgttgcgcccgaacaggcaccggaacaggcggaggtcataaaaaatacgccgttctggcctgatgtggacctgtcggaatttcgcagtgtgatgcgcactgatggcacggtgacgcagccgcgtttaaagcaggtcgtgctgacggcgatctctgaggttaacgctgagctgtacgacttccgcaaccgtcagcagatgctgggctggcggacacttgctgaggttcccgcagaaatgctggacggcaaaagcgagcgtatccagcactaccacaacgccgttttttgctgggcgcgcgccgtgctcaatgagcgttatcaggactatgacgccacggcgtcaggtgtgaagcgaggggaggagctggcggaggccagcggcgatctgtggcgtgatgcccgctgggctatcagccgggtgcaggatgcaccgcactgtacggtggagcttatctga

SEQ ID NO: 445749 - DNA, 651 bp, Serratia marcescens
atgagcctgagtcccgcacggcagcaccgcctgcgcattcaggccgaacaggccgcccgtgagggcggcagtgttcgccatgcgtcgggctatgacctgatgctgctgcagctggcagaagaccgccgccgcctcaagggcgtccagtccacggtgaaaaaggcggaaatcaaggtggagctgctgccgaaatattccgcatgggtggagggcgtgctggctgccggaggtgcgcagcaggatgacgtgctgatgtacgtgatgctgtggcgtatcgacgccggtgattatgccggtgcgctggaaatcgggcgtcatgcactgcgccatggctgggtgatgccgctgggcaaccgtaacgtgcaaaccgtgctggcagaagaaatggcagacgcggcgcaaagcgctctgctagccgctgccggttttgatgccgatctgctcctgcagacgctggacctgacaaccgatctggatatgccggaccagtcgcgggcgcgcctgcataaagccatcggcgctgtactgagcgaaagcaacccggcatctgccctgaatcaccttacccatgcgctgcagctcgatccccgctgtggcgtgaaaaaagaaaagcagcagctggagcgcagactgcgcaatgacagccgctaa

SEQ ID NO: 445750 - DNA, 1062 bp, Serratia marcescens
atgaaaaagaaaacccgctttgcctttaacgcttacctgcagcagctggcgcgcctgaacggtgtggagattgaagaactctccagcaagttcaccgtggagccgtccgtgcagcagacgctggaagaccagatccagcagtctgccgctttcctgacgctgattaacatcacgccggtcactgagcagtccgggcagttgctggggctgggcgttggcagcaccattgccggaaccaccgataccaccaccaaagagcgcgagcctaccgatccgacgctgatggaagacgtggaatacaaatgcgaacagaccaactttgacacggtgctgacctacgcaaaactggacctgtgggcgaagttccaggacttccaggtgcgtatccgcaacgccatcgtcaagcgtcaggcgctggaccgcatcatgatcggctttaacggcgtgaagcgcgccaagacgtccaaccgtgctgaaaacccgctgctgcaggacgtcaataaaggctggctgcagaaaatccgcgaagacgcgccggatcacgtcatgggaagcaccacaaaagacggtgcaacgactgcaggcgcggtcaaagtgggcaagggcggcgactatgccaacctggacgctgtggtgatggatgccgtcaacgagctgatcgacgcggtttatcaggatgatgacgatctggttgtcgtctgcggacgtgaactgctgtctgacaagtatttcccgctggtcaacaaagagcaggacaacagcgagaaaattgccgccgatctgatcatcagccagaaacgtatgggcggcctgcaggccgtgcgtgcgccttacttcccggcaaatgccctgctgatcacccgtctggataacctgtccatctactggcaggaagacacccgccgccgttctgttatcgacaacccgaaacgtgaccggattgaaaactttgaatccgtcaacgaggcgtatgtggtcgaggactaccgctgcgcggcgctggtagaaaacatcgaaatcggtgatttcagcgcgcctgccgcaccggaaggtggggaataa

SEQ ID NO: 445751 - DNA, 834 bp, Serratia marcescens
atgacagtgaaagcaaagcgtttccgtatcggggtggaaggtgccaccactgacgggcgcgaaatccagcgtgaatggctggtacagatggctgccagctacaacccgacggtctataccgcgctgattaaccttgagcacatcaagtcttatctgccggacagcacatttaaccgctacggcagggtgacggggctggttgcagaagaaatcaaggacgggccgctggcgggcaagatggcgctttatgccgatatcgaacccacggacgccctggtggaactggtgaagaaaggccagaagattttcacctccatggaggtcagcacaaagtttgccgacaccggcaaagcctaccttgtggggctgggtgcgacggacgatccggcgagccttggcaccgaaatgctggcattcagcgccagcgccgcgcataacccgctggcgaaccgtaagcagaaccctgaaaacctgttttcggaagcggttgaaacgctgatcgaactggaagaagcccaggacgaaaagccgtccctctttgcccgcgtcaccgcgctgttcaccaaaaaagagcagaccgatgaggcgcgtttctccgacgtgcataaagccgtggaactggtcgccaccgagcagcagaacctgagcgagcgcacggataaatccctgtccgaacaggacaagcgcctttctgagctggagtcctccctgcaggagcagcaggccgcctttgccgagcttgagcaaaagctgagcagcgaagacagccgtaaagactaccgccagcgcgcgccgggcggtgacgcaccggcaggcaccctgaccaattgctga

SEQ ID NO: 445752 - DNA, 1719 bp, Serratia marcescens
atgctgctgtactttcagggataccgcgtagcccgcattgctgaaatgctgggcgagaaagttgcaaccgttcacagctggaagaagcgcgacaaatggggcgactatgggccgctggatcagatgcagctcaccaccgccgcacgttactgccagctcattatgaaggagcagaaagaaggaaaagacttcaaggaaattgacctgctggcgcgccagtcagagcgccacgcccggatcggtaaatttaacgatggcgggaacgaagcagacttaaacccgaacgttgccaaccgcaacaaaggcccgcgcaggcagcccgaaaagaatgttttcaccgacgaacagatcgagaagctgcaggaagttttccacggctcgatgttcgcataccagcgccactggtacgaggcaggcaaccgccaccgtatccgcaacctgcttaaatcgcgccagatcggggcgaccttcttttttgcccgtgaggcgctgattgacgccatcactacggggcgaaaccagattttcctctcagccagtaaggcgcaggcgcacgtctttaagcagtacatcatcgactttgcaaaagaggtggatgttgagctgaaaggcgacccgatgaccctcagcaacggcgcgtgcctgtacttcctcggcaccaacgcccgcacggcgcagagctaccacggcaacctgtaccttgatgagtatttctggataccgaaattccaggagctgcgcaaggttgcctccgggatggccattcacaagaaatggcgacaaacctacttctccacgccgtccagcctgacccacagcgcctatccgttctggtccggcgcgctgttcaaccggggccgcgccaaagcagacaaggtggacattgacctgacccacagcaaccttgcgcgcggcgtactctgcccggacggacagtatcgccagatcgtcaccgtggaggatgcggtgcgcggcggctgtaatctgttcgacctcgaccagctgcgcatggagtacagcccggacgaataccagaacctgctgatgtgcgaatttattgacgatctggcgtcagtattccctctcagcgagctgcaggcgtgcatggtggacagctgggaagtgtgggcagattttcaggcgctggcgctgcgcccgtttggctggcgcgaagtctggatcggatacgacccggcgaaaggcacgcagaacggtgacagcgccgggtgcgtggtggtggcaccgccaactgtgccgggcggcaagttccgcattcttgagcggcaccagtggcgcgggatggatttccgcgcccaggctgacgccattaaaaaactgacgcagcagtacaacgtgacctatatcggcatcgactcgaccggcgtcggtcacggtgtctacgagaacgtgaaagcgttctttcctgccgtgcgggagtttgtctacaaccccaacgtcaaaaacgccctggtgctcaaggcatacgacattatcagccaccgccgtctggagtttgacgcgggacacaccgacattgcgcaatcctttatggctatccgccgggccaccaccgccagcggcaatcgcccaacctatgaagccagccgcagcgaagaagctagccacgcggatttggcctgggcaacgatgcacgcactgtttaacgaaccgctgcagggcgaagccgccaataccagcaatattgtggagattttctga

SEQ ID NO: 445753 - DNA, 1035 bp, Serratia marcescens
atgggaaagagtaagaagaaccgcgctgcagctaatcagagcgttcaacagagcagcggcatgtctgcagaagctttcagctttggcgacccgatacccgtgctggaccgccgggaattgctggactatgtggaatgcgtgcagatggaccgctggtatgagccgccagtgagctttgacggactggcgcggacctatcgcgccgccgtgcatcacagctcaccgattgccgttaagcgtgacattctcagcagtacatacattcctcaccgcctgctcagccagcaggcttttgcccgtttcgtccaggactatctggtgttcggtaacgcctatctggaaaagcgcaccaaccggctcggcggcgttctctcgctggagccagcactggcgaagtatacacggcgcggcgtggacctcgacacctactggtttgtgcagtatggcatgaccacgcagccctatgaatttacgcagggcaacatctttcatctgctggagccggatattaatcaagagatttacgggctgcccggatatctctccgccatcccatcaaccctgctcaacgagtccgcaacactgttccgccggaagtattacatcaacggcagccatgcgggtttcatcatgtatatgaccgatgcagcacagaatcaggaggacgttaacaatatccgccaggcaatgaaaagcgccaaagggccaggcaacttccgcaacctgtttatgtactcgcccaatggtaaaaaagacggcatccagatcatcccgttgtcggaagttgcggcaaaggatgagtttcttaacatcaagaacgttagccgcgatgacatgatggcagcgcaccgcgtgccaccgcagatgatgggaattatgccgagcaacgttggtgggtttggagatgtggaaaaagctagtcgagtattcgttcgtaatgaattgattccacttcaaaaaagattaatggaattaaatgaatggcttaatgacgaaattattcgttttgacgaatataaattaggcgatgcttga

SEQ ID NO: 445754 - DNA, 849 bp, Serratia marcescens
atgttggtacgaggaacatcatggcgtcaggggcatgttcttaaacatgatgatgccgtttcacttggacttctgaagcctgatgaaacgaaccataaagttgtagttataacgcatgattgtgatttacagagtaattctgaaaaaaacgtggaactgatgtttggccccttgaaaaaggggtcaagcaagatgaaaagagctaagcatccgagaatcctcgatctatgctttgaaaacccagaaagtgctaagaagaacgcagtagagcttcggcatgaaagaaaagtcatcatttctaaagaagctttccgttgtgaggaaaacgatccggcattctccattagcacagaagagaaacaagctcttaagcaatggttagcagctaagtatggtcgtccagcatttcctaactcgtttgaagaacgcttgcgggcttacgacgaggataaaaagtttattttcgaaaaagaagttgcggacattatcgccacaaacgcagagcatttgatcggagtttttttcgatttgggcgaagaaagatttaacgatcttgaggaaggcataccatatgagctttctatcaatgttgtttatgatgcaactgaaggtggccccgatgccagaggggcggctgaacaaacctgttctgatctgaaggcattgttttataagttttatggtgatccaatcttgggacattcagagcttatagaattgaatacgtgcattgctgttgccgatactcatttctccctgtatgcattgaggcggatggatcaatggagggtggaatacatcagccttgaagaagattcatatggcgatttcattggtgccggtgtttaa

SEQ ID NO: 445755 - DNA, 663 bp, Serratia marcescens
atgtatgcaattcctactggaagcataggctctgtagatcggtatactccagattcgcagtcaagctcatgtgtatcaggtgttgttgctgtcgccgcatctttactattagttggtacgggggcttcataccctgtaaatgcttataagcaatggcgtcagtatgttcagccaagggttcagtttgcatttgattccatagagtcaacgtacacgcctgcaatttctcctgaggttgatgtcaggaatgttgcccaacatttggctaatattcgagaagtgctgtctccatcaatgtcagaactggctaaggatttggggataactcggcaggctctctataaatggttgtcaggggagaaccagcctgatgatgcttcaaaagtccaattcattaccaacctcagtaatgttgctgactctttttccaaagctggactcaatgatgcgaagctattggtgaaaatgaaagcattcaatggtaggtcattgatggacttagtaaaagaaggtgaggattggaacaagccagttcaggtactgattgatgaagctaaagcgatgaatgcagctgctgaatcggccaattacttagcaagcaaggcgaaaccgacagatgattggaagtcatctatttcaattcctggaacagtagaggaataa

SEQ ID NO: 445756 - DNA, 810 bp, Serratia marcescens
atgagtactaacagcaaacgtatgtccaatgcgcccgtttactacgcattggtgcaagtaaagtttactccagtagctgcaatgagtaagtatgttccagacatacaagatgcgctaagagttgaaggatttcctttatttgaagtttccaatacaactcagctgaaatttgaaatgaaaaaccccaatgagccaccggtacattcatttgagcctgtgacaagttggttgatgattgatgcagatagaaggtctggttttgttttaggcaatgatttcattacgttccatacaacggattatgataatcatgtacctttcatctcgtcattaatacttggtctgagcaaagttcttgaatttgctaagccatcgttggtaagccggattgggcttcgatatttggatgctgtgtttcctgagaaaagcgaaacaattgagcagtatcttgtaaaggaacttcatggtgttgattttggatggacgccaatacagtccatacaagagtctgtatatcagacatgtgttgagccattgatctctaatggatttatggtttcacgcatacataagatgaatggtcaactaggttttccgccagatatgattcctaatggtttactgccgctgccgagatttagtaacacagagcatcgtatgcacgcaataattgatacagatcattatgttgaaggcaacatgtcaactgatttgcagttaattgaaaaacagattctttcgttgcatagtaaagttaaagaagcatttgaaggcatggtttcagattttgcccgtgctaaatggcactga

SEQ ID NO: 445757 - DNA, 234 bp, Serratia marcescens
atgcgcattgaaataatgatcgataaagagcagaagattagccaggctacactggacgcccttgaatccgagctttaccgtaatttgcgccctctgtatcccaaaacagcaattcgtatccgtaagggcagcgccaacggcgttgagctgagcgggttaaaactggatgaagataaaaagcgagtgatggaaataatgcagcaggtctgggaggacgacagctggttgcattag

SEQ ID NO: 445758 - DNA, 189 bp, Serratia marcescens
atgcaggattatcttttggagtcattgaagctccagcgcattgatttttttatcaagcttgtagcggctagtgagtgcagcgatgaagaaaagcggctggctatccagtgggtgtccgaactgaccgacgagctgatggcgaaaatccgcagccatgaatactgccggtcgatggacgtaaccagttaa

SEQ ID NO: 445759 - DNA, 2409 bp, Serratia marcescens
gtgacggtaggcaagttcgcgtcccacaatgtagcaaccaccggcggctcgaatgaggccgccgtggcctttccatggaataacccaaaaaaagcggttaatccatatctggacccggcggaagttgcgccggagtctgcgctttcaaacctgatcgctctttacgctgcggataacgagcaggagcagctgcgccgtgaggcgctgagcgatgaagtctgggaacgctatttcttcaatgaatcccgtgatcctgtccagcgcgaaatggagcaggaccggctgattagtcgtgccaaaatggcgcgcgagcagcagcgttttaatcccgatctggtcattctggctgacgttaacgccatgccgcaccacatcagcaagcctttgctggaacggattaaatatttccatagcctgggcagggcaaaggcttattcccgctacctgcgcgaaacaatcaggccgtgtcttgagcggctggagcgcgtgcgtgaaagccaggtgtctgcctctttccggttcatggcgagctatgacgggctggaggggctgctggtactgcctgaaatgaatcaggatcaggtcaagcgcctttccacgctggttgcggcacatatgagcatgtgtctcgatgcgtcctgcggtgatctgttcgtcagcgatgatgtaaaaccagaagaaatccgccaggcatgggaaagggttgctgcagaagccatgcgccttgaggtcatcccgccagcgtttgagcagctgcgccgcaagaagcgccgccgcaagccagtgccttatgaactgatcccaccgtcgctggcgcgtatgctgtgcgcggactggtggtatcgcaaactgtggcagatgcgctgcgagtggcgggaggaacagctgcgcgccgtctgcctggtcaacaaaaaagcgtcaccgtatgtcagctatgaagccgtaatccataaacgcgagcagcgccgcaaatcgctggagttcttccgctcgcatgagctggtcaacgaagacggcgacacgctggatatggaagacgtggtgaacgccagcaacagcaacccggcacaccgccgtaatgaaatgatggcctgtgttaaggggctggagctgatcgcggaaatgcgcggcgactgtgcggtgttctataccatcacctgcccgtcacgcttccacgcaaccctcaacaacggcagacctaatccgaaatggaccagcgccaccgtccggcagagcagtgattatctggttgataccttcgccgcttttcgcaaggcaatgcacaaggccgggctgcgctggtatggcgtccgggtggcagagccgcaccacgacggcaccgtacactggcatctgttgtgcttcatgcgcaaaaaagaccgccgttccatcaccgcactgctgcgtaagtttgccatccgtgaagaccgcgaggagctgggcaccaataccgggccgcgcttcaagtctgagcttatcaacccgcgcaagggcacgccgaccagctatatcgctaaatacatcagcaaaaacatcgacgggcgcgggctggctaaagaaatcagcaaagaaacaggcagatcactgcgtgacagtgccgagcatgtcagcgcctgggcgtcactgcaccgtgtccagcaatttcgcttctttggtattccggggcgtcaggcataccgcgagctgcgcttgctggctggtcaggcggcgagagtgcagggcgaacgcaaagcgggtgcgccggtactggataatccgcgtctggatgcggtactggcggcggctgatgcgggctgctttgccacctacatcatgaagcagggcggtgtgctggttccccgcaaacatcaccttgtccgcacggcatatgagcttaacgacgagccgagcgcctacggcgatcacggtatccgtatctatggcatctggtccccgattgcggagggcaagatttgcacgcacgcggtgaagtggaaaaaggttcgtaaggccgttgacgttcaggaggcgacagccgaccagggcgcttgcgccccttggactcgtggcaataactgtccccctgttgaaaatctgaacaaatcagggggggatttacccgatattaaaaccatggatgagaaggaactgcaggaatatcttcacaacatgggccagaaggaacggcgggagctgacagccaggttaaggctggtaaaaccaaagcggaaaaaagcatacaaacagactatttcggatcagcagcgcctgcagcttgaggcagagctgagttcaagagggttcgatggtagcgagtcagagattgacctgcttctgcgcggcggcagtattccgtcaggtggagggctacgtattttttaccgcaatcaccgcctgcaggaagatgacaaatggcgtcagtggtactga

SEQ ID NO: 445760 - DNA, 858 bp, Serratia marcescens
atgagcactatcctgaaatgggcgggaaataaaaccgccatcatgccggaactgattaagcaccttcctgctggcccgcgactggttgaacctttcgcgggttcatgcgctgtaatgatggcgacagactatcctcattatcttgtcgcggatattaatcccgatcttattaatctctataaaaaaattgcccttgattgtgaagctttcatatcacgcgcaaaaaatatttttgcgattgcgaatagagaagtggcttattacaacattaggcatgaatttaatcattcctctgaaattactgatttcatgaaagcagtatatttcctttatctgaatcgtcatggttatcgtgggctgtgccgctataacttgagcggtcattttaatgtcccttacggtaattataaaaatccgtattttcctgaaaatgagatacgcgcttttgcagaaaaggctcaacgcgcaacgtttatctgtgccagctgtgacgaaacactggcgctgctgcggacgggtgatgttatttattgtgacccaccatacgatggcacgtttaccgcttatcacactgccggttttacggaggacgatcagtatcatctggcgtctattcttgaacgccggtcatcagaaggtcacccggttatcgtgtccaacagcgacacgtccctgacccgttcgctttatcgtaattttacccgccatcgcatcactgcaaagcgcagcatgggcgtggctgccggtgatagtaagtccgcagcggaaataatcgccgtttcaggagcaacacgctttaaccgggtttattccacccacggggatgtgtgctcggttattttagaggtgcgggcgtga

SEQ ID NO: 445761 - DNA, 228 bp, Serratia marcescens
atggctgattcaatggacctcgtacagcagcgcgttgaagaagaacgccagcgccacatccacaccgcccgcaataaggcaccgggcgtttcccgtgttctctgcattgattgcgatgcgccgatcccgccagctcgccgccgcgccattccgggcgtgcagtgctgcgtcacttgtcaggaaattgcagagctgaaaggcaaacactacaacgggggtgctgtatga

SEQ ID NO: 445762 - DNA, 234 bp, Serratia marcescens
atgcgaaatattgaaacccgtaccattaaaacaggaccagatgatgctggactcaacctgctgctgactgaggcacgcaaagaagaacgccggggacgcgcagatgtgatggctgcgcgtctggattctttagctgcccgtatcgtgtcacgtcagcttaaccacacggaagcggctgagctgctgcgtcaggaagctgtgaagattcagaacgaagcgcaggagatccactga

SEQ ID NO: 445763 - DNA, 342 bp, Serratia marcescens
atggctattgaaggcgctacggcgactgttccattaagccccggtaaacgcctggacggactgaaccatattgcggaattgagggctaaagtgtttggtctgaatattgagccggagcttgaaaggtttattaaagatatgcgcgatccacgcgacgtaaataataaacagaatgagcgggcactggcagccattttttatatggcaaaaattccggcagaacgtcacggcgtcaatattagtgatctgactactgacgaaaagcgggaactggtgaaagcaatgaatcattttcgtgcagtggtgagcttatttccaaagcggctaaccatgccgaattaa

SEQ ID NO: 445764 - DNA, 201 bp, Serratia marcescens; identical to SEQ ID NO: 76020

SEQ ID NO: 445765 - DNA, 510 bp, Serratia marcescens
atgtttgattatcgtgtttccaaacatccgcattttgacgaagcctgccgggcttttgcgctgcgtcacaacatggcgaagctggcagaacgtgcgggaatgaacgtccagacgctgcgtaacaaactgaacccggagcagccgcatcagctcaccccttcggaaatctggatgcttaccgatcttactgaggactccacgctggttgacggttttctggctcagattcactgcctgccatgcgtaccgatgaacgaagtggcaaaagagaagctgccgcattacgtcatgagcgctactgctgaaatcggacgtgttgctgccggtgccgtatcgggcgatgtgaaaaccactgcaggccgccgcgatgttatcagcagcataaactctgttactcgtctgatggcactggctgccgtttcgatgcaggcgcgtttgcaagctaacccggcgatggcaagcgcggtggataccgtgacgggcctcggcgcttcgttcggtctgatctga

SEQ ID NO: 445766 - DNA, 237 bp, Serratia marcescens
atgaaaagtaatttttcaatgcgccccagcatcaaccttgtggtatctgagccattcatcacactggatgagttctgtcgccgtactggctataagccaagctatgcccgtcaaatgatccgggaaaaccgcctgcctatcaggaagaaagccggagttaacagccttatcgaaatcaacatgttcgcgttaacgatggaagcggcccaaggctgcgaagtcgcaatgcaagcctga

SEQ ID NO: 445767 - DNA, 615 bp, Serratia marcescens
atgtcaaacacaaaagaaacccctggtgtgatttcaaagttcaatttttcatcacaaagtggtgggagagaggccataacacgcattctgcaagcttatggatttagcacaaggcaagctctatgtgatcatctcggcgtatctcaaagcacaatggctaaccgctggatgcgtgacactttcccacatgactggcttatagcctgccatctggacacaggtatacccttgctttggctaactactggtaagggcaccccggaagctatgccaaacgaagatcatggattgactttgcaattaaatgaaatcacaaatggggttttaaaaaccacagccacgattcgttatgacctacgcctaattcctcaaaacaccacagatccgtttcttgtcaaatttgaatcgacgacttatctcgtcagtgaatgtaaagatgaaatcaatgacggcacttggctgattgagatagatggctttgcgagcatcagacaggtttaccgtctgcctggcgggcgagttcgtgtagaaaatggtcctgcatcatttgagtgtgcggcctctgatgtaaaagttttagggaaagtggcaagcaaaatagataacgtggactga

SEQ ID NO: 445768 - DNA, 549 bp, Serratia marcescens
atgagagttttagtcacaggcgttttaattttgtcatcatttgctgcaatagcagcacctgaacaattcaaaaacattaattacttgatggaaaactataatgattatccaacttataccgtagacggtaaggattttccatctttcaaaattttgtctgaaaagcctttacacatccaaatctcgccgcgcactttatcagggagttcaacgaaagatattaagtacgaatcagacaaggcagccatttacgcagcatatcgtactttgtaccaaacgcctgcagacagagtcaaagtcacagtattaccgatttcaattactcctcagcctcgaaaggttgagtatattaaggaagataaatatgattttagcattacaaaaaagcaggcaataaatttactccgcaaacacggcaatatattgaatgaagaccagttaatgtccgccaatggtgaatggagcaaagcgtttgaaaagtgctgttaccttgaagaaggtaagcccggtttatcaatatttgctaaagagttaatcacgcaaaggtaa

SEQ ID NO: 445769 - DNA, 909 bp, Serratia marcescens
atggcctttgagcgccacattaaggatcaagcgcaggacaagccttggctgggggaaaaagcagataagcggcgagttactgaccttgttgaaacttggttcaacgctcatggcgttacactctctgatggcctcaagcgtaagggtgcaatggaatttgcctgctttgctatgggaaaccctctcgccactgaatttaacgccaaactttttgcaacctaccgtgaacaacgtttaagcgggaaaattacacgttccgatcgggtaaaagcagtgacgccccgtaccgtcaatcttgagctggcgtacttccgcgccatgttcaacgaactgaaaagacttgatgactggagtgcgcccaatccgctcgaaaacgtccgggaatttaaaattgatgaggcagagctggcctggctaacagtcgaagaagtcaagcaactgctggcagagtgtgagaaaagtaaagcggttgatttagtaaccatcgtcaaaatatgccttgcaaccggcgcacgatggggcgaggcggagtcacttacaggcaagcaaatcagccccggcaaaatcacctatatcaaaaccaagggcaagaaaaaccgcgccgttccaataagtgatgagctttacgaaatacttccaaaagtaagaacttccaaaccagtctttacggggtgctattctgcgtttcgtggggcgattaagcgagcggggattgaactacctgacgggcagctgtcacacgttctacggcacacatttgcaagccactttatgatgcgcgggggcaacattcttgtactgcagcgtatccttggacacactgatattaaggtgacgatgcgctatgctcatttcgccccagaccatctaacagaagctgtggagttaaaccccttaaatcttatttga

SEQ ID NO: 445770 - DNA, 792 bp, Serratia marcescens
atgagtacagtgattcgcttaaatggcgttacgttgccgggaaccggatatttgcatatttcacaatttttggagattttcgtttccgttactgatgggctaaagggaatgtattcgtttagctcagatgaaaacaagtctctgattaactatgcgggcggccaaaatcttgtaaaacatgggaatattatttttacagaaaacggcgtaaaactgagtaaagataattactttgatactggcataatgcctagtgctgctggttttacgcacatagctgttgcaataccaaaaaaaccgtcagttattgataatggctgctttctagtctctaactattttaaaccaggcggaaccggaacaggaggtcaggctacagggtatgtacttgcagcagccaatgacccgcgattcagaaactatgtgcaagttaacgccaacggctgggtttatggaaatatgggtattggattcttgtctgattcaactcctgccgtttggggcggtgttgcttctgtgggttccggctccgccggaggaacaaaagtcgtttatgggtacaacaacaatctcgcgattgggaatggcggtaacgtatctgctatcagcattgcagggcagggcactaagctgatcggcggacatcgagggccatccacagaatttaatgatgagacgaattatgtacaggctgtactgatttacgacagggctttatctgatgtcgaactaaatcaggtttatcaagacttgcgccaatacggcgcagggcggggtatcgctggtctgtaa

SEQ ID NO: 445771 - DNA, 264 bp, Serratia marcescens
ttggctaatatcaaatcagctaagaaacgcgccgtacagtctgagaaacgccgcaagcataacgcaagccgtcgctcaatggtgcgtaccttcatcaagaaggtagacgcagctatcgcagctggcgacaaagaagcagcacaaaatgcattcctggtaatgcagccactggtggaccgtcaggcagctaaaggcctgatccacaaaaacaaagcagcgcgtcataagtcaaacctgactgcacgcatcaacgcaatgcagtaa

SEQ ID NO: 445772 - DNA, 804 bp, Serratia marcescens
atgaaaactaattgtacttttcaaaaaatatcttcatgggtgtcaaatttattttcctcatataaaataaattcaatttttataattacgaccatcattattacactctactttcttcccaaaaaaggaacttcttccgttaccgattggatatcctcaatttctgatgccttcgttgcgttctctgccgtggtgggattattaatagcaaggcaatggaagcgtgaagcaactcaaagcaaagttatagatcattgtataatcctaacaactcaactaatacctatgattaaaagtcaatttgtaccctcatttcatgaaaccattgggaaaagattgcttttggaatataagcaatgtgactatgtagatgttagaaaaatagtgttcttgcgagatgcaatgaaaccatacaagaactcactgagtgataaaagaagaacctccattaatattcagactaatttaaaaaacattacagctttatcttggaaagttaaaggttacctcacgtcagactttaacaaacttattaaagacttatcaaaaatagaaggcaaagaacttgagcttcttactatattatccatgataacatcatattggaatgtgaaatttgatgatgatgatgatgcgactaagcattatcatataacatggaaccttgcagataatgattatgttaacgacgcactaagattatgcgatgaaataattagacttaaggaagatttgaaccatctaatcgagaagatcggtatccacgaaaaatcaatattcgaaattttcgaacctaagatatag

SEQ ID NO: 445773 - DNA, 783 bp, Serratia marcescens
atgatcttatacaaatatatagacaatcaatcattagagcgattcttcaaagatggttatatctctataaaatttactccgcacggagaatttaatgatcctttcgaaagttatgggtacgcacttgacgatgagtcgattgaatcattaactatgaggtatgagataaatcaaaacattgcttgcttatgcctctctaaaaatccgctcaatgttttaatgtggtcacattatgcagataagcatcagggtttcgttatagcaatcgacacagagaaagctggatacgatgatgacgtaaaatgtctaattacagctcctaagggcgatattaattatttgaaagatcgcatcaaaagcaaactaaaagtaagtaatgaaaatatctatgactcggatatacttagtaaattactacttacaaagtcatttcattggaaatatgaagaagaagttagaataataaaaaagacagaggaattacaccgtcaaggcagtgttttgattgataaaataagtaattttaaatcggtggtcggcatctatattgggatcaataataaaaactttgatgagattataagaaataacacttcattagaagatattgttgtaagcaaggcagtaaaactatatcagtgtgaatttaagaaaagcacatgggatctcacaatcgaagattatgaatatacaaaataccaacatgatatacatagaatagatgtatatgaatctttagcgaaggttttaagagcgatggatcgtaaccacatcggcgattga

SEQ ID NO: 445774 - DNA, 501 bp, Serratia marcescens
atgatactggattatttaaaagatcatttagatctagttgttgctacgatttcctgtgttgctgctatagcttcagccctggcagccttcgcaagtaggaacactgcagaaaaagcattacaatttcaaagcaggatgggtctttacgagactttaaaatcctgtgcggaaagagccaatgggtatgctaaaggtaaaaatggtgctgattgggattttaatgatgctgctaacattgttaggagtatgaatcttgcaatgaagaccatccatgagcacacccaacatgacaacgaaagggaaattaatgaatttaagcgattctttctaaaccaattgaacatggagctatttaaggaagtaaattacggagttggccctgatgcattatttcataatgctgtagagtctagcgtagattcagagatttataaccaatggattgatgtgattaacttctttaatctaatgattgctacagatgctgaccttgcagattga

SEQ ID NO: 445775 - DNA, 360 bp, Serratia marcescens
atgaaattggatatgtacgaagtgctgtctcgttggggcgtgtgggcgcgagaacgtagtggtattgattattcgccaatcgctgcaggcttcaaggggctactacctcacccatccaatgggaggttgtcttgctgcgatgatgatggattggtaattgatggatgtgtggctcggctgaaaaggtataagcccgaagagtacgatctggtgattgcacactatgtctataatgtgacgtttagaaaaattgcaaaattgcgcaaatgttctgatgggactataaggaaagaaatgaaaactgcagaaggttttatagagggtgttatgcaagtacttgatatcaatctaaagttctaa

SEQ ID NO: 445776 - DNA, 957 bp, Serratia marcescens
atgccaaccccaatcactcccgcccagatcacctcgttaatgacgggctttcgccgcgacttccagggcggcctgacggcggctccgtcgcagtatcaacagattgccatgacggtgccgtcaaccagcaagtccaacacctacggctggctggggcagttcccgcagttccgtgagtggatcggcgcacgcgtcattcagcagttgaaagcccacggctacaccatcaccaacaagacctgggaagacaccgtcagcatcaaccgtgacgatttcgaggacgacaacctgggcatttacagcccgatgttccaggagttggggcgtcagggcggcgtgcagccggacttcctgaccttcaaggcgctggcagatggtgacaagaccgcctgctacgacggccagaacttctttgacgtcgatcacccggtctaccccaaggccgacggatccggtacggcggaaagcgtcagtaacttttatacccagcaggtgccgcccgccaaagaaggcgatccggagacgccgtatgccggcccgcgctggtatctgctggactgctcccgtgccgtgaagccgcttattttccagaaccgccgcaagctggagctggtggcgcaaaccaatatcgccgagggcgtgaccttcaccgacaacgagttcgtcttcggtgcctccatgcgtaacaacgtcggctacggcttctggcagatggcttacgccatgcaggccgaactgaccgccgacaacctgtggctgggttggcaagcgatgcgcgcctttaaaggcgacggcggtcagccgctggccctgaagccaacgcatattgttgtccctccatcgctggagaaaaaggccacgcagctgctggagcgggaactgtacgccgacggcggcaacaccgtttccaacgagctgaagggcaagttgaaactggtggttgcggactacctgtaa

SEQ ID NO: 445777 - DNA, 411 bp, Serratia marcescens
atgagtataaaagagagattgcgcgaagcgatggatgctaagggtttgacaataaaagcattgtcagacttgtcgaaaattccatatcgctcacttcaaaactatctgcgtggagagagagaacctaatgcggaggctcttgttgcgttaagcacccatttgaacatatcaatagattggctacttactggtaaaggggaagctgttggggtagagaaagcacagccagctaatcaggagcagcatttcaaccagtctgatctgaaattactggaactgctcaaccaactggagccagaggtgcgaaaagagttgctgcgaggcgctgaggaaaaacagcgaatgattgatatggaaaaacagcttaaggagctgtccgcagcgttcgatagattaaaaaatacgggttaa

SEQ ID NO: 445778 - DNA, 603 bp, Serratia marcescens
atgacacaggcaaaattaaacagtgaatttattgccacagtagcgggtgatattaccgtctataactatgacaacacgacacgggaatacatttcatcatcaacagaatatcttgccgttggcgtcggtatcccggcatgttcttgtttagatgcaccagttacacataaagctggttatgcaatctgccgttctgcagattttaactcatgggaatatgtaccagaccatcgcggtgaaatcatctatagcaccgaaacaggagaatcgaaagaaatcacagctccgggtgattaccctgaaaatacaaccactatcgccccgttaacgccattcgataaatgggatggtgagaaatgggtgacggataccgaggcacagcatagcgccgcactagacgcggcagaagcaaagcgccagtcgctgattgatgctgcaatggcttccatcagtctgattcagatgaaattacgggccgggcggaagctgacgcaggcagaaaccacccgacttaacgctgtgctggattacattgacgcggtggaggcaacagataccagcaccgcgcctgatgtcatctggcctgaactgccggaggcgtag

SEQ ID NO: 445779 - DNA, 441 bp, Serratia marcescens
atgcagaaatatattttcagtgccgataaaaatgcgtttttccctgtggagcttaaaatcgcttatcaggaatccggcgaatggcccgatgatggaatcgaaattgacgacactgttgctgccgaatttatgaaggaagcaccagaaggaaaatacagaggtgtcatcgacggaatgcctgcatggattgatattccaccgccaactcatgaggaacaaattgccgcagccgaactgaaaaagcagcaattgattaatcaggtcaacgaatacataaacagtaagcaatggcctggtaaagcggcgattggtcgcctgaaaggtgaggaactggtgcaatataatttgtggctggattatctggacgcactggaactggtcgatacttccggtgcgccagatattgaatggcctacgcctccggcagttcaggccagatga

SEQ ID NO: 445780 - DNA, 171 bp, Serratia marcescens
gtgagcgagcaaatcgaaccagcagatttcgatacctggctgcaagggcagacagtaccgatcgaggtggattgcggttgtgtgaccacagaggtgttgttgcactgggttaagaaggcgtacaacgacggcctgctggccggggccggtaaggtggaggtgacaaagtga

SEQ ID NO: 445781 - DNA, 2283 bp, Serratia marcescens
atgtccattaaacgctatccgcagctcgcccattggggcgcttataccgccgtggttgaagacggtcggcttatccgttgtgaacccttcgtcgacgatcccgacccttcgccgctgctcgattccatcgtcccgatggtctactccgacaaacgcattcgcaaaccggcggtgcgccgctcgtggctgcaaaagcgcgagggcagcgaccgtaagctgcgcggcagggaagatttcgtcgaggtgggctgggagttagcgctcgatttggtggcggaagagaatcgccgggtgcgcgatcgctacggcgcctccgggctgttcaccggttcttatggctggtcgtcggccgggcggctgcaccatgcacgctcgctggtgcggcggttctacttcggcggcggcggcggggtcgatcagcagggcaactacagctggggcgcggcgcagttctttctgccgtatgtgatcggcactttctcgcccttgaccgggcgcgtcaccagttggccgagcgtggtggagcattgtgagttgtttgtggcgtttggcgggctggcgctgaaaaacgctcaggtttcttccggcggcgcggcggaacatgcgctcaaaccctggctgcaaaagctggcgcataagggcacgccggtgatcaacattagcccgatgcgcgacgactgccccgcgttcgtcaacgcggaatggatcccgatccggccgaataccgacgtggcgctgatgctggcgctggcttatgaaatccagcggctgggcgcgcaggatgaagccttcctgcacagccactgcgtgggctatcaacagctggcggattacctgaacggcgccggtgacggcgtggcgaaaacccccgactgggccagcgccattaccggcattccggcggcgcgtattgcgctgctggcgcggcaactgatcggcgtgcgcagtttcatcacctgctcctactccgtgcaacgcgcacatcggggggaacaaccgtactggatgatgatcgcgctgtcggcgatgctgggccaggtggggctgccgggcggcggcttctcgttcggccacggctcgatgaacggcgtcggcaacccgcgcgtggatacccccgcgccgaccatgccggtaggagaaaacccggccgggctggcgatcccggtggcgcgcatctgcgacatgctgttgcaccccggcgaagcctatcaattttgcggcgagacgcggcattatccggatatccatttggtgcactgggccggcggcaacccgttccatcatcatcagcagttgaatcggctggtggaggggtggcagaagccggacacggtgatcgttcaagatatctggtggacggcggcggccaaaatggcggacatcgtgctgccggtcaccagttcgctggaacgtaacgacatcggcggctcgtcgcgcgatcgctacgtgttggcgatgcatcaggccattgcgccgcagcatcaggcgcgcaatgatttcgatattttcgccgatctggcggagcgcctcggctatcgtgagcgctttaccgagaatcgcgacgagcgggtttggatcgaagctatctaccggcaatgcggcgcagcgcagcagcgcgccggcgtcgcctggcccgagtttgaggatttctggcgccggggctatgtcgaactgcccgcgccggccaaagagttcgtcttttttgaggcgttccgcgccgatccgcaggctaacccgctgcaaacgtccagcggcaagatagagctgttcagcgagcggatcgccggctatcgctacgaagatttcgcgccgcatccgcagtggcggccgccggtggagtggctgggcgcgccgcaggccaaaaactggccgctgcacctgatctccattcaaccgagcgatcgcctgcatagccagatggatccggcgccgctggcgcagggcaacaagactgccgggcgcgaaaccttgtacatgcatccggacgatgcggcgccgcgcggcgtagcggacggcgccgaagtgctggttatcaacgcacgcggcagctgtctggcgggggtatcgctcaccgatggcgtgacgcgcggcgtggtgctgatggcgaccggcgcctggttcgagccgggttacgacgcgcagcgccggccggtcgagcaggcgggcaacccgaacgtgctgacgctcgatatcggcacctcgccgctgacgcaggggccgaacgccatgagctgtctggtggaggtcagcgcattcaccgaacgtcgggatcaagatagttag

SEQ ID NO: 445782 - DNA, 555 bp, Serratia marcescens
atgaaagtgatttattatgggttggcagccatagccatcagttttggggctaacgctaactgcacgctaacgaccacacaaaacagcatttatctgggggagcacaatattgggacactgtctcagcaatccactctgctgcacagcgccccattgcagtatcggttgacttgcgatgagcccgtgcagttgcaggggttcactctgcgggagaatagaaacctggcagaaggaggcggcgcaaccgatgcttctagctatctcagcctcacggttgatgaattacgcaacgatgatggtgagcccctttccttttcactcgcccccgggcaaccacgccaaagacatctacccaactatcgtttatccgtcgatcgggaagcattacacatccttgtaccggataacgaggttgggcaacacttcacactgtcattaacagtctccagtttcgccgcggccgcgacacaactgcgtcagcagcaacgcgataacatcccgctgtcgacccaattgctggtcagcgctaactatcttgatcccgacgttcggtga

SEQ ID NO: 445783 - DNA, 2412 bp, Serratia marcescens
ttgaaattgcatataccgctacgtctgctggcgttttgtctgcctataggctatgcctcgaccagcctggctgactacgatattgaaatgatgcgcgcacttggattacccagtgagattgctgattacttttcctctggagcgaaattcccctcaggaaaacaagcgctattcatcaacgtcaacggacaaaatcatggacgacatgaagtcaacatagacaaacaaggcgaatggcaatacgacgctgaactcgtagaaagcctagggttatacccctgcaagctcaacactcaggcagatatgctgatgagccaatgttatcaaggcagccgcatcgacaatgaaaccggtaataatcaattgattttgctgttgcccgagcgctatatccgtcgacaaccggcggactatgaatttggcggccatgccctgatgctgaattataccgcgagccgattcgacagccaaactcacagcagtgattatgcggcgttggaaaccggcttcaacagcaacaattggctgtttcgccataatggtacctataacaagtcagaacgacatcaggggtacacgccttataatagttatctgcagcggacattgacggatcacgacgccatgatgcgtttgggacgagcgacgttatcagattcgctttacagcggcattaccttagatggcctgcaatggctgcctgactcgtcgctgtcattgagtcaacgcagtgatgtgccggtagtcgaaggtatcgccgagagccaagccaaggttgagatttttcagaatggcagattagtttacgccacgcaggtgcaaccgggcactttccgcctgactgatatccctgcgcagttcgacgcagtcgatttgtccgtcaccgtcacggaaagcaacggtagccgcaaacaattcatcgtcccttatctgacgagctcaggacgctctactccccgccagggcagttactcccttgctctcgggcgcactcacagcctggcaaaaagcacagaaatgcctttcatcactggctcattctctttgccatggctcaaccaccaccaggtgagagggggaagtttcctcagccgcgattatcgcggcatcgccgccggttatagcgttgccaatagcgattatcgttttacagccttgagccacgtggcgcagtcgtcaagcggaaagggcacgaagctgcagctgaatagcgcattgcccctgataaaaaaccttaagctgaacgccggttacagcatccagtcagagcgataccgctcgcccacacagctccgttctccgcgtaaagatgacggcgaaggaacttattggcctgtatcgcacggtgagtcatcttcacaccaacgtcaaagctacagcctgggcctaggctggcaccataaatacatcggaaatctatctttaggcgttacacgcgctgaaggcggagataagcaacaaaatcaacgagtctacgccttctggaaccgtcaatttggcgcagccaccgttggcattagcctggaaaaagagcgcagccgcgaggttcgcgataacgataccagggtgttcgccaccctttcattaccgctgggaaaaaaccgacgttatagcgccaatatgataagcaacggaagacatcgtagcatcagcaattcgctttccggccaagcgttgaatggcgatctggcttatggactcaatgcaacacagggcacccaatccaacaacggcacctactcaggcaatgtgaactatttgagtccgttcacaacgctttccggcagctatagccatctgtcagaaaatcagcaggcattttactacagtgcctctggctccctggtggcagacagcagcgggctaacgctctcaccacagaaaatcggcgataccttcggcgtcttgacgataccgggcctcgccggaatcagcgtgtctacgccaggcggaaaggtgaaaacctatggcaagcaaggtaaggcggtcatcccaaggctgcgtgagtatcaaccaagtctgattaacgtagacaccagcaccttaccccccggcgccgatatcgataacggcgtgcgcaagatcaatctggcacgtggcagcgttaaacgtatcaatatcggtgccattaatacattgcgggccattgtccagattagctatgcagacggcacaaaacccgctatcggcagcatgattttggatgaacaacaacgagtggtcgcttttaccaatgatcagggcgcagccttcattgaacatcagaaagcgcaccacgcgaagaacgaggcgtcttcacaacgtttcagcatgaaaaactcgtcgggacaggcatgttatttcgcaattgctgcagacacctcttcccgcaatcgtgccggcatcagccactccgaagccgtgtgtcgctaa

SEQ ID NO: 445784 - DNA, 690 bp, Serratia marcescens; identical to SEQ ID NO: 429765

SEQ ID NO: 445785 - DNA, 147 bp, Serratia marcescens
atgattatgacctacaaagttacgctgcgccgtggcatgaaatggttgcttgtcatatctgcactaacccgctgggattggctggctgataaatgcttccgtcatgaactagtaacaggcgaatcggttgagatttcaggcgattaa

SEQ ID NO: 445786 - DNA, 1389 bp, Serratia marcescens
atgaagcgcaaccgcgttaacgtgctgaccgtcgtcaactccgcttcaaatatcactaccgaaaccatcgacgggaaaccacatatcgtggttcgcggcattacgcccgttgttgacgatatcgtgatgaaccggaagttgtacccggcagcagaaattgccaaggcctataacacccttgagcgcaaaccgatgccgctggggcatccaaaaatagacggaaagcacgtatcggcgggtgatgtccgcgcggtgaataactatcacgttggcgcctggcttcaagacgtccagcatgtcgacggaaaggttaatggtgatatgtatgtcgaccgccgttatgccgaaggcagtgaaaagggtaagcggctagtaaatcgactggatgaaatgatcgctgggacaaacgtagagccaattcacatctccaccggactcctttactcaggcattgcggccaacggcgaatcaaagggtaagaagtacaacgaaatcgccacaaatatggtgtttgaccatgttgccgttttactggatgaacctggagccggaacgccaagcgaaggtgttggcatcttcgttaacgcagacggcgatgatcaagatgtcgaaattgcaaacctttcggatggtgttgattgcaccagagaggggctactgaacaagaccaagtttttcttcaccaacgcttccaacttctcgtttgacgatatccgagaagcgatcagcaacaagctacgtgaaggtcgagcagacgattactggccctggccggaatctatctggcccgacactttcatttaccgcgataaaaccaattttttccgacagaaatacctcatcgatgaggacggtaaggccgtgttcgtcggcgaacctgtagaagtcgtgcgcaaacccactgagtacgaaattaaaaccaacggagagagtaatccgatgaaagaaatgattgttaacgcactgaaggcaaaaggtaagccgaccgaaggcaagaccgaagcggaattgcttgatgcctacaaccagatgaacgcagaagaagccgcagccaatggcgaaacgccagaacaaaaggctgcgcggctgcagaaagaaaaggacggcaagcagaacgccaacaatggtgaagaaatgccggcctgggctaaaaacttgagtgaccagtttaccgcgcttaataaccaattcactgccaacgcagacaaagagaaaggcgagatgcgcgcagcagttaaagccaaattcggcatgagcgacgttgccgtaaacgcgttggatggtgatccgttgaaggaactgtttgcccagtgctcaacctctatcggcctgaacggcatgctgcgtcaggttaactcttctcaaactttcagcgaaatgccggagtaa

SEQ ID NO: 445787 - DNA, 201 bp, Serratia marcescens
atgctctcggtcaagaagatactcgttctgcttgcggttcatactgtccaaatagatgtgtccaaatctggacgcatcttccgcaagctcgctaagcatgttttcaatatcccgcttcacatgctgatgctgttttcctgtgagtgttgcaatctcacggctcgacatagtgacaacggatcgtgcatttgctacagttaa

SEQ ID NO: 445788 - DNA, 168 bp, Serratia marcescens
atgaaattcattgaactgccagaagaggtgcaaaagcaggccgcgataactttatcaaaagaaattgagggcattgttacgtgggatgaaaaagaacgaacggagaaggcaaggtctattgcaatatccgttcgtgaaagcttcaaggaattatgcgccgatagttag

SEQ ID NO: 445789 - DNA, 171 bp, Serratia marcescens
atgtctcaactgttaaatccgaaggaatcgccggaagaagctgcttacgcattgattattgaattggtcagagcggaaagggtgcctgtttatagttcagggaacatcacaggcctgctagccatgtacgatgatgcagttaaacacttcaaggataaaacctcagaataa

SEQ ID NO: 445790 - DNA, 3150 bp, Serratia marcescens
atgactacaccaacaaccaagccagttcctagtaatgacgttgctgactttaaatataatgcagagcagattgataaagtggttaattccgatgatgtaacataccctgaccggttcggcattctaagatatacattggaaggtattcgcaggaatatatcgccacttggcaaggtttatacatacgatgaggctgcggcagcaatattatcaggcgaaataccaaatggcgcattttattttgtatggtctggtaagcctggtgttatcgctgataagtatgagaatcagagtggtgttcagaatattactgatgagagttttaaatcagattattttattggtcagggtatcggatgggcaaacgtaaacctaacctcatttaatgctgttaacctaaacagaatatcttttacatcagcaaacgttgagtaccaggaagcgaagggcggtcttgcacaagttgcgtcaggtagcacggttgatgtatggtttaaactaacactcaaatctggcgtggctccaacccttcgtttacgtggtgcttctgattgggcaagccaaccagtccgtttaacaccaagccaggggttgcttaaagccacccttaccgcaacagctaatgctacagagattcgcatttatagtggtagcggtaatgtaacggattgtgatttgtacatgtttatcatgtacggaaatgaaagtcctatcacgtccacagttactacgctgatcaatgaggctcagaactcacgtgaatatgcagagaggggagttaggtctactggctattcgtcgtttgagagttcatcgccaaatacattcaaagtaacaggtgatggtactgcttatgcggaagtccgcttatcgatgctgccaataaggtctggcggaacttttaagtttaagcacaagatagcttcaacagcagagtggacatacgctcgtttatttgactcaagcaccggcgagtgggcgtcagcggaaacaatcattaaaacaaacgatctgtggcgaactgttgagatttccacgactgcagatagaatgattgataccgttgttatttatactaggacgcaaacaaaaccaatctcagcatcaggtttctttaacttgctgtccgttgacggtatctatttctcggcttcacaggcctatcatgacatgccacctgacgacattggcattggcatgataccacagcttaataacggccctgcgtcagctaatgtagcatttgatgagttcagtgtagagggaggtaacctcttcactatgcggactaatactgcgaaatatgcagaggcgcgcggtgacatctccgtgtcgtcagggaaatcggtaacgttttattatcagcttcttaatactgctggtggcactccatttatcaggctgcgtaacacagcaggaaacggatgggcaagcgctgaatatccccttgtattcagccctggcttaaactcagtcacgattacagcaacaacggatgcagcgcaggcttacatctactgcaaaaatacccaggcatcgtataaccgcatgtggggggtgatgactggatcgccatacacgccagagaccttactcactgagcgtctggcgtcggcaattctgacgtcatcggcctatgttgaatcggcgcgacctgttggcagtggtttctcatcatttacgccaacgtcgaacaattcttggcgttttgcgtcacctggtacggcttattcagaagcaatagtgactatcccgcagcagccggcaggcgcaaaattacgcgtgatgtacgctgttaaatctaacggtgccaacacctatatccgtctgcgtcatactggaggctgggcaagcccggaaacaccgattgtcactgacggggccaggcggttcgttgatttacaatccgatgcgggggctagcgcctatgagatacgtgtgtattccagaacgcaggcggcttactgggggacgggatttgtcgcgctttcagcggtgaatgatatttacctgacttcatcgacagcggctaatgaacttgcatcagaaaaagtgggtgattcagtaaatcaaagcacgggagtgatgttcacaagctctctgtgccttgtttctggccgccctgtgacgctgtacggcgagaatttcatcagcggcgcacgcacctggctgagtggtgcgaatatggcgatcagcagcacgccagcagctggtaaaccatcggtattgcgcagcgcgttgcctgatgtgacgttcaggccggaagagattggcggaacaactatcgaagttaacgcgcgtgctgacgatacagctaacgttttccgcaaatcggcagctgttcgagttgcgactccggtggcagctgaaaccattaaagtctgtgcgctgatggatagccatggttctatttgcgtgccgtggctctaccgcgcagtgaacagcaccggctcagtttaccagggcgtggggatgtactctgtagaaggcattccgttcgaagggcgggcaggttgggctacgttcagctatatgggcaagcgctcagaagacgcgttcacaaacccattcctgaaaacagctgatgctgccgataaggcgaattacccgcaatggtgctttgacgcagcttatagcggccagtcatacgcagataacccaaacctaccgtcgtaccacattttcgatgcagcagcgtgggctgcggcgcgtggattgactgctgcggataagcttgtagtagttcttcagctcggagtcaacgaccggtggcgtggttacgcagcgacggatgtagcagcggcgcaggatttcatgatcacgaagtttaaagctgtgttgccgcaatgtcgattcgtagtatcgagtcactcaatcggctggactaatgagcgggactggagcacttacacgccgtacatcatgcagaaggtgattaagttcgatggtcgggaggggcaaaacattttgcagtcgccagcatgggctttcatgtctgcaaaatacggatggcgggaaactgcagttggaactctgccaggcggagttgttcaagtagccctcaacgacgatattcatccgaccgacttgggcgcagcgcagtgggctgatgctttagttggtggggttatcgcagcttggcatctttaa

SEQ ID NO: 445791 - DNA, 915 bp, Serratia marcescens
atggctaagaacgaatttttacccttcggcaccgcggcaaacgccaacgttttaccgaatgctgaatatcaggcgctgccggcgcgcgcgtcgggcttcggttcgggggtagcgaagtcagaggaactcaacaccgtatggcgccagggctcgacaatggccgctgtgctggggcagttcatagctgataaaaccagccaggatgtgctggatgatggcgatgtgaatggcttgctggataagctcaaagtggcgatgggcggctgcctgatcggcattcagcgcttcaccgcatctggcacctatacgccaacacctggaacgcgatacgtgattgtcgaggccattggtggcggtggtggtggcggcggctgttcttctacaagtagcgacaacgcagctgtaagcgggggaggtgcttcaggggggtacattcgaggaaagttcgatatttcaagcatcggtagctcggtggcgataaatattggagctggtggcgctgggggtatcggaggaaattctggcggcactggaggcgatactacgttcggcttgctggcaaccgcggccggtggacaaggcgggacttcttcgactaacccctcatcttcagctttcattgctgtaggaggggctcctggcgctaatccagcaggagggaacttaatttcttctcgaggtaatcgagggggtaacggcttgttctttaactcttccactggcgccgttggtggtgatggttccccatctcaattggggggaggtggagttggatcagggagttctggctcgtctggtacggctggtagcggatttggaagcgggggaggtggaaattcacgccaaccctcatctgcagcgattaatggttactcaggggcgccaggagttatgattatttttgagtactcttaa

SEQ ID NO: 445792 - DNA, 1071 bp, Serratia marcescens
atgcgcggaattcttgtaggcaagttaataaaaagagatggaaacaacctggaccttatacggttagtggcctcattgtctgttattgtctatcattcttttgctctaaacccgcaatgggggataactgacccagtaaaaaatttgtttggatacatgacaactggcggcctagccgtaaaggtttttttctttataagcggcctattggtaaccaatagcttgctatcgcgaaactcaatcatacactttattacttcccgctcactcagggtattccctggactggcacttgttgtaataattacggcatttataataggcccgatatttacaacgctgcctgtttctgaatattttaaaaccaacaaacctatagcatatgtgattaaaaacatgctattagacacccaatacgttctgcctggtgtttttgagaaaaacagatatggcgttaatggctctttatggacgattcattacgaggtgcttgcttatattattttggcattactttacatgaccaaggttggaagttcaagattgatgtcatccatactatgcttcatcgtaattatagaaccaattactccattcaaaggtgttttatttgcaggttcaagcaacaacgcaatctatctattggcaccatgctttgcacttggatctctactagcaataaataaaaatcactttcacacgaacatttacattccttttatattgttctcatctcaattcatatttaatgatgagcgccttagctctttgctactatgtatgtccatatgtcttattttacttcatgtttcatcgacgagattagttctcggattgcatttaaaacatgacatatcatatggcgtttacttgtggggattccctattcagcaaatagtatctcaaaatttaaacctttacccggctttaaatatagcgctatcaacattactagcaataatcatggcatttgtgtcttggtttctagttgaaaaaccagcgatgcgatttgcaaaaaaaatcgcagataagaaaccaagacaattatcaattaagagtactcaaaaataa

SEQ ID NO: 445793 - DNA, 900 bp, Serratia marcescens
atggatggccaccgcctggcgcatggcgaagccctgcaccatttcaaacacgccgctgccgatgccggtaatgtcgatcccgatgtgcgtcatgttgtagcgctcaaacagcgcctttatctggttggcctggtgcttccagttcatcccctgccaatagaacgtggcaaggacgcggaagcgctcaccctcatagagcggcggcgcgatgatcacaaaggtggacgtgtcgccgctgcgcgccgggtcgaagccggcccacacttcacgattgccgaacgggcgcgcggcggtggggtcgtggtcttgccagagcgacacctcaaccccgcagcgctccagctcgttgaagcggaaaacgctgtcgccgctgtccacgaacacacacatgtaaagcatgttgaacgtgtcacggttgtacttgttgcgcagcttgtcgatgctggccaggttaaacccgccggcgatcgcatcttccattgtgatgacgtagcgccattgctcatcgggacaaagccgcccgccgtcgcgcagctccttgaaggttggaaactccacctttttgcgcttggcgtcgccgcgcttccaatcctcacccgtccaaaacgggtaagcctggtgtgtcttactgctgggcgtggaaaagtaggttgtgcgccaccgatcatgtgtggccattgcgctggccacctcgttaagacgcgcaaagttctgtatccaaaaatactcatccacatacaggtggccgctgtaggattgcgccgtgttggagttggtggaaagaaaacgcagctccgcgccgttgctcaagcggatcgggttgccggtcagcgtcacgccgaaatactgctccgctatgttaacgatgtacgagaggaacacctcggcctgcgggcgtga

SEQ ID NO: 445794 - DNA, 264 bp, Serratia marcescens
atggaaaaggttatttttgaattcactgagagcgaggctgattctacaagtgtgccgggtcgcttttcggttcctgtctgcattgcagttggtattgaaggttataatgcagcgcgcccaggtcatgccgagtgccttgctgtgattatgaagaaaaaagcgcccgcaataattagggcgataaatgaagtgtatgtagcaaaattaaaggtatcaggtgctgactttgtcggctctgaattaatcaaagtcaatcttcaataa

SEQ ID NO: 445795 - DNA, 267 bp, Serratia marcescens
atgaaaactcaagacgcgcaattagttgaaattcccgacagtgttattaaatggcaccagaactgcgtggatgaatgccaagccattatcggtagtaccattgatattgaactagacacggttgatggtcacagcgtgacaattgccgccaattcgagtgaggccaattggttgaaaacaggtgtcgtcgtcgccctggcgcgattcaaaacatttccgttccctatccgagccactaacgaagggggtaattcagatgatgaataa

SEQ ID NO: 445796 - DNA, 270 bp, Serratia marcescens
atgcctaaaattattttcgagtttaatgaatcaccggccacttttgttaaagaggttggcgttaatggtatcccggtacatgtcaatgtcaacattgaagagtttaatcgtgaacaaccgggccatgctgaacagctggtctctatcatgcgcggggctgcaccagaaatcattcaggctgtaaacgaaatgtaccttgagaagctaaaagctgcggggtatttcgatgccaaaagcgatttttatgaaccctccacaaagacacattaa

SEQ ID NO: 445797 - DNA, 510 bp, Serratia marcescens
atgaaaaataactttctagaaaaatcaaatactgaaaagcaagatgtttggctcacagccgagcagattgtgcaaatggggctctctgacttacccacatctattgcaggcattcattaccgtgcaactagccagggatgggagaaaagaaaaaaagaaggggtaaagggagggaaagcggtagaataccggttagctagcataccagaacctgaaagctctgctattagccggtcaatgcccagcacagatgcctgcaataatgccaatgaatgcgtggatgaaagcagcacctacacccgccttatggcaatttttacgcttatgactgagtcagaacggttaagagcaatcaaactttttaaaacggggggattgaacgcgctcatgccggatgttttagatgctgatagcaaaagtacacgaagagagattttcggcgaaggtagttcacctgcacgaacgacgttagcggacgaggcaaacccgcatgacaagaaggctggctag

SEQ ID NO: 445798 - DNA, 279 bp, Serratia marcescens
atgtggccgagaatccaatcgggcgaattcgttctgattgaacccggtacaactatccatcccggagatgaggtatttgtccgtaccagcgatggacacaacatgattaaggtcctcaactacacgcgcgagggagaataccaatttactagcatcaatcaggatcatcgccccattactatctcgcgcagtgacgttctgaaggttcagtatgtggctggcatcctgaaagcatctcgccacgtagataatgacgcggttactgactcaatgttttag

SEQ ID NO: 445799 - DNA, 156 bp, Serratia marcescens
atgcaactcgaacaaaacgcgaattggaagaccaaagcacgcggcgacaacgacagcgaatatcagatttaccttgcctgcgctgacgacggtaaaggtaacgaattcatgaccggaaaaccgctgaaaacgtatgacgagtggctggccagctaa

SEQ ID NO: 445800 - DNA, 282 bp, Serratia marcescens
atgtctaaccgtaatatagtcgtccccgtacaactggatgtaacggtgaaggtcagcccagagcagctggcagaacaggttggaaagttctacgacagcgagtttgttagcttctttaacgagcttgtcctacacattcggccaagtgatttgggtgcaaaaatcacttcagccatgagctacgacaggacggataaaaagcttcttgccaaaagcgcaagataccttcttcgagacctagctgaaatcattcgcgacaacagcgaggcggataatgcgtaa

SEQ ID NO: 445801 - DNA, 609 bp, Serratia marcescens
atgaacgccactgagttacgcaagattcttgatgagcacaagttgtgggtaacgtcgttacacgaaagcggatctagagccaacctgtacggtgccgacctgcgcggtgccaacctgtgcggtgccgacctgagcgatgccaacctgtacggtgccgacctgcgcgatgccgacctgcgcggtgccaacctgtgcggtgccgacctgtacggtgccaacctgtgcggtgccaacctgtacggtgcctccctgcgcggtgccaacctgtgcgatgccaacctgtacggtgccgacctgagcgatgccaacctgtacggtgccgacctgcgcgatgccgacctgcgcggtgccaacctgcctgatcacacgttcgtaattgtgggcgaaccctactatctgcagatctcgaacggggaatatgtacgcgcaggttgccaaaatcacactgttgagcaatggcgtaatttcaccaaacgagaaatcgcagaaatggacggcaaaaaggcgctgaaattctatccgcggctgctgaagattatcgacttctaccttggtgctggcgagcatccagattggattaacgagccagaaaccgaagaggctgcgtaa

SEQ ID NO: 445802 - DNA, 204 bp, Serratia marcescens
atgagtgaatgggtcaagtgcagtgagcgaatgcctccgcatgatgtgaaggtcttactgttttttgctgattacgatgggcatatcgaagacggatttatcagtgatgatggggatggtgcttatcactatctgtttgatggtgatgcgctgggggaaatgcctacccactggatgcccctgccagaaccacctgctgactga

SEQ ID NO: 445803 - DNA, 576 bp, Serratia marcescens
atgaagattctggttcttggtatgacggcatgtccggcaggtttgggctacagcgaaacgactaacacggcggatttcatcatgaacaaacacccgctccactactcgcgattctatcgtgaacctatcgttaagggatacgtgatgacatccgctggctcacgcattccggcagtaaacctggagccattccatgacaacgccctactccggttactcggctggggatattacctgccagttggcgacatgagcgtccatggtggcgttcagaccgatgtctattggatggacacggaaacatatcgagtaatcaatcatcgcgtctactacgacgacacgaagccaatcatcgagccagagccattccagaaaatcccagaaatcaccgtgaagatgaaaaacacggcgcgggagattttgcgatgcctggataacagaacgctgaaattctgccacgcacgtcgtcaaatcggtgagcttctgggaatcacatttggctttaaagagtgctgctctctttctgaattgcgagggctggttactgacgtattcaatttgggagttaagagatga

SEQ ID NO: 445804 - DNA, 510 bp, Serratia marcescens
ttgaacttttcagacctgtttgaaattcgagactcagttctttttcgtaaacctcaaccgcaacagtccaattggtggaatgccaaatatgccggcagacctgcaggcgagatttgcgtgccgaagggcagcagaaccaagtatgtgcgcatagaaatcaacggaaaaaagtacaaggcacatcaaataatctgggaaatgcaccacggggcaccacctccaggaaaatgcattgatcacattgatggcaacgggctcaacaatcacatttctaaccttcgcctggttactcaccaagaaaatatgaagaacaggccgaggccacaaaacaacaccagcggtattgtcggcgtcctctggaacaaagctgaggagaagtggcaggcatacataaattttgaagggaaacagcaccatctgggtagctttggagggatttttgaagctgcctgcgccagaaaatcagcagagctacggcacggcttccatttcaatcatggacgccgatga

SEQ ID NO: 445805 - DNA, 546 bp, Serratia marcescens
atgatcggacatgcggcgcagttcgcggtaaacggtcaccggcgcgccgccaacaaattgaaactgacggatacgccagcgcgccgaccaggcagcggcagcggcggccgcttctttcatcggcttgccgctttcgtcgtccagctcgtcgtccagggcgtatccgtcgatgtttttggaaatgtatttggccacatagccggtggcggagcctttttccgggtcgatggtttccgcatggaaacgggccttgcgggctttggcggtaataagctccacgccatcctcctcaaaggcgtaatcccgcaggatttgccgcacctggtcggcctcgtccgggcgcatgaaaaacagcatgtgccagtggggggtgccatcgtggtgcggttcggctacgcggatgccgaaaatacgcagatcttcgcggtgcagcttggcgcgcgctttctcccacacgcggcgcaaatagcgttgggtgtccgccgggctgctgccgttccacttgcggttgcggtggccgtggatcgtggtggcgtggaattttga

SEQ ID NO: 445806 - DNA, 159 bp, Serratia marcescens
atgcgcaaaaacaaacgcacaacgcaagagcgtgaagttactcgcgatgactttttgaagccggcagatccgatcggaacgatgtcacccgtttttcataaacggtttgtggaggagttccgcagggtaaaagagcaacaggaaggccgtcatgagtaa

SEQ ID NO: 445807 - DNA, 3618 bp, Serratia marcescens
atgagcaaatttttagaccgtttccgctatttcaagcagttggcggagcctttttctggcgatcacggccagaccttgaacaccaaccgcgactgggaagacggctaccgcagccgttggcaacacgacaaagtggtgcgttccacccacggcgtgaactgcaccggttcctgcagttggaagatctacgtgaagaatggtctggtgacctgggaaacccagcaaaccgactatccgcgcacccgtcccgatctgcctaaccatgaaccgcgcggctgcccgcgcggcgccagctactcctggtatctgtacagcgccaaccggctgaaatacccgctgatgcgcaagcgtctgctcaaactgtggcgcgaagcgaaagcgcagcacagcgatccggtcgcggcctggggctctatcgtcggcgatgcggaaaaagccaaaagctacaaggtggcgcgcggccgcggcggtttcgtccgctccagctggcaagaggtcaatgaactgatcgccgccgccaacgtctataccgccaaaaccttcggcccggaccgcattatcggcttctcgccgatcccggcgatgtcgatggtgtcctacgccgccggcgcccgctacctgtcgctgatcggcggcgcctgcctgagcttctacgattggtactgcgatctgccgccggcctcgccgatgacctggggcgagcagaccgacgtgccggaatccgccgactggtacaactcctcctacattatcgcctggggctccaacgtgccgcagacgcgtaccccggacgcccacttctttaccgaagtgcgttacaagggcaccaaaaccgtggcggtgacgccggactatgccgaagtcgccaagctgtgcgaccactggctgaatccgaagcagggcaccgacagcgcgatggcgctggcgatgggccacgtaatgctgaaagagttccatctcgaccgcgaagttggctacttccgcgactatgtacgccgctataccgacatgccgatgctggtgctgctggaagcgcgtgaaggcggccattacgccgccggccgcctgctgcgcgccgccgatctggtggacggattgggccaggaaaacaaccccgagtggaaaaccgtcgccatcgacagccacagcggcgatctggtggcgccgcagggttccatcggtttccgctggggcgagaagggcaagtggaacctggaacagcgcgagggcaaatcgcaacaggaagtcgagctgcagctcagcctgttgggcatgcatgacgacgtcgccgaggtgggcttcccgtacttcggcggcgccgacagcgagcatttcaacagcgtggcgctggacgagatcctgctgcacaagctgccggtgaaacgcctgcggctggcggacggcagcgaagcgctggtgaccagcgtgtatgacctgacgctggccaattacggcctggaacgcgggctggacgacgccaactgcgccgccgactatgacgaggtcaaggcctacagcccggcctgggccgaacagatcaccggcgtgtcgcgccacaacatcatccgcattgcccgcgagttcgcggaaaacgccgagaagacccacggccgttcgatgatcatcgtcggcgccggtgtcaaccactggtatcacatggacatgacctaccgcggcctgatcaatatgctgatcttctgcggttgcgtcggccagagcggcggcggctgggcgcactacgtcggccaggaaaaactgcggccgcaaaccggctggctgccgctggcgtttggcctcgactggcagcgcccgccgcgccacatgaacagcacctcgttcttctacaaccattccagccaatggcgctatgaaactgtcggcaccgacgagttgctgtcgccgctggcggacaagtcgcgcttcggcggcagcctgatcgacttcaacgtgcgcgccgagcgcatgggctggctgccgtcggcgccgcagttgggcaccaacccgctgcgcctggcggagcaggcccgcgccgccggccagtcaccggtcgagttcaccgtcgacggcctgaaaaacggcacgctgggcttcgccgccgagcagccggacaatccgcagaacttcccgcgcaacctgttcgtctggcgctccaacctgctggggtcttccggcaagggccatgagtacatgctcaaatacctgttgggcaccgaaaacggcatccaggggaaagatctcggccagcagggcggcgtgaagccacaggaagtggaatggcgcgagcagggcggcgaaggcaagctggatctggtggtgacgctcgatttccgcatgtcgagcacctgcctgtactccgacgtggtgctgccgaccgccacctggtacgaaaaagacgatatgaacacctccgacatgcacccgttcatccatccgctgtcggcggcggtcgatccggcctgggattcgaagagcgactgggagatttacaagggcatcgccaaggccttctccgaagtgtgcgtcggccatctgggccaggaaaccgacgtggtgaccttgcctatccagcacgactccgccgccgaactggcacagccttacggcgtgcaggactggaagaaaggcgaatgcgatctgatccccggcaaaaccgcgccgcacatcatcgcggtggaacgcgattacccggccacctacgagcgcttcacctcgctggggccgctgctggacaaactgggcaacggcggcaagggcatcagctggaacacccaaaccgaggtcgacttcctcaagcagcttaactacgtcaaggccgacggcccggcggtagggcggccgaagatcgagagcgcgattgacgcggcggaagtgatcctgtcgctggcgccggaaaccaacggccaggtggcggtaaaagcctgggaggccctgagcaacgtcaccggccgcgatcaccggcatctggcgctgaacaaggaagacgagaaaattcgcttccgcgacattcaggcgcagccgcgcaaaattatctccagcccgacctggtccggtctggaggatgaacatgtttcctataacgcctgctacaccaacgtgcacgagttgatcccgtggcgcaccctcagcggccgtcaacagctgtatcaggaccatgagtggatgcgcgccttcggtgaaagcctgctggtataccggccaccgatcgacacccgtgccgcgcagccgctgctgaacagcaagccgaacggcaacaaggagaaggcgctgaacttcctgacgccgcaccagaagtggggcattcactccacctacagcgacaacctgttgatgctgacgctgtcgcgcggtggcccgatcgtctggctgagcgaagacgacgccaaagatctgggcatcgcggacaacgactggatcgaggccttcaacgccaacggcgcgctgacggcgcgcgcggtggtcagccagcgtatcccggccggcatgaccatgatgtaccacgcgcaggagcgcatcgtgaacctgccgggctcggagatcaccagccaacgcggcggcatccacaactcggtgacccgcgtgatgcgccgcgcgataaatgcgcccatttccgtgagataa

SEQ ID NO: 445808 - DNA, 567 bp, Serratia marcescens
atgatggacaataagctgagcgaactgaaagcggccgcaatggcagcaacccctggtcgaattggtgaccgaatcgatggttctgggagcattaaatatgaatgcactggctacgacggttcgttggttctgcgtaccgatcacaaggatatggagtatggatttgtcggtgataatgctgatgccgatgagctgtttttcaggttgtgcgtgccggatgtggttctaaccctgctggcagagcttgaagcgaaggataagcgcatcgccgagctggaagccgaggcgaaggtttgggagtcggcaacgactaagcatcttgctcgggccgaggaagcagaaaagcggctgcccatcttggagcaggacaaattgcgcctcaacgaaatcatcaacagcgaagctaatcgcgctgatgcagcagaaaagcggctggctacgccggtgcggttgccgaacaagaacgatgatgaattttggttcgataacgtgttccaggttgcgaagttcgaccgcgcagttgaacgggctatccgcactgctggattcactgttggcgaggaatga

SEQ ID NO: 445809 - DNA, 171 bp, Serratia marcescens
atgagcgagagagaagcatttttggagaggataaaatatatctgtattggtcatggatacacagagcaaaactggaataaaggcccacatgattggaattattttttcaacatgggataccgagccaaagatgcgcgagaagcgttcgatgaagcgcggaggtgcgaatga

SEQ ID NO: 445810 - DNA, 180 bp, Serratia marcescens
atgccagcaaatgaactgaagcccggaagcctgcgctatttcgatgaagaaaccggcgcgcatgttgtttcagagcctggcgcgacttcgtacagctcaacagcgatggcggcaactgaattttttaacggcatcgagtggttgccggtagatggcgatggggaggtggagcgtgggtag

SEQ ID NO: 445811 - DNA, 234 bp, Serratia marcescens
atgtccatatattgggctacaaagataagtcggttcttatcgactatatgtcacatgccaaagcatttatatttgcagcagaagaggactttggtattgttcctgttgaggctcaaggttgcggaacccctgttatcgcatttggaaggggaggcgctctggaaaccgttagacctcatggtaccggaaaggcaacagggctattctttgagcgacaagatgttaaatcattaa

SEQ ID NO: 445812 - DNA, 840 bp, Serratia marcescens
atgaaaaaaaccagactgttgttgatgttagcctgctcgctgtttgtcgtgaccgcccaggccaagacctaccaggtcggcgtggcgctggccaacttcgatctcaacttcgtctctatcctgcgcagccaaatggcgcgggaactggttgcgcagcagctgcaaggccagttcgttgatgccaaaggcgatgtcgccctgcaggtgcagcaggtagacgatctgattaatcagggcgtggacgccattatcctcaacccggtcgatacgcaaggcgttcagccgatgatagcggccgcccaacgcgccgctatcccccttatcttcgtcaaccgcaaacccgaagtgccgctgagcggcgcgacggcctacgtcggctccgattcggcgctcagcggtcgcctgcagatggaggctctggcgaaaaaaatgaattaccgcggcaacgtggcgatcctgatgggcgccctctccaacgaagaaacccgcgagcgcacccgcgcggtggaggcggtgatcgccaaacacaaagagctgaaagtggtagagaaacagactgcgaaatggcaacgcaatgaagcggtcgacgtggtctccggctggttgctgaacggcgtactggttgccggtatcgatggcacgcccgacggcctgcaatttatcaaaaacggcgacctggcggtgaccattttccaggatgccaaagcccaggcgatcggcgcggtgcaagtgacccgagcgatgttggatcacgccaaaaccgagtcttacaactgggtgccttatgccaccgtgacgcgagaaaactacccgcaattcgcgcagatgaaccagaaataa

SEQ ID NO: 445813 - DNA, 2880 bp, Serratia marcescens
atgcagcaggtgaacagcaatgaacgggatatcgccctggttggcatggcctgccgtttcccgggcgccgaggacatcgaaagctggtggcataatttgatcaacggtgtcgaatccctggttcgcgtcgataacgatcgggatgatgccgtcgacaagggatatattcccgtcgccgcgcctgtggccggcgacatatctcgctttgatgcaggattcttcggtattagcgcgcgcgatgcgctgctgatggatccccagcagcggctctttttggaatgcgcctggcacgcgctggaaagcgccggtgtgacaccgggggaacttgaggataccgggctgttcgccggctgtagcagctctgactatttacgtcaggcgcaaggatccgagctactcgataaactcaatccttcgccgttcgagcggcaaataatgagcgataaagattacctcaccagcagggtggcctggcatctgggcatcggggggccggtgtgcaacgtgcaagccgcctgcgccacttcgctggtggcggtatacgaagcggtccacgccttgcgcagcggccgttgcaacctggcgttagcaggcgcttgtaccctaaggatcccgcaaaacgacggctattttgcgcagcaaggcatggtgttttccaccgatgggcactgccggccattttccgcagatgccagcggtacggtattcggcagcggcgtcggtgtggtggtgttgaagcgcctgagtgatgcgctggcggccggcgataacgtcgtcgcggtgatcaaaggcgtggcgatgaataatgacggcgcgcgcaaagtcagttttaccaccaccagtttgcatggccagcaacgcctgctgcgccaggcgatggacgatgcccggttgacgcctgaggattttcgcgccatcgaagcccacggtacgggcactctggccggcgatcccatcgaattcgaggcgctgaacggcgttttccgagagcatacgacacgacgggggttctgcgccatcggcgcagtcaaggctaacgtcgggcacctggaaacctgcgccggcatggcgggattgattaaggccgccctgcaaattcagcatggctggctcacgccgcagatcaacgttggctcaccgaatccggaaatggcattggcggagagtccgtttgagtttatctgttccgctcaacggtgggatcgcgaggatccgcgccaggccatcggcgtcagcgcattcggtattggcggtacgaatgcgcatgtcgtactggcgaggccgcctgtcatgccgccggcgcgaacagcggcctcattgtcctccaccgtcgtaccgatcagcgcacagtcagaacaggcctggcatcggctggtaaaacgctatctgcagcgaccgcacggcgaaaacgacgaacgcttggcctggagcgcgcaaagcggaagaaagtcgctgcgctatcgcggcaccttgcagatagacgatcggggcgcgttgagcgtgaaagaaaacatgatggatacggggaaagggcgcttgtcggtagttttccaattccctggccagggaagccagtttatcggtatggccagcgatttgatggcgcaggacgcgaccttcagaaaactgatgaacgacaaactgcagatagtgcaaacgcaagccgcactggatctctcggcgttatttaccggagaggccgcgcccgagtcgattaacgataccgcgttgacgcagcccgcgctgatcgccgtcgaaatctccgtggccgaactgctgatgcattacggcgtcgagccggattgggtcattgggcacagcctcggcgaaattgcggcggcctgggccgcaggggtgttctcggtgcaagaggcgctggttttcgccgctcatcgtgggcgtctgatggccgggttgccgtccgggatgatgttggcggtagagctgagcgttcaacaggttcagccctggttgagtcatcagctatcgctggcggcagaaaacagtgatgacggctgcgtgctgtccggcaccgctgaagccattcgcgcttgcgaacgccagatgcgagaccgaggcgtgcgatgcaaagccttgaatgtttcacatgcgtttcattcgaccctgatggatcccattcttgacgagctggccgatattgcgccgccgccgggtgaatcggcgacgggggtacgttacgtctccgccttgctggcgaccgaagtcgaatgttcggcgcttgacggccgctattgggcgcgtcatgcccgtgaaccggtcaattaccaccgcgccttgcagcagctaccgcagcgcggcaagacgttgtttatcgaagttgggccgggttcgacgctcacggcgttggttgcacagctgaaatccgccggttctgtgaccgcggtgcgaaccttgccgcgtcgcgacgaagcgcagaatgaaggtgccgtatggatccaggcgctgcaaaaaatctggcgcgccagcgtcaacgttaactggcgccgcctgtggcaactgccgccttcgcgcatcgcattgccgatgtatcccttcgatccggcgcactggtggttgggcgaacgggacaggcaggggccgcaagccgagcgaacgccggcggcaacaagccagtcagatccccagatggcgcgtatctggcgcgtttggggggatgtgaccggcgtgaaccccgattctaaccactgtgacttttttgacgtcggcgggcagtcgctgatggcgctgcgcctgctggcgatgttggagcaagagtttggcaaggcaatagggatggccgattttcttaagcggcctacgccgtggggcattaaacaacagttggaccaggctggagcattcgagcaagattctcattaa

SEQ ID NO: 445814 - DNA, 1254 bp, Serratia marcescens
atggcaaataaatggttagaaagaaaagagcctccatcaactcaatggaatgattatgctcgagatcgagcgagaataattcactccgcttcattccggcggctacaaggtaagacacaagttcttggtgttggcgaaagtgatttttatagaacacgcctaactcattctttagaggttgctcaaattggaagtggaattactgctcacttgagtaagaaatacaaagacgatttgcccataagagattatctaccagacgcaaatttaatcgaagctctagggttggcccatgatattggtcaccctccgtttgggcataaaggagaagcagctctttctgagaaaatgtgggattttggaggttttgaggggaacgggcagacattaagaatttgtacaagactaggagagtcatcagaatacaacggtcttaatctaacacgcagaacactattggggctattaaaataccctggtgtatttaatgatcttaaagcattaacaggcccaacagaaaagccacctaagtgcattcttgacacagaaagaggagagttagcttggattattgatatattgccaaatagtgacaaggatgaattcctaagaatagacaatataaaccccagcaatgaaaacggaagaacaatttataaatcatttgattgcagtatcatggagctatcagacgatatagcctatgcagtacatgacttagaagacgctatcgcattaaaaataatcaatgccgaagattttcgcctctgggcaaatgaaaataatatagagggatatatgaaatacattgatgatttgttcggcacaaaccaccccaaaagaaagaaagtcataagcgacatggtacacagatttattgatagtgttgaggtgaaaaaacaagggttgtttaaggagccactaatagacttaaaggcttttgttaaagaagatatttccaaggaaatctccgcattaaaacggctaacttataaaaaggtggtaaataaacatgaaataaaaacaatagaatttagaggagggagattaatatctgaattatttgatattttaaatcaaaatactgaaaaacttttacctgagcgatatataaacagaataaaagaaaaccctcaagtaccaaaagaaagattcgtatgtgacttcattgccggaatgacggataactatgcatcaatgctttatgaccgcatatttaccacaaacagtggctctatattctcgaaactttaa

SEQ ID NO: 445815 - DNA, 360 bp, Serratia marcescens
atgactaagtcagtgttcacgattagcctctctaagtctgttggcgaggaaatgaagccatttattgaaaaaattatcgctcaggaaaatagaacccttcgcatacgggccagaacgggtgactcggtaaaagcggttaccaccgtgataggctatgtcttcgaattcatccagaacaaagaggtttgctggacggttggcgccatcgtcatcgcatggatcaggtcaaaacatggcaagcggatctctataaaaaaagatggctacgaattagacgcaagaaatttaacagagcaagaactgttcaaattactcagcgagacggagtcaaaaatttctatatccgaaaagagcgaatag

SEQ ID NO: 445816 - DNA, 1992 bp, Serratia marcescens
atgaacgttgaaaccctcaaggactttctgatctcgctgggcttcgaaattgactcggctggagagaagaagttttctgccgtcgtcgccggtgtcacggcgaacgtgctcaaaatgggtgtggcggttgagggtgcggcgctgtcggttattgccttcacaacgaagattgcccaggcatccgatcgactgtattgggcatctcagcgcaccggcgcatccgttgccggtattcgtgcgctgggctatgccgcatcacaaaccggttcagatgcggccgctgcgcagaactcactggaaagccttgctcgcttcatccgtaacaatcctggcgccgaaggggtcctgaatcgcctgggtgtgaatacgcgcggtgcaaacggccagatgcgtgataccgctgccatctttaccagcgtcggggataagctgcgcaatatgccgtactaccgcgccaaccagtacgcgcaaatgctcggcattgacgaaaacaccctgatggcaatgcgtcgggggatttccgggtttacggcggattatcagagcatgctgaaggccgtcgggctggactccgataaagccgctgcacaatccaataaatttatgacctccatgcgcagcctgacagcgcttctgggcatggcaaaggacaagataggctctgaccttgccggaggtctgagcggctcgctggagtcgctacgcaagcgcatcatggacaacttccccaagatagagggcttcatcaccaaaacggtgaaaagtatcctctggctgaccgaggtgtttgggcgaatgctctatcgcggataccaggcgatcgacaaggtgatcgagtggtggaaagggcttgatagcgagtcaaaaaaactgcttggcacctttggcgcgttgctggtggcttggcgcatgctgaatagcgcgttcttgatgtctcctatcggcatgctcaccgcgttaattgtcgcgatgggcttgctctgggacgattaccagacttggaaagaaggcggaaaaagcctgattgactggaaagcgtgggagccggcaatcaccaaggccaaggaagcgatgatctggctgcgcgataagctactcgaactgaaagacgccgtcggcggttggaagactgcactggagattttggcggggtttatcgcggtcagctgggcggcgaagatgattggcgccataagctctgtgaccaaaagtgtcggtgggctaaccaaagcctttaaagggattgggcgcgcaggggtaattggtggggcgctggcgctggaggagtatgttgccaagccgcttgaggaaaaatacccctggttgaaaaacaacatggttgccaacctcctcaacaacttgccgggtagcgacacggttgacgagtgggggcgcaagctgttgccgtggcgccagagtgaaccagaccaaagcgcgcagtctgccggcactcctcggggaatacggaacaataatccgggaaatatcgactatgtcggccaggccggcgccacactggagcgaccaggcggccggtttgcccggttcgaaaccgcgttcgacggtttgaaggcgatggcgcgccagttgctccgctacttcgatggtaaaaccaccgggagacggctgcagactatttctgaaatcatttcgacgtgggcaccgggtaatgagaacaacaccgccgcctacatcaagcggctgtctgacatgatgggtgtctctcctaacgcacgtctcaacctgcgcgatccgagcacgatgtcggcgctaatgggcggcatcatccatcatgaaaatgggcggaacccttacagtggtgaggttataggaatggctgcgcgttcagcaacaggtggtgccacagtgcagcaggaaaccaacattcacatccacggcgtgagtgatcctctcagcgcgggtaaggccgctgcaggcaagcaggtagaggtcaattcgcagcttactcagcaactgaagagggtcgggtga

SEQ ID NO: 445817 - DNA, 1356 bp, Serratia marcescens
atgactcacgaagaagccgaaagtgcggtaattggcggcctgttgctggatcaggcgggaccgctgacgtttgacgtgttggcaacgctggcgcctgaatcattcgctacgcgtcaatatggcgcgatgtatcaggtgatccgccagttggttatgtctggcggagaggttacgccctttgtggtggcggacaagctcggccctgaatatgaacctattgccgtgagcgtcagcagtcaggcctgggcgcgcgccggcctcaagtcttacgctgacatggtgaagcgcaatcacttcatccgtaccgctgaacggttgttggctgattcactggaagggatacagcaggcaaacaccggtgacgctgctgttgaagcaatacagaccctccagagaaatatccagcagcttcagatcggcgatgctgggcgagtggccgtgcacatcaacgagctgcttaccggtgttgctgatcgcctcgatgctggcatgtcaggttcgcaggaaggccgcaagatactgactggcatcgaagaactggacaaaataactggcggctttgagcccacagatctcgctttgctggctgcgcggccatcggtggggaaaaccgagtttgccctcaacctgatagagaaaattaccgaccagggcgccggtgtgttgatgttcagcatggagatgtcggccattcagatcgccgagaggcaggtggctggcgctggtggattttcgacgaccaagttgaggaagccgcaagagctcgaggatgaagactgggcacggatttccgatggattggggcgcctgacggatcgccctatctggatcatcgatgccaacaatctgaccgtcgagcaagtttgtcaggatgcagagcgcatgaaagccgaacacccagagctggcggtggtgttcgtagattatctcggtcttatcaaggtcaacgaacgccagcgccatgacattgctgttggcgaggtatctcgcagcctgaagcgtctggcaatgcgcaataaaacgccggtggtggccctgagtcagttgtcgcgcgccgttgagcaacgtccaaacaagcgcccggttaacgcagacttgaaggactccggcagcattgaggccgatgctgatgtgatcatgatgctctaccgcgacgaactctataacgagaacagcccagcgaaggggatagcagaggtcaacgtaaccaaaaaccgcaatgggccgctgggtacggtttaccgacagttccgctacggccatttcttgccgattgaccaggttgaggctgagcggctgagcaagcaacagccagagcaaaaagtacgccggtacagcagtagggggaatgcatag

SEQ ID NO: 445818 - DNA, 879 bp, Serratia marcescens
atgttaaattttgagcagcgcaaaaaacgtctggaactggagcgtcgggaagctcaactggcggattgtctggattacgctctgggtggcgagatcccttcgcattacgcaagctgggaaaaacaaattcagccagtgatctgcgaatcccatggtgagtaccagcaaatcaccttgacggggccggagtatcgcggcgttcccggtcgaaaagtctcactgtgcccggattgcctgcgggaagagcagcgcgatgtcaaatcagaactacggcagctcgcagttgaaaatctgctggatgaagccggtattgccccgcgtttccagaactgcgagttttccaactaccagccggtcaatccgatggcagcgaagaacctgagcaactgccagcgctatgcgcagagctgggagaaaattttcgaatccggtaccgggttggtgatgacagggagttgcggcactggcaaaaaccacctggccgtttcgatggcgaaacaaatcatccgcgaccatctggctgaggtagagatcactgatgtaatgcggttaacccgcgaagtgaaaagcacctggcgcaatggcgctgagcgcacagaatccgaagtgttgaaccgctttgccacgctggatttgcttattatcgacgaggttggcgtgcagtttggtacgccggcagagctggccatcctgcaggaggtcgtcaatgcgcgttatgaaaatattcttccaaccatcctgatcagcaatctgacgtttgaccagctaaaagcgtttgtcggcgatcgcattgtcgatcgcgtcactgacggcggcactaaccgaatggtctttgattggcagagttatcgcagcaacaaaggcggtaaggccgcatga

SEQ ID NO: 445819 - DNA, 1014 bp, Serratia marcescens
atgagtatttacacgcctacgacaaccgtgtcggccataggccagatcaatatcagcggtaatgtcatccccgccacctggtgggggcacattcgcctgccaagcggcaaaccagacagcacagccatcgtgctgctgtctgagattgtttattggtatcggcctgcagaggttcgcgacgaatattcgggcgagctcaaagggctccgtaagcgctttcacggcgacaaactgcagcgtagttaccaggcatttgccgatcagttcggattctccaagcgggagacgacggatgcactgaagcgcctccgtgaggccgggatcatcacgttagagctccgaaccatcaataccaacagtggcgctgtgaacaacgttctctatgttgagcctgtcgcggaaaaagtggcttatgtcaccaacaccatcgccggtgatctggttgaagtacagccagaaaatgacgccatttttggaacaggccctacgttgaaacggaataggggttacgttgaaacggaacaggggttacggcaagacggaacaggccctacgttgaaacggaagacaaatacagagattactacagagattactacagagattactacagagattaaaaaacctattggcgcattcgctgacgctcctacgccgacacgctctgccaagcaggattattcacctgaatttgaaacagcctggcaggcatacccaaaacgcgccggcggtaatcccaagccctcggcctacaaagcctggaacgctcgcctcaaagacggtgccacgcccgaagccatgctggcaggggtgaagcgctacgcagcgtttgtggcagccaccggcaagctgggttctgagtacgtcaagcaggctgcaacgttcttcggccccgaccgtcacttcgatgaaacatggcaaacgccatccgcgcccggaggtgtgcggcataccttgccgccggtgtcgggtttcgaggggcagaattacggtgagtctgggtgcaactggtga

SEQ ID NO: 445820 - DNA, 132 bp, Serratia marcescens
atgagttacggccagaccttccaacgttattccctgcaccggatcaagccgatgcctaaccccctcaaaaccatcatgccggcagtttactgccaggcggaggagttgctatgcgtctcgctgacaaactga

SEQ ID NO: 445821 - DNA, 3129 bp, Serratia marcescens
atgacagaccgcaacctcaatattcgggtggcgctcagcgccgccaacaaactatccgggccggtcagcgcagcccaacgcagcgcggccggtctcgcgtctcagatcaaagccacccagggcagcatcaagaatcttgacagccaggcgaaaacctttgatcgcctcaacgcgtccatcaacaaaaacgccgcggcctatgaagcagccaaagccaaggcgaaaagcctgcgggccgagtttggcccactcaagcaacagaccgatgagcaacgcaaagcactggcggcatcacgcctcgaacgtgaccggttagggcgttctctcgacaaagaaaagcaaaagcttaatgccgtcactgctcaaatgtaccgccatggcgtctcagtacgtcaaagcgacagcgccaccgcacaaatcacccggcgaaccgaaaactacaaccgccagttggccgaacaacagcgccgccttagcgcagtaacgcgcatgcaagccaatgtcgcccgcgccaaagaaatgcgcggaaaactggcggcgggcggggctgcggcaacagccggcggcgccggtacactatatggtgcctcgcggatcatgatgcccggtttcgacttcgacgaaggcatgtccggcgtacaagcattgacgcgcatggacaaaagcgatccacggctgaaaatgctgcgagagcaggcccgcgccctcggtgcgtcaaccgcctacaccgccacggatgccgcatcagggcaaaaattcctggcaatggccggtttcacccctgaatccatcaagcaagcactgcccggcgtgctcaacatggggcttgctggggatatgggactcggcgaggcctcggacatcggctctaatgttctgacgcaatttggtatgaaagctgaccagatggatcgcgtttctgacgttctgacagctgcatttacccgaagcaataccgatctgcgcatgctcggcgagacaatgacctatgccggccctgtcgccgctgacctggggattagtcttgaaaatatggcggccatggctggcgcaatggctgataacggcattcgcggcagtatggcggggacagcgcttagagcaggcctgacgcgtttggtggcgccggccaaagccgggcaagatgccctcggcgcgctaggtgtcaaagtaaatgatgcgcagggccgtctccgagctatgccggagatactgaaagacgttgcgaaaaacattcaaaaatttgatcaggccagccaggcacgcatcaagaaagatatttttggtgaagaagcaatggtcggcatgggagccgtactcaaagcggcgatgaatggccgctatgatgaacttaacaccgcgctggaaaatgccaaaggcgaggccgataaagtcgccaaggtgaaggtcgacaacctgaaaggcgatgtgaaacagctggtttctgcctgggaagacctggggatccagatggaagagagtgtcgactctccgctccgcaaattgactcagggattcactaatctgatcgccagcgtcggcaaatggatgaaggccaatcctcagctgacctctgcactcatcaccgccggcctggtgattggtgtcacagtaaccgcgctcggcgcgctggcgctggccgctgcggcactcattgtgcccttcgcgctgatgcgcctcagtttgttcatgctgaccggcggccgcggcctgggggcgctgattccttcagcaaaagggttgaccggcgcgcttggccgcctgctcccctctttgtccggtgtcggtcgcagcatcaaagactggcccggcgttttccgtggcggtctgacggcgctgggaaacttacgcagtcgaatcgcgttgttgggcagcaacgcattgatggggttatcacgcggcgcggcaacagccggccgtggcttgttcctggcatttacccagcctggcgcggcgctggctgcgctgggtaatggcctgcgcgcacttgccacaggtggtttcgggacgttgttcaacgttgttcgcaccggcctgaccatgctagggggtggcttctccctgctgctcagccctatcggtttattggtcgcggctattgtcggcgccggcctgctgatctggaaattctgggaaccaatcaaagcgtttttctctggtttctttaccggtctggttgaaggcctggcgccgatcaaactggcgtttgaggctgcatttgcgccgctggcgccgatattcgatggcatcagcagtgcgatcggcaaggtgtggaactggttcaaaagcctgctcgaacccgtcgaaacatccaaggaatcactggagaaatgcaccgccgccggcgaaaccttcggcaaggtggtcggcatggctatttctggcctgatgtggccgatagcgcaaatcgccaaggggttaggctggatactggaaaaactcggcgtgataccgagcgccgccgaggcggccaaacaggcaatcgccgcaatgagccccgacgatgcgaagaagctcgcgggcaaggccaacctgctgctgcaagatgtcaacgccatcacccaggcaggcaaaaaaaccaaagaagctgaagagaccaaacaggaggcgataaaaaagacgggcgaaacggtagagcaggtttacggaaccgccgtctatggcagtgcggcagaccgaaaaggcaaaaaatccaaagccgccggcgccgcagcatcaaccgcagccggtacgccggcggcagaggtgaaaaagctgggcgacatcatcttcaaaaatcgtccgccggtgacggctatcgatggcgcatatcaggaaccgcgtttgcaggtacagcgcgaatccttgcttgcccgcctgaagcgatcagcggtcagcctggcggatagcgtgctgccgccgaccatacagccggcactggcggggatccccattcctgaaacgccggtacgctcatttaacggtaaccgccagccagtcagccgcgacaattacacgttcgaagtgcattttcatggcgtggacatgagcgatcaccgggcgttgggtgagctggtgaaagacaaattgcgggagctgatgcgcgaaaacgacacgcgccgccgttcccgcctgagcgataaggagtaa

SEQ ID NO: 445822 - DNA, 1008 bp, Serratia marcescens
atggcgcgcgctccgatcccccgatacgggatagccgagtggttcggcaacaacatcaccaccatgacacctgaggagcggaaacgcttcggacagctagctgcagatcaagaccaaactggcgacatttctaacgccccactctgcccatttctctcaactttagttccggcggctcgatgcaacaaggccagtggggtttgcagtattcgccgcttctctccgggtttagacggttctggaattcctgttgctaatgacaaaatcgtgacggtttgcccgtctcgattcctgcaaccactagataacggtaaaagcttgttcgtttggatttctgaaaagatgctcgatgctgataacccaacagtggtgaaggaaacgccatttcttcgaaaagtttctgactattcaaccggtgataacagcgacgatgaagaaggtgagggcaagaaagcgggtcgtattgattggattctggttaatccggctacgatgaatgcaggagagttagagtggtgtgctgttgagacgcaagcattgtatttctctggagacaaaatgcggccagagttcgatgcatacgcagcggctccgtccccggttctattcccggtgggccgtcggcggcctgactatcgcagtagcggcccaaagcgtctttccccacagctcgacgtaaaagttccagtgcttaggaactggggaaaaaaggttgtagtagtaattgatcgatacttttacgacaatatgaacgctctggccgatgcctacccgcgagccaggaatgatcaggaaaggcgtgacaactcagacgtggcttggtttgtcgttgattacgacgacgctctgaacatgacaaccagcgcggtaatattcaccacgctggaaagttctcggcgggcgcttaatgcaacggaaccattgaataaagccgatttcactcgcaacctgaaacaggtcattgatgacaggtcacgcacgaacaaagttttcaaggcttcagaataa

SEQ ID NO: 445823 - DNA, 1023 bp, Serratia marcescens
atggactcaaccgcattgcaacgccaaaaccgaagaatcaagcgtctaaaatctcagggggttagccgctccactgttttagttcatgaagaatgccggcctattcttgatgatctaagacctcactttatcgatcctgagaaagcggataccctaagtgccttagttgatcagttacacaaaaaagtgaaaccgaccaatgttgcccaagtgcgccatctaagcccttttcggtacccaggaggcaagacctggcttgttcccgaagtacggcaatggattttggctgcaaaaaagccaccttccatctttattgagccctttgccggtggtgcaattacgggtcttagtgttgccgccgaaaatttagctgacagggttctcttatcagagctggatgatgacgtcgctgccgtatggaaaactatttttcatggctcagacagtgacgtggctgaactgtctaacaagataatcagttttgatgtgactctggataatgttcgtgacatcctcaaaagcaaacctcgctcagccaagaacaaggcttttcgtactgttataaagaaccgaatgcagcgcgggggcatcatggcggccggtgcaggtctggttaaagaaggcgaggccggtaaagggctgaaatcacgctggtatcccgaaacgctggcaaagcgaatcgagatactgcgtagtatgaaagacaacatcgacttcgagcatcgagatgcattctcggttattacccgctttgtcgacgactctgatgctttcttttttattgatccaccatacaccgctggcggaaagaaagcaggatccagactctacactcataacgaaatcgatcatgaaggattgtttgccctaatggcaagcgttcgcggatcagtaatgatgacctatgacgatgcaccagaagtacgcgaaatggctgagcgtcacgggttccgcattgagcttgtacctatgaagaacacacatcatgccatcattcacgagctgcttattctgaagccttga

SEQ ID NO: 445824 - DNA, 156 bp, Serratia marcescens
atggtgtatctggggagagaggccgcgagcggagtttgcaaagcgttcatcagtcagatgctgccgcatgacacttacatcgaaacgctcctggcgagtgtaaagctttcaccgagctgctgctccgtgagtatcaagcgcctgaagcatgtctag

SEQ ID NO: 445825 - DNA, 1098 bp, Serratia marcescens
atggataaatactttagaatacgccctcagtggagcttagtagaagcatttgaagagacaaataaatactatcagccagggagcatggtaacaggtgccgcccgtaacgttcaaattgagaattggggtatattgatcggtagaactagggcattagctgaaataaaatatgccattagtttattcggttcgaaaagtaaactatgcgagcatataaaaatgtcagcaaaatactttaatatgttggtggatttctatcaagaattaccggatgataaaaaacccggaaaaatttatcaaggaatgactatatcaggatatttccttttaaagaaaattggtggtggtggtaatgctgtagtttgggaggtaagggatcctaaaggcaaagtccacgctttgaaaatcctaaaaagacctaatgccacatcaataaatcgcttcaatgacgaaattttaacattaaaaaaaattgaagacttaaatgatagcatgatgaatgttatcaatgttaccgatagctatcaacttggttccaaggataatctgccatggtatgcaatgcctaaggccatctcactagataattacattgaaaaacattccccctcgccgttgagcatactaaaaggaatgctagagatatgcataactattgaatcccttcacaaacaaaaaatatttcacagggatattaaacctgacaatattcttatctacaaaaataaatggcatctatgtgattttggaattgccactttcccgaacagacaaaggatcacaaaggagggggagaaattaggctcattgcactttcatgccccagaaatgctaatgacttcagagcaagactcgggagagagtgcagacatatatagctttgctaaaacactatgggttcttttgagtggacacaaatatccgattgcaggcgaattgcgtttagatcgaagtgaagctttattatcaacttattgtcagatgaaaaacatccattatctagattcagctatatctgaatgtacacggtttaacccaagtgaaagaccaaaaatggagtcggtaaggtgctacattgaaaaggtattatcggaataa

SEQ ID NO: 445826 - DNA, 798 bp, Serratia marcescens
atgagtgcagagaaaggccgtgatcctgggttttatatcgagcataatcataaggcagtgattgtagagggtcagtatgagtctttaataaaattacctcaatacgtacgaggtaaagaatatgacagaatatcttatttctgggatgaattcattgagcatttctccagacatgctttgggagggactttactatatgagaacaaacacccattatcagatgcaactttaggcctacaaataatggcatcagagaggagagtagcccgtcgagtattatcaagatcaattttagaaaaaatagagagcactccaccacaaaaaaaatcagttcgtatcatgggctcacccaccaatccaaattatgggtatgtttggctgatattacccattccacctcaagctcaatcatatgaagattataggcactatagaaaggagtgcctttatatttattgcacatccgcaaagttattatacccgaattttagtaatatcgttggagtagctactgagccacgtgacggtgggggtggagaggatatgatctatcttgatactaataattgggaagcggctgatttcgagcaagcggagcaagatcgaaaaaattttgggatattactacctgaaaatgttcagcagttctctggtgttgaatatcagtatccagtaaatgatgatgagggtttgtattcagaaaaacaattacggcccgttataaatattaagcaaaaaaagaaaaataaaaataaagctcaaaagaaagctagaaaattaaatcgtaagcaaaagtag

SEQ ID NO: 445827 - DNA, 495 bp, Serratia marcescens
atgagcgcggaagagaaaagcaacaccgtgctggtgatcaacctcgacagcctgatcaccggcgatcgtctgtacttcaacgccgggcgcaacacgccgccgcagatggcgaagcgctcccgcgatcgcgcactggatatcgcccaccgctacggcatcgccgccgccaccaaccctggcaacgcgcagcatccgcaaggcaccggctgctgttccgatcaagaggtgttcgacgccgcaggcatcccggtattgtcagtggaggccaccaactggtcgctgggcgacaaggacggttaccagcagcgcgccgtcagcccgcacttcccgcagggcatcacctggcaccgcccgcagtacgacaacctgcaatatctggatcgctacctgccggggcggatcgacaaacgcagccgcgacagcgtgcagatcctgctgcccttgatcaaagagctggcgcaggcgcacccgccgaaagcgcaaaagaaaaagtag

SEQ ID NO: 445828 - DNA, 1110 bp, Serratia marcescens
atgagccaaagaactataaatgctctcctttctagaggaatagctagtgggttagctgaaaatctttctgctagagggtttactctgaaggccttaaaacaaatgaatgttgaaaagctttcaaaaattggtttatctacgcttgatataaagcaacttcattcgggtggacggcctcctatacctgaaagtacattgataaatttactttggcacaaccgcagaacttgttgtgtatgccgtcagcagcacaagtcaatcatcattcaccatatagaagaatggtctgtctcacgagaccatactataaaaaacttggctgtgctttgcttagactgtcatgatatagctcacacaaaaaagtctttaagtcagaatctgacaccaaaagagcttagagaatacaaaaatagatgggagatgattgtcagcaaaaatgatatccagacacttttcaatctaaaaacatctcaaagttctgcccgttgggattggataaattgtcgtcgcgtttttgagctttttgaaaaattaggtttcaccatagataacctgagtgatttcaataatctaaaagaagatggatttattgatgaccgaggttttattacaaatgatttgaaatggaacattgataagagaagaagattttatttccttgactttggtggcgcatttaacattgcaggctatcttggctcaatccttgaaattgttttagaaaatactccggttatcgacatcacaccaatactcaataaaagaaatgaactcagagcgctcgttgaaatgggcagtttcatttcaatacaagcacccttctacttttcgaccatcgaagatggtcttactgattttgatgaggtgaaaagagcatattaccgaggttataatttaagagtggaattcacatttcaaccttggtattgcacgagctctagcgcgaaacacggagctatgtcgggacgtcatgttcagactgtatttggctttgtccgcgatatctccatttacgatgatgaacttataatctctctctcttgcctaggcgcgggaactggtttcaaaaggcatgagaatagagttaaatcggcatttgatatatattaa

SEQ ID NO: 445829 - DNA, 534 bp, Serratia marcescens
atgaacacctcattcagcttccgcacgatggcgatcgtcctgctgctgctggcgctgattgtttccggcaggctggcgttttacttccacagcaacgcagtaaaggccggtgagcaggttaagcagctgcagagcgataacagcctgcaggcgaatacaatcgccacacaggcgtttcagttccagcgcgccaacgaaatcagcaacgcggtgactcagtacggcatcaataccgacgcagccacccaagggaaagaaattgaataccggacgatcctcaagaaacagccgacgtgcgatctggctgtgcctgccgctattgctggtgggctgctcgactacacgtaccgtctacgttcccgcgcaatgtcagccaataccggcgacgctgacgcaaccggtactggcgccactgcctccagcaccctgacttactgccaagcagttctatggattgcaccattgctcgcagcacatgataaggcgaacaaccaaatgttggaaattcgcaaacttgatatgatgctgcggtag

SEQ ID NO: 445830 - DNA, 141 bp, Serratia marcescens; identical to SEQ ID NO: 102393

SEQ ID NO: 445831 - DNA, 141 bp, Serratia marcescens; identical to SEQ ID NO: 102393

SEQ ID NO: 445832 - DNA, 141 bp, Serratia marcescens; identical to SEQ ID NO: 102393

SEQ ID NO: 445833 - DNA, 207 bp, Serratia marcescens
atggaacagagagagatcaaaattgttgctgaaggggtttctaacgaggatgtgctcaaatggatgcaaaagaaagtgagtgcgtcaagaaatctgcaagtagcgcttgcagagcgtaagaacttggagcaagcgcttgttgaggtggaaaagcaaataacgctacttaccaacgaggcgtctgtggaagtttgtcaatcaagttag

SEQ ID NO: 445834 - DNA, 1005 bp, Serratia marcescens
  misc_feature (134)..(143): n is a, c, g, or t
atgaaaatttttgagaaaaaaactaaacatcactatgtatgggctcattaccttcgagattggacaatcgatggaaccaacatttggtacattacaaagaaatctaatatcgcttgcgacagtgttagaggtcnnnnnnnnnnaggtgttagaggtctcggttttgagagaaacttctacaagatgggggaactcaaagaaagcgacaaagagttaatttctcttataataaataaatcaaatgaaacattaagggggattcattgggattttgtggatatgatatttaaaacccagagaatcatttcactattatcaccaagcgttaaagaaaagtcagggttaaacccagaagaaataatgcgaagcaatctttttgaaaattatttgtctaaacaagaatcgagagctatagaaatattaagtgaattaaaaaaaggtaatctactttgtttagaggataaaaaaacttactatgacttctgctatttcttaggttaccagttctctagaaccttaaagatgaagaaactattaattctggcactggataaaactcctgggcaaattaatgtccgtgagcgccttaaagatttttatgagagaaattggtggtttatgtgttcattcatggcaactaacctttcgtacgacatgtcattgaatactgaacgaaagttaatgctccttgaaaatgaatcgagcattgatttcctaacatctgatcaaccactaataaacataaatccagaaggaagtgaaggtgaatctgttgattattactatcccctatccggccgtaaggcgcttttaatacttactagtggtgaaagctatttttcaagtaatctgctaaatgatgatgccgtacatatgcttaattctaagatggcaaatgcctcatgcaacaccatatttgggaaaaaaagagaagatatcaagatgtattcaaaagaatttaatcagcgtaaatacttagaatttgtaggaaacctaacagactga

SEQ ID NO: 445835 - DNA, 936 bp, Serratia marcescens
atgaataacaatgcatccttgaaaaaattcaaaaaactaagaatcggtttcttcactagttctactggcactaaaacaaaaacctccaacgcccaaggagctttcgaaaatctttataaccgctgcgcgtcgctgattaataatgcacacaccgctgaacttcatgataagaagcttaaaattgtctttcatgaaaaagatgtggacgcaaaattctattttggttatatctcttgctccagggacggcttccaccttccgtatataggtgatgaaaactggaatgagcacaatatccctctggatgataaaaaatatatagttgaaaggacatattttttatactattacgaaagcgacatcctacttctgtcattaaaccacttaggcccaaaggagagggatttatcctatttattgtttagtacatatgacctttctaaaccaatttcatttgaagccatttggaaaaaagaaagtattaagcaactccttgagactggaagcactctaaggagttgtgaggtgactatggccgcacctcgtaattttaatgctacaaattatgatctcaccaactctttctccaaaaacctagttgaaatgatggttggcatgggaggtacacacctcaagctaaatttacgcggtagagcttctggcagaaaatctataaaaggttacttgtcagacgaggttaaagaaggattaaaagaattattagaaaaagcacccgcaattatgagaaaggctgaagtaactcaacccaaggatactaaaagtaaaagtctcctagatcaagtgctaatctctgcaaaaaatgtttcaactatcgatggctactcaaatcctacagaggtgcgtttagctctggtttctgctaaaatagatcatctagattacttaaaagaatatgatataagcaaaaatcaataa

SEQ ID NO: 445836 - DNA, 816 bp, Serratia marcescens
atgcgattctcacacttgtttttggctgtcattgctatttgcttattatatgcttgtatcagttttactatatcttggccatttgatgggtgggatagagagtcactaggacaatttggtgattcttggggggttgtgacatcgattttttctgtatttgctttcttaggggttgcttactcagtaaaaattcaagcagaatctttgaaacagctgaagaatgactcaaagtccaataatatgatgatgataaggcagcaggttgaaggaaacttctttcaaatgttaaatttgttgcaatcattaataaatgatatggatatacaaggggatggtagggatggggtggtattcgaaagaaatggcagggatgtttttacatacttttataagaaattcaaaagcaataggaaggtagagcgtcgtttctatatcgaaccagtgatattaaatcagatagattataaaaagttaaagcggtttatcggtggctgttttgatgaattttacaaagataggcagcaggatttggctcactattttagggttgtatataatatctataaatttatagatagctctaacatcaaccaaaatgataagaaaatgcttgcaaatatattaagagctcaactttcaaattatgaactattaatgttgttttataattgccttggtaagcatggattgaagtttatagatatagcaatcagatatgaaatatttgataacttacctatagataaactggttattgaagaacataagttattaattgataaaaaagcatttggtggccaatcttcggactggtaa

SEQ ID NO: 445837 - DNA, 933 bp, Serratia marcescens
atggctaatcagaaccttcccgccgatggtgtcgctactaacgacaccacccccaagaccttcaacttcgagaacctgccggttcgcaccttcaacaaggatggtgaagtctggtttgtcgctgccgacgtgtgcgcggcgctggaaatcgctaaccctcgccatgctgtcacccgcctggacgatgacgagcgcgatacctttggcatcattgacgcactgggtcgccagcaagagaccgtggtcattagcgaatccggtctctacgcactggtgatgaccagccgcaaggaagaggccaagcggttcaaacggtgggttacgcatgacgtgctgcccgccattcgcaccacgggcaagtacgaggccaagccgggccggggacgccgcgccgtgcggcagcagtctgcgcaggtgccgctgttgcccgcgcctcgcatcatccgcagccgcgatgatctgtccttcaccaagcgggacgccgagggccggatgctcaactggttcatgcccagccgtgagaacaactggcacgagcactacggcatcggggaaatctggttcagcgagattgtcgagctggcccggcacaacccgaaagaggcataccacgctatgcgctttgctggcccggagctgacgcgctactggaaccacggccacccggatggcttctttgatcgcatggctcgttgggcaatggccgccattctggcgaacccgaccgagccgcaacttcccttcgatctgccttgcctcggtatcccgccgcgtgagggcatggacttccacctggcggcagccgtgcctcgccagcccctgacgcctgccgagcaagacgctatcgacaagcaggcgtggcaggaggctgccgagtgccagcggcattgctatgagcaccgccgttacgacctgatggcgcgtcacgcatga

SEQ ID NO: 445838 - DNA, 1362 bp, Serratia marcescens
atgaatctgcccgacaacatccttcaccctctcaaggccaagatcgtggggttccacgaggaagagaacgagtacagcttccaggtggaataccccgatcccacggtctgcccgaactgcggggtgtgcggcgaggtggtcaggttcggcaagaagcaggtgaagttccgtgacctgccgctgcatgggcggtgggtcacgctctggctcatccgccgacgcttcgtgtgtcgggcgtgcaacacgacattcagccccgccttgcctgaaatggctgagaacaaccgcatgacacagcggctggccgagtacatcatcaaggccgccgtggggcgcaccaacagcgacgtgggccgcgaggtgggcgtgaatgagtcgatcatccgcgccctgttccagagccactacgaggcacagaaacaccgctacacgccatctgcgccccgtgtgctgggcattgatgagctgtacctgcaacgcacctaccgctgcgtgctgaccaatatcgaggaggaaaccatcatcgacctgttggagtcgcgcacgaagccacaggtcacggcctacctatctcgtctcaaagaccgaaaggacattgagatcgtctgcatggatatgtggaacccgtaccgcgaggtggccaaggcgctgatgccacaagccgccattgtggtggacaagttccacatccagcgcatggccaacgaggtcatggagaagatcagaagaggcatcaaggctgggctgtcgcaacatcgccgccgtgcgctcaaaggcgaccgcaagctgatgctgatgcgagagcgcgacttgacgcccatgagccaaatggtggtggagacctggacgaaccagttccccgagctgggcgcggcctaccgcctcaaggaagagttcatgaacatctggctgctgaccgacgaagtggacgccagagaggagtaccagcgctggcaatccagcctgacaccggagcagcggccccaatgggcaccgcttactaccgcaatgagcaactgggaggcggaaatcttcgcctacttcggtgacgggcaacgccagaccaatgcctttaccgagtcgatcaaccggcaaatgaaagacctgaacagggtcacgcggagcatgtccttcgagatgttccgagccaagatgctgttctcagtcgatcacaagatgaagcgcaaggaaaagccgcgccgggaatcgccctttgaaatcggctacggcgtccctacggaagccgaccttgcaaggctggcacccaccatgctcgacatgggggtgcccatcggcaagctgctggaacgcttcttggagccgcccatcaacatcaccccaccaccttcggaagccgggtag

SEQ ID NO: 445839 - DNA, 141 bp, Serratia marcescens; identical to SEQ ID NO: 102393

SEQ ID NO: 445840 - DNA, 1947 bp, Serratia marcescens
atggtagcggtatcgacaatgattgcagactctgttcttggtggtgtcttcaaaaaacttggctctaaatctgctgagtttggaatagatgctgttcgattaaaagcaaaccagttatttcgttctttgaaaaacaaaaggatgctagataattatttgaataaagcagttcataaaaattttgtttttagaacaataacaaagggtgatcgggatgtttacttagatgagatatatcaccctgtgaaattaagaagaaaaaacagcaggagtgttgattcgatatgtctcgttgacgatggttttcatattgactcgaaagattgtgtcactattgtaggattggcaggtcaaggcaaaactacaatgatgaggaagctatttttggaggagttgattagagaagaaagagtgccatttttcattactctgaggcaatttgaatactcgtcaaaaataaggtgtgaagatatattgctagagcacttgactcttaatggaatggattgctccttggttgatgttgttgagttgttaaaaacagggcgcgttgttttttattttgatgggtttgacgagataaggttttccgaaagaaatcatgcgttaaaaatgatatcgtcaatacatgataggtatggatgctcagcaatagttactaccaggcctgaaacggaaataactaggcagccgggggtgttattatatgaggttgaacggttagatgaatcagatgttaatactataattagaacagttgtagataatgatgatgctagtagtaaaatcatagcctcacttgatgacaatgtttttctgcgagatacaattagcactccgattctaatcgatatattgatcgtgacgtcctctctattatgcgacaagccaaaatcgataggtgattactacgaccatctttttacggcgctgatacacagacatgacttaagtaaaaactatacacgtgaaaagaaatcaaatttagggaataaggaattagaagatatatttaccttcttcagtttctttagcttgattgaatgcaagagtgattttaccttggaaacaatgtataagtatttttctaaggcgtgtgaaataaggaagatagatgactcttgtgaaaatgtttgtagtgatatagtcaatggaactaacttgattatcaatgatggatataacaattacatttatattcatcgttctattcaagaatatttctcagcaagatgtgtttctttattcaacgatgagcaaaaagaacggtttttcagaaaacatgtaatatctgatggtttagagaagaataatgttctttcactgtatagaacaatcgatcctattggattttataagcattatttaattccatttctggagagtgcaggagtcaattacaaagatgaaaatacatatttgaacaagcaagatatatctgacttgatggatacatggcaggtgggtattagtgagcctaggacagaaagcttgaaaagtaaactagcagataaggatttgattggatcttctagaggaatgacaatcaaaccttttgaagatgtctcgaagcagaagtttaatgtaataatgtgtctccgtcattcgcttgggttatgcggtcaggattataaaacgttcgaatttagtctctacatgatgagagactgtaatgatattataattaattattttgatgatctagagaatgaagagtggatttctcgtgacagtacggatgttaatttttgggagaaatattcgtgggtgaattttagagatatcaaaaatgttatccctgagtacgatgtaaaagtattgcattatatctatgagagttatttatcaggtataagtcggttaaaaaaaattatagagcaagagtatgtcaaaagagttgaaagccaattggctataacctccacattgaaggacatggggttctga

SEQ ID NO: 445841 - DNA, 342 bp, Serratia marcescens
atgaaatcattgtatcgcctctccctcttgctgcctttgcttgccacagtgcctgcacacgccgcagagtccgccgctcagccgtcagactggtatccttccgtttacggtgcaaaagacgaaatcggcgcggccaacctgctcacgccagaaggggtattacagtccgtgcagttggtaaaacaaggcaagacattgtcattggcggtgcccgtcgataaagatttcccggcgttccgccaccgcagcttccgcttatataatattcagcctggtcagcaggacggtaaaacgcttggcccaaataaattcacctttaatgatgaattggtgaatgcctag

SEQ ID NO: 445842 - DNA, 741 bp, Serratia marcescens
atggcgatttccggcaatacggcaacgcggggcgcgccgctgatcgaactgcaacagctgtcgatgaccttcggcgggcagcgcgcgctgaacgatatttcattggcgctgatgccgggggaggtgcactgcctggccggcaccaatggctgcggcaagagtacgttgatcaaggcgatcgccggcgtgtatcaaccggatgacggcagccgcattaccttcgatgggcaaaccttcggccggctatcgccggatcaggcgcgcgccttcggcattcaggtgatctatcaggatctgtcgctgtttcccaacctgacggtggcggaaaacatcgcctttgagcacaacctgcacgggctattgggatggcaccgcccggcgaggctgcggcgcaccgccgagcgcctgctgcaggagctgaatttcaatctcgatctcgacaaaccggtagcggaactgccgatcgcccagcgccagcaggtggcgatttgccgcgcgctggtggcgcaggcacggctggtgatcatggatgaaccgaccgcctcgctgacccgcaccgaggtcaatcagctgctgcgcacggtggattatttgaaagcgcagggcatctgcgtggtgttcgtcagccatcggctggacgaggtgctggagatctccgatcgcgtcacggtgatccgcgacggcaacaagatcggcacctggccggcggcggagatcaccggcgatcgcctgaccgaatag

SEQ ID NO: 445843 - DNA, 123 bp, Serratia marcescens
atgatctatgactggatgctcaaaaacgccaataaacgcatgggtttttttatcatggtgatacccagcctgtttttttggatattggtttttctgaccttatctatttttttgattctttga

SEQ ID NO: 445844 - DNA, 141 bp, Serratia marcescens; identical to SEQ ID NO: 102393

SEQ ID NO: 445845 - DNA, 141 bp, Serratia marcescens; identical to SEQ ID NO: 102393

SEQ ID NO: 445846 - DNA, 141 bp, Serratia marcescens; identical to SEQ ID NO: 102393

SEQ ID NO: 445847 - DNA, 969 bp, Serratia marcescens
atgagtagtgaatttacggggaaatgggatgaaatagctgggcgtggacacagtgcaggacgctttcgtgtttgccctgatcaccaacttgatctttttataggcttttcattagtcggagaacgagagtttacgttggagtcttctacagtggactttgatgtggacgaactccccatattcgagaatatggctgtccaaattgaatatgaaaacggtatttattgccttactttaagattgatagagcgtgctttaactgatctattctcaattatttgcagcgatcttgtagaagcttcatcagtggcggaaaatgcgggcagtgctattcagatttttgtgaacagacttaatcgctgggcggaattgctgcgtcgtcgacgtactcgtgaactttctttcaaggagagactgggtcttctgggggaactgagtatgttggtttgggttattaaagtctgtggtattgatgccccattggccgtccgtgggtggagagggccagatgacgataccaatgatatcggtttgaacaatgtacgtatagaagttaaagcgcagctttcgacccaacggcaatcgctgaaaatatcttcgcttgatcaattggactgggataaccgcaatctgttcatcgcagtaaaccgtttcagcccttccgatgatggtgtgagtctatcgtctttgtccttggctgtgtcctcaatgttagcaatcaacagtcatgggtttatggagtttcagcgcaaattgatcgttgcaggttacgatccagatgctgattacattcacgatgcattcaagcttgaagaattaagtgtttatagggtttcagaggggttcccgcgcttgattccaagcaatgtcccgcttggaattatcaaggctaggtatgaaatttcctgtgaaacgataaaagattttctgatagcgtcatcggaattagaggccctgataaatggttga

SEQ ID NO: 445848 - DNA, 2754 bp, Serratia marcescens
gtggattttgaagctgctcttagttttcttcgtacggagatcgataaatctataaaaggacggtttcctgttcctaaaggattccttgaaaatcatgttaaagaaaaatcaggtatttcaaagattctcgaaaaaggattggctgaccgacttattcggcatcttgagacggtgtatggaacgagccaagataaaggtcatgtactaaaaaccgacttcgaagagtggtacagaaaacgtcaaggagagataaactcctatttctggcgtcgattgcaaaaatactggttggatcactctatactcccagttcaggtcgttaaaaccgttgataaggtaacagacgaaattgttggctacctaggtgatcctcaggagaataagtcatggtgccgtcgtggccttgttatggggcatgtgcagtcaggtaagacgacaaattattcagcactcattgccaaggctgcagacgccggttaccgagtcattattgtgttggcagggcttactaattcacttagatatcaaactcaggtaaggctagatcagagctttgtgggtaaatcttcacttggtgatacagtagcatcggttatttaccctgtatctcatgtttttaaggggatcgaagacgaaaactctgacattcgacatccatattgtggaacaacgcaagtttcagattttaatgttgggaaggcgacaggaataggcgctacagaagaaaactttgctgatcctatattgtttgtgacgaaaaaacacaataaagtacttgagcagcttgctatttggcttagagggttacgtcaaggtggacaacttgaagggccgatgttgttaattgatgatgaagctgataatgcatcgataaataccgaaaaaaaccctaatgctacatcaacaatcaatgctcgtatccgtgagttattagattgttcccgacgttcatcatatgttggatacactgcaacgccatttgctaatatttttattgaccctgacacaaatgacgaaatgctcaagaatgatctttttcctgagcattttatcaagtcactggaaccaccagaaaactatattggtgctgataaattgttttctgaaaatggtaagttctataagacttgtgtaagacctatccctgatgactacaaggatcttctgccacttaagcataagtcaggagacatagttacagcattgcctcaaagtctcaaagatgcggttttcgaatatgcacttttcagatgccttcgaacgctagccggtgaaggagggcgacattcgtcaatgcttgtgaatgtcagcaggtttaatgcaattcaacaacaggtacacaatgaaatttatcgccttgttcaagaaatgaaagctgctatcgatgtatgggctgtgaacccaacttgggaacgttccgagattctaagtcgtatgtacaaggtttggtgtaatgaatacgagatgtattcagaatttaattgggatgaagttagagaggttctaaaacaggcagtttcatctattgaggttcgtctagttaatatgcgtggtggcggattggactatgataaggcacctgaatttggccttcatgtaatcactgtcggtgggttggcactttcacgtggtctcaccttggaagggcttgctgtctcatatgtacttcgtaatgtcggggccgctgatactttactccaaatgggacgatggtttggttatcgccctggatacgaaaaactctgtcgtatccatgcaacgacggatatgcttggagattttcgtgaggtcagtggctcagttgaagagctgcgagatgaccttgtgcgaatggaaaaaatggggcttacaccagatcagtttggcctcaaagttcgtcagagttcaacaggtattgctatcactgcggcgaacaaaatgagggctgcaaaaccacttctgattgccttggatctgtccgtccgccatcttcaagcatacgaattgtttaatagctccgaaattaaccgcaaacatctcgatgctgtcacttctttagtcaaaatccttaactcagaaattcctaataagagagtgagtgatgaatctgcgtttgtctggtctcgtatcaacgttaccgtcgtgaaagaatttcttcaaaaatttaaattaccgcaactggagtttgctttaggtaacgaagaaagaagcttggctttggactatatctcagatcgtgctgcaggtgagctagctagttgggatatagcgattccttttagaaaaaaaagctcgttaaaattccccttggatctcggtattgagggggctgagagtgttttttgtcgtgagcgccacagcgggattccaaagtcagatgaccctgatgttgtaaaagttacagagaaaaatatagtagcagataaagcccccactgatctcaagtatggtgaaagaggggaaagtctggaggggaaaataaaaaaaattaaagagggggattcaaaaattcgagctgagaaagcctgtttactttctagagagcgccctttgcttgtaattcatttgtttgatttcgaatttgatcttgagagagttaaggataagtcactaaaattcgagaagaacttgccagtagtgacattgagtttggcttttcctgaaactaacgttcaaccgatacaacgtgaatatgctatttctgtcagaatgcgccagctcttgaagcagcagcttgaggaagcccaaaccgatgaggatatattcgatgagtag

SEQ ID NO: 445849 - DNA, 141 bp, Serratia marcescens; identical to SEQ ID NO: 102393

SEQ ID NO: 445850 - DNA, 141 bp, Serratia marcescens; identical to SEQ ID NO: 102393

SEQ ID NO: 445851 - DNA, 555 bp, Serratia marcescens
atggacactgatttaatttcttatgaatcgatgctggcggctcgggattcagcaaagtgggcctattggggcatgattgcagcaatggtcagtgcattggcaatgcttgccacattgttctttgcccataaagcattgagcacctggcgagagcaggagaaagcgaaagtaaaattagattttcgaatggcaatcaagcaattaaaagcaagcctactatttatgcctatcactattgaccctgtggagatagaagaagaaagggagcaggttattgctaaatggatatttaaagatgatgctctcttaactcagcagattgagcttggggagcagaatgttaagcggtttgatgaactcataaattctttcgataactgccattcagcgtggttagctacagaacatttatttgataatacggacctggctaaaaactggatgatatgtgaagatgattttaaaaaatatataagcggagaaagtgacaaaactcccttgctacagacaattaataaaatcacagagacaagatttgtgttcgaatccaagtag

SEQ ID NO: 445852 - DNA, 1212 bp, Serratia marcescens
atgagcgtactgaacattcttgaagaaaagttggcggaaaccaaaaaacaggggcgttttcgcgagttcctcaaccttgaacgcggcgtgcaggacaaaccctgggccaccagccacgggcagcaaggcgagcgccgtctcaacgtctggtgctcaaacgactatctggccatgagccaccaccccaaagtgctgctggccaccaccgacgcggttaaccgagtcgggttaggcacctgcggcgcccgcagcatttccggcacctcggtctatcacactgaactggaaacgctgctggccagcgcctacggcaaagagtcggcgctgctgttcaccaccggcttcggcgccaacgacgccaccttgtccaccctgtgcgacgccattcccgatctgatcgtgttctctgacgaactgaatcacgcctcgatgatttacgggattcgctacagcaaggcggagaaaaaaatcttccgccataacgacgtggcgcacctcgccgagctgctgcaggccgccgatccggcgcggccaaagctgatcgcctttgagtcgctgtattccatggacggtgactttgctcctctggcgcagcttgtggcgctggcggaacagtatcaggcgctgacctatctcgacgaaattcattcggccggcgtgtatggcgaacgggggctgggctatgccgaacagctgggcctgttggataaaatcaccattatccagggcgggttcggcaagtcttacggtgcggcgggtggctatatcgccgcgccccgttcggtggtggaagccgtgcgcagctgggcgccggcattcgtcttcagcacctcctcgccggcgccggtggtggctgccgcgttggccagctttaaatacaacctcgagcacgacacccaacgcaagcacctgctggcgatcgtcgatcacctgaagaccggtctgcgcgccgccggcatcccgctggtgtcggcagacagccatatcctgccgctgcgggtcggcgatccccatcgcaacaaacacatcagtaaagtgctgctcgatgagcacgatatttacgtgcaaccggtcaatgccccgacggtgcctgcgggcagcgagcggctgcgggtgacgccgacctcggcgcattcccatgccgacgtggagaccttcctggcggcgttgagccgggtctgggcggtaaacgatctgcggagggcgggatga

SEQ ID NO: 445853 - DNA, 141 bp, Serratia marcescens; identical to SEQ ID NO: 102393

SEQ ID NO: 445854 - DNA, 285 bp, Serratia marcescens
atggcaaaggttatttttgaatttaccgagagcgatgcggcacctaccgacaaaccagggcacatggttatccctgtcaatattagcgtaggtaccgaagggtttaatggtggacagcctgggcattctgaatgcctagcgttaatcatgaagcaaaaggcttctgcaattatcaatgcaataaatggagtttacatccgtaaattaaaagagtctggcgtccaagaggttaagtcagaattgttcaaggtcaatgaatcgcaaggagataaaaatgtccactaa

SEQ ID NO: 445855 - DNA, 210 bp, Serratia marcescens
atgaaaaataacccaaatgtggatcgccttaaactggcccggcagcagattaatcggctgaaaacgatgtcgcgcaatctgacggatatgagcattgcctgggatgggctggacggtggtatggaggctgattttgaagccttggcctctacagttgaagatcaaatcaagacccataacgaaatgattaacgagtggaggcgaggatga

SEQ ID NO: 445856 - DNA, 294 bp, Serratia marcescens
atgaaagagatttcagagcgtgattatatttcagcaactttaatcgccagcggttttaccaccgaggaagttgcagaattgacgcaatttctggatgcccccgctggtagcctcccaactcaagaagagcttatcagttcccggcggttggaaatggcagagacgttgagccgtgactggatcgtatcgaacctacgccgtctggctacaagcaacgattaccaagcggcggtatctgccatggcattgttggtgaagatatcccagggcgaacgggtcttattcaagccctaa

SEQ ID NO: 445857 - DNA, 411 bp, Serratia marcescens
atgcagatagattttgatgaaatcaaaaggatattggctgtattcattgaagccccgacaccttttatcaccctcaaagaccttgatttcttctcggtggaaggtgaggccgccgacaagctcgtttttcatctgctgttactggtggaaaatggtttaatcagtaaccgcaagctcgaaacaggtaaccccgaatttattggattggtgtttaccaaccggagtatcggcggcagagccattcccatccgacttacccaggatggacacgactttgccagcgcactgaatcaacagccgatcctcgaaagagttaaaaaagaacttgctgaagccccatttgaagtcgttaaggacgtcagcaagcgatggttaggtaagctgatgaaagataagttagggcttgaataa

SEQ ID NO: 445858 - DNA, 1383 bp, Serratia marcescens
atggaagagcgcgatggccatctgtttgccgagctgagcaagcgccgccgggcggtgatgccgctcaactggagcatagcgccaccgcgtaacgccagcgcacgcgagaagtcgatggcggcggaggcctccgaatggttccaggacttgccggacttcgaagcgctactgttcgacatgctagatgccatcggtcacggattctcgccggtcgagctggagtgggagcgtgccgaggggatctggttgcccaaagaattccataagcgcccccagcgctggttccagacgccgcaattccagggtaacaccattaccctgattgacggctcccaggacggtgccgcgctgcagccgttcggctggatcttgcacaagcaccgcgccaagagcggctggttggccgaaagcggcctgttccgtatcctggcctggtcatatctgttcaagaacctgtccgcccgcgacctggccgagttcctggagatctacggtttgcccatgcgggtgggtaagtacccgaccggcaccaccgaagaccagaaagacatcctgatggacgccatcatgagcctcggccatgacgcgggcggcattatccccgacggtatgctgattgaattccagtctgccgcccagggccaggttgatccgtatcagttcatgatcgagtggtgcgagcgcacccagtcaaaaatcatcctgggggcgacgctgaccgcccaggccgacggcaagaccagcaccaatgccctgggcaacgtgcacaacgaagtccgtcacgacctgatggtcagcgatgcggtacagctggcgggcacgctgacccgcgagctgttgtacccgctgctggtgctcaacggctacggcgatatcacgccgcgccggatgtgccgctttaaatttgatacccgtgaaccggaagatctgacccaggcggcgaccgctatcgaccggcttgtccgcgccggggtgccggtgacggtggattgggcgctggagaaaaccggtatgccgacgccgaaaaaaggccaggcgctgctgcagcccctgaccgccagcccgttcggcacggtgggactggggcaagcaaccgcctttacccggctggcagcgctgacggcgaccgacaccccggtggaaaacgaccctatccaggtcgctatcgacgatgcgccgccttcggtagcaagccaggttggccaggcgatgagcgccatgctgtcaccggtaatgacggcactggaacaggggcattcgccggatgaggcgatggccatgttggcgacggcgtacccgcaactggacgacagcgagctgcgccaggtgattgcccaggccatttttgtggcggacgtgtggggacgactcaatggccgttga

SEQ ID NO: 445859 - DNA, 141 bp, Serratia marcescens; identical to SEQ ID NO: 102393

SEQ ID NO: 445860 - DNA, 684 bp, Serratia marcescens
atgcgttttaatcgctacggcgccttagcggctttcattattttattgtttgcgtctacggttcacgccggcgtggtgattggcgggacgcgggtgatattcaacggcgaaaaaaaagaagcgtcaatcagcgtggagaatccggataaagaaccgtatttgattcagtcctggctggagaatcaacaaagcggggtggataaaatcgcgtttatcgttacgccgcctttatttcggctggacggcaaccaggaaaatatgctgcgcatcgtgaaagtgggcgatggcttaccgaaagataaagaaagcttgtattggatgaatattaaatccattccttcaacaacccaggcgggtaaatcgaatacgctgcaaatagcggtcaagacccgcattaaattgatttatcggccggcgccgctgctccgccaggtgcccgaagaagtgacgcagcagctgaaatggcagcgtgtcggttcagaattaaaactcaccaacccaacgccttattatatgaactttcattatgtccgcatcggggggcgggaaatgaaagaggtggcgtatatcgcgccgatgagcagcgaaatgtttgcattgcccgtggcgggcgcaacgtcggtaagctggaaattaattaatgattatggcggcacagggaaagaacatcagtcaggtatttaa

SEQ ID NO: 445861 - DNA, 141 bp, Serratia marcescens; identical to SEQ ID NO: 102393

SEQ ID NO: 445862 - DNA, 279 bp, Serratia marcescens; identical to SEQ ID NO: 125568

SEQ ID NO: 445863 - DNA, 480 bp, Serratia marcescens
atgcgtctgtttgcccggttatccctggatagcgccttgccggaccgcaccaccatcatgaatttccgccacctgctggagcagcatcaactggcccgccaattgttcaagaccatcaatcgctggctggccgaagcaggcgtcatgatgactcaaggcaccttggtcgatgccaccatcattgaggcacccagctcgaccaagaacaaagagcagcaacgcgatccggagatgcatcagaccaagaaaggcaatcagtggcactttggcatgaaggcccacattggtgtcgatgccaagagtggcctgacccacagcctggtcaccaccgcggccaacgagcatgacctcaatcagctgggtaatctgcttcatggagaggagcaatttgtctcagccgatgccggctaccaaggagcgccacagcgggcactgttgcaaatagtcggtggtgataaacttatcatccccttttgctga

SEQ ID NO: 445864 - DNA, 906 bp, Serratia marcescens
atgcggctcggagtgtttgtccctactctcaaatcactgaaaaacagtaaaaagaacacgctttcgcgtactgatgcgacggaagaactgacgcgtctatctctcgccagagccgaagggtttgataaggtggagatcaccggtccccgcctggatatggataatgacttcaagacctgggtaggggtgatccattcctttgcacgccataaggttatcggcgataaggttgaactgccgtttgttgagttcgccaaactctgtgggatcccctccagtcagtcatcacgcaagctccgggagcgtatcagcccctcgctaaaacgtatcgcgggtaccgtgatctcgttttcccgcacgaccgaaagtcacaccaaagagtacatcacacacctggtgcagtcggcctactatgatacggagaaggatatcgtccagttgcaggccgatccgcgcctctttgaactctaccagtttgaccggaaagtgttactgcagctcaaggccatcaatgccctgaaacgccgggagtccgcccaggccctttatacctttatagagagtctgccccgggatccggcaccgatatctctggcgcgtctgcgggcccgcctgaacctgaaatcccctgtgttctcgcagaaccagacggtgaggcgtgccatggagcagctccgggagattggctatctggattacacggagatccagcggggacgcactaaactcttctgcattcattaccggcggcccaagttaaaaccaccgcatgatgagagtgctgagaaccctcaactgccagccgcaccgggtgatgtgagtccggagatggctgagaaattggcgcttttagagaaacttggcatcacgctcgatgacctggaaaaactcttcaaatcccgctga

SEQ ID NO: 445865 - DNA, 270 bp, Serratia marcescens; identical to SEQ ID NO: 149535

SEQ ID NO: 445866 - DNA, 531 bp, Serratia marcescens
atggagggtttaaggattgagattttttcagaggaagttgaatatgaattaagcaacttcgattgtggagaagagtatctgaatacttttcttactgaccatctgaaacggcagcataacagtaagatcttacgtggttatgttctcgtgacgagagaggataaaccgcgtgtgatggggtactacacgctatcaggaagttgctttgagaaaatacttctacccagcaaaacacaacaaaagcgtgtaccctacaagaatgtgccgagcgtgactttgggccgtctggcaattgataaaagcattcaccaccagggatatggagaaacacttgttacccatgcgatgaaagtcgtgtatcaggcctcgcaggctgtgggtatacacggaatgttcgtggaagcgctgaacgacaacgccaaaaaattctaccttcgactgggtttcattcagttaaaggaagaaaactgtaactcgctcttttacccgacaaaatctattgaagaattgttcgaagtaaatgatgaataa

SEQ ID NO: 445867 - DNA, 981 bp, Serratia marcescens
atgagtcatcaacttaccttcgccgacagtgaattcagcagtaagcgccgtcagaccagaaaagagattttcttgtcccgcatggagcagattctgccatggcaaaacatggtggaagtcatcgagccgttttaccccaaggctggtaatggccggcgaccttatccgctggaaaccatgctacgcattcactgcatgcagcattggtacaacctgagcgatggcgcgatggaagatgccctgtacgaaatcgcctccatgcgcctgtttgcccggttatccctggatagcgccctgccggatcgcaccaccatcatgaatttccgccacctgctggagcagcatcaactggcccgccaattgttcaagaccatcaatcgctggctggccgaagcaggcgtcatgatgactcaaggcaccttggtcgatgccaccatcattgaggcacccagctcgaccaagaacaaagagcagcaacgcgatccggagatgcatcagaccaagaaaggcaatcagtggcactttggcatgaaggcccacattggtgtcgatgccaagagtggcctgacccacagcctggtcaccaccgcggccaacgagcatgacctcaatcagctgggtaatctgctgcatggagaggagcaatttgtctcagccgatgccggctaccaaggggcgccacagcgcgaggagctggccgaggtggatgtggactggctgatcgccgagcgccccggcaaggtaagaaccttgaaacagcatccacgcaagaacaaaacggccatcaacatcgaatacatgaaagccagcatccgggccagggtggagcacccatttcgcatcatcaagcgacagttcggcttcgtgaaagccagatacaaggggttgctgaaaaacgataaccaactggcgatgttattcacgctggccaacctgtttcgggcggaccaaatgatacgtcagtgggagagatctcactaa

SEQ ID NO: 445868 - DNA, 1089 bp, Serratia marcescens
atgagacgaacatttacagcagaggaaaaagcctctgtttttgaactatggaagaacggaacaggcttcagtgaaatagcgaatatcctgggttcaaaacccggaacgatcttcactatgttaagggatactggcggcataaaaccccatgagcgtaagcgggctgtagctcacctgacactgtctgagcgcgaggagatacgagctggtttgtcagccaaaatgagcattcgtgcgatagctactgcgctgaatcgcagtccttcgacgatctcacgtgaagttcagcgtaatcggggcagacgctattacaaagctgttgatgctaataaccgagccaacagaatggcaaaaaggccaaaaccgtgcttactggatcaaaatttaccattgcgaaagcttgttctggaaaagctggagatgaaatggtctccagagcaaatatcaggatggttaaggcgaacaaaaccacgtcaaaaaacgctgcgaatatcacctgagacaatttataaaacgctgtactttcgtagccgtgaagcgctacaccacctgaatatacagcatctgcgacggtcgcatagccttcgccatggcaggcgtcatacccgcaaaggcgaaagaggtacgattaacatagtgaacggaacaccaattcacgaacgttcccgaaatatcgataacagacgctctctggggcattgggagggcgatttagtctcaggtacaaaaaactctcatatagccacacttgtagaccgaaaatcacgttatacgatcatccttagactcaggggcaaagattctgtctcagtaaatcaggctcttaccgacaaattcctgagtttaccgtcagaactcagaaaatcactgacatgggacagaggaatggaactggccagacatctggaatttactgtcagcactggcgttaaagtttacttctgcgatcctcagagcccctggcagcggggaacaaatgagaacacaaatgggctaattcggcagtactttcctaaaaagacatgtcttgcccaatataggggtcagtttggagaacggaaatttttgtacgttaagcgcattatttaa

SEQ ID NO: 445869 - DNA, 378 bp, Serratia marcescens
atgaacaagaaaaccaaacgtagtttcacccctgagttcaggctggaatgtgcacagctgattgttgataagggctactcatatcgacaggccagtgaagcgatgaatgtgggttctactacgcttgagagctgggtacgccagctcaggagagagcgccaggggattacgtcctctgccacacccattactccagaccagcaacgtatccgcgagctggaaaagcaggttcgccgtctggaggagcaaaatacgatattaaaaaaggctactgtagattcaattggtcaacgcaacagttatgtgaaaacatggggttgcggaggttttttgaatgagacgaacatttacagcagaggaaaaagcctctgtttttga

SEQ ID NO: 445870 - DNA, 318 bp, Serratia marcescens; identical to SEQ ID NO: 237706

SEQ ID NO: 445871 - DNA, 1683 bp, Serratia marcescens
atgaaaatcaaagactttagtgtgggtatcaggctggctggcagcttcagcctaattctggttcttgtcatgatcatgacagtgaccggagtggggtacctgtactctatgctcacttccaccgatcgcgtgacggattattatcttctgcaggagcgtatggcgaatgaatggcagaccggtattgaatcaaacggtgcgcttggactggttctgctgacgtcgggggacccggatatcaggacatatgcacagcagcggatagagaaaaccgctgctcgcgtggatatactgcaggataaatttaacagggagcttacttcagagcagggtattaagctgctgaaaaccattggtgaaaagcgtcaggtgtatgcagataccctggtaaaagctcttcagatcagtgagcagggggaccgtggagccctgaacaacttcattcggtcacagcagttaccgatcataaatgactacatggccagtctgcaggcactggtggaatacgaaaaaacaagcatagataaagcgggtgaagttatcgatgataatggtacggcagccatactgacactgatcatcactgggtgtatggcgcttcttctgggaggtgtgctggcatggctgatcaccagaagcattacctgtccgttgatttcagccgtccggattgcccgggaagtggcggaaggtaacctgtgtgtggagattaaagtggactcacaggaccagctggggcaactgatgcaggcactgcgtgatatgtgcgggagtctgagtaacaccgtccgggaagtacgtcagggagcggacaatattgcgctgactgcagcagaaatcagcagtggtaatacagacctgtcagcccgcaccgaagagcaggctgccggtgtggaacagacggcggccactctggaacaactgacggccaccataaacaatactgccggccatacagcacaggtttaccagtttgtgacagaaacaacggccattgtgaaacagaatggagtggtcatgagtgaggtgtcttcccggatacaggagatttacgacacctcgtctgaaatgacagccatcatccaggtcatcgacgggattgccttccagaccaacattctcgcgcttaatgctgccgtggaagccgcacgcgccggcgagtccggccgtggatttgcggttgtggccggagaggttcgtaatctggctcagcgcagtgcttctgccgcgcgggaaataaaagagcttattgatgactccgtttcccgcattgcatccggccgtaccctggttgaaaaagcagacaggggaatggaggatatcatcagtaacgtccagagcatggaagggctgattgacgaaatagccagggccagtcgtgagcagggagatggtattgcccagattaacagcgccatgggccagatagacagcaccacccaacaaaatgcagctctggtggaacagtctgcagccactgccgcttcgttgcagaatcagtcacggattctgcaggagaaggtgagcgtatttcgtctccgtgataataaaaaacgcgatgctgaacgaaaaaataccatagtaccgacaatcagcaacaccagcccgcagagtaaggttaaagcggtaaagtccgttcgtgaaacggaacaacacgccagcgagaactgggaaaccttctga

SEQ ID NO: 445872 - DNA, 273 bp, Serratia marcescens
atgaacaagaaaacgaagcgtacttttacccctgagttcaggctggaatgtgcacagttgatcgttgataagggctactcgtatcgacaagccagtgaagcgatgaatgtcggctctaccacgcttgagtcctgggtgcgccagctcaggcgagagcgtcaggggattgcgccctctgcgacacccattactccagaccagcaacgtattcgtgagctggaaaagcaggttcgccgtctggaggaacaaaataaggcactgttgcaaagttag

SEQ ID NO: 445873 - DNA, 141 bp, Serratia marcescens; identical to SEQ ID NO: 102393

SEQ ID NO: 445874 - DNA, 141 bp, Serratia marcescens; identical to SEQ ID NO: 102393

SEQ ID NO: 445875 - DNA, 165 bp, Serratia marcescens
atgaataacgataccctgaacgccctcattctgcgccacggtgacaatctgctgcgccggtccggctggcccgactcagttggtatgacgcccgtcgcgcccgaaaccgtacccggctggctgttcgccagtggcgtgctcgatgcagacgagatcggggtctga

SEQ ID NO: 445876 - DNA, 405 bp, Serratia marcescens
atgatgtacggcacccgtaaggaactgaataaaaagctgaaacgtatgtttggcaacaatgatcactttgccctgctggtctggacgaagcaggacgtaatggcccaggtggaaaacatgacggaaagcgaggccgctgcgattttgcaggaaatcggcagcgtgaccggccataccgaagagggtatttcatttcgcacggtccaggagatgtatgccggattacgggccgacatcccgaccgtcatcgttcccgctgatctgctggcccgcctgactgacgtcgcggggctggcgctggacgcagaggacgcccgggcctggccgcttgttagccagcattacccgtccgtggctgatgccccggccgatattacgtggctcaggcagctcctggccgcctga

SEQ ID NO: 445877 - DNA, 420 bp, Serratia marcescens
atgtacggaacctgtgaaaccctctgccggttgctgagtgagcagtatcccgcagaaaccccgctgaacctggttgtctggtccccggcggatatcgaagcgctggccgacggcatggaatgtgccgtgtctgaacaggacataaaggacgttctggcgcgtctggacgccataccggaagaacagcggcttgagtcgggcgtgtctgccagtgcggtcatggatttgattgatcaggtgaaacaggccgttccggcggtgatggtgccggctgacctgcttgaaaccctgctgacgaccgccgaacaggcgttatggcacagggaatggaccgcccgcgacggcaaccacccggtcccggacagcgtgacccgccgcctggctgatacggcgaaagtgcgcgccttactgaaaaactga

SEQ ID NO: 445878 - DNA, 222 bp, Serratia marcescens
atgaactatgccggacacgaaaaactccgcgcagacgtggcggaactggccaacaacatgagtgacctgcgggacgcgctgaacgacatgcagcaccgctatcgctttgattccgaagtgctgaccgaacgcctggctcgtcagacgctcttccgcatcaatgccctgtttatggcggcgtacaacgaaatgcttgagctggatacctgctttaaggactaa

SEQ ID NO: 445879 - DNA, 681 bp, Serratia marcescens
atgtcccgttttatcctgggtaactgcgtcgatattatgtccggctttccggagcgtgccgttgatttcattctcaccgatcccccgtatctggtcgggttccgtgaccgttccggccgcagtattgccggtgacaaaaccgatgaatggctccaaccagcctgcaatgagatgtatcgcgtcctcaaaaaagacgcgctgatggtgagcttctacggctggaaccgcgtcgatcgcttcatggccgcatggaaaagcgccgggttcagcgtggtcgggcatctggttttcaccaaaacctactcgtcgaaatcggcctatgtcggctaccgccatgaatgcgcctatatcctggcgaaaggccgtccggcgctgccgccggacccgttaccggatgttctgggctggaaatacagcggcaaccgtcaccatccgaccgaaaaacccgtgaccagtctgcaaccgttgatcgagagcttcacacacccgaacgccattgttctcgatccgtttgccggttccggctccacctgtgtggccgccgtccaggcagggcgccgttatatcgggattgagctgatggagcagtaccacaaagccggaattgagcgcctgtcatccgtgcagcgcgccatgcagcgcccggcagccaacgacgtcttttatccggaggccgcgtaa

SEQ ID NO: 445880 - DNA, 348 bp, Serratia marcescens
atggaattaaatctgaatacctggcttgttggcctgagcgtcgacatcggtggcactgaaatgatggtgtattacctggtttccgcgagtgacctggcgcaggctgaagcgggcattctggaaatggggcgcacctggtggccatcgctgagacgcgaggatgaccggcatcgctgggagttccccgaaggcgtggtctggtttaacagcattattctgctcgatgacgtggaaaacagtatcctgcgcgggctgaagttcctcgatgcgtggacagtgaccggctcaacggatatgccgcgactgcacgatgagtgggggaacgactggcgggatattacccgctga

SEQ ID NO: 445881 - DNA, 936 bp, Serratia marcescens
atgccgaactggtgtgccaaccgactgatgttcagtggtattcaaaacagtgatgccctcaaaacgtggattgccggaggcgggctgtccctgcatcgccgcgccagaaaagacggtattcagcttttcctggcaggctgtgcggggatactgcgccccctgacagaactgtgttacacgccatacccgcaactggttgctcacgggatggccgcagacaaccgggcttcagcccaggcatacagcgactggctggcgatgtttatggccggagctgtgctggatgtggaaacctgccagacgctgcatcagtgctggctggacagccatatcgggcatgcccgctgggctaccctcagtgaaccggaacaggtagtcatccggcagctgtaccagcaaaaatcttttgactggggaaacagtttccggcctgcgccggtggaggaatggtggaacagcctgtgcgatgctggtgatgatttgtttgccgcagagccagtggatttgcgtgatgtcctgccgacgcgtctggatattgaagtgaacggcttcaacggtggcctgctgacgggtgtcccgtcgtcatatgaccactatctgacccggtacggttgcaagtggccggtcggttatgagtcaaatatctgtttcgccggagagaacacgctgacggtggattttgacaccccctggagtccggttggcgaggtcgttgtggctgaactcagtcagcgatatggcggtgaagtggagcattggtttgcggagcagggctgcaattactgcggttatgcccggtacgtcagcggcgaaacggacgtgtacatcactgacgagctggaatggggcgaggctgacccggacgatgaggacagcttccctgatgtgatcggcccggagtggattatcaacaacgtggcgcattttggcggctga

SEQ ID NO: 445882 - DNA, 423 bp, Serratia marcescens
atgttactttttgtcgcccccgaacaggagccggtgcagtccactgccccgctgttcaccgaacgttgcccggcgggttttccgtcgccggccgccgattacaccgaagaagagctggacctgaacacttactgtatccggcgtccggctgcaacgttcttcgtcagggctatcggggattcgatgcgggatatgggtctgcattccggcgatttaatggtggtcgacaaagcagagaaacccatgcagggggatatcgttatcgcggaaacaaacggcgaattcacggttaaacgcctgcagctgaagccccgcattgccctgctgccgatgaacccggcctaccccacgctctatccggaagaactgcagatttttggggtggtgacggcttttatacacaaaacccggagcacagactga

SEQ ID NO: 445883 - DNA, 1383 bp, Serratia marcescens
atgcttgacgagaattacaagagagtttgcagtcactgtttgaagaatgacccggttctctttcacatgatcattaatgacccggattcttacagaccatgcgactactgtggtaatgaagaccgaaccatgtctatgcatgcattgggaaataaaactgactggctgatagaaaaatattattctcctggcgaagtagaccatgagtatggtgttcaggaaggttctcctcttatcgagattcttgaacaagaggtttcatccaacatcgatgtgattaaagacctttcaaaaatactgttggattgctggttcgaacggggaactgaagaacataaatatggtgaagatccactcttcatctcagcaatatcaatttcttctaagctttccaacaaatgggctttaatggaaaagaagcttcgtgaaagtaatcgttttttcaatcatgatgcccttgaaacgtttgatgaagtgttcggttatctctttgataatcacccttcagcctttaccgatttcactccagatacgcctctttatcgtggacggatttttaagtccgaggatgacattaagtctgcgttgcacatgccagaatcaaggcttggcccccctccttccgatttagcaccttatggtcggatgaacgcgaaaggaatatctgtattttatggagcaacatccaaaactaatgccgtttcggaagtccgtcctccggtcggtagtttcgtagtagtttctgaatttcgggtactgcgtcctgtacgtctcctcgatttgacggtactcggcagagtggctgtaaacggtgtaagccgttttgatcctgaatatctggtcagatatgagcgtagccgtttcatagcaacactatcacgcaaactagttatgccggttgtgcctgagctcgctgaatcgaactatctgcttacgcaagctattgctgattatctgtctatcacggacaaatattcactggatggaatcaagttttcgtctgctcaaatgccttctggccaaggggaggaaaacgcgtgtaatgtgatcttgtttcataagtcatcggcagttaaaaacgccaaactcagacgactggaagcgcaagtttcaatgtatagagaagacgatgactacgctgagtttgaccctcagatgacaacgaccaatcgtgatttcagacgagagtttaccgttctctcccgaaacaaacctcagcaagacgtacttgaactgaagttgggcagtattgagatccatgaaatcaggggcgttaagtatacatcgttagtaaccccggtaggccataaagagataagtttgtctgccgctgaagcagagatttcgcatgcgaaatctggctattcagatgacgatttctga

SEQ ID NO: 445884 - DNA, 1032 bp, Serratia marcescens
atggccaagaaaccgtttatgagacgactccaggcgcagcaggaaatgaaaaaaaatgcatctgttgtttctgatattgaacaggtcattgcaaataaacaaccagatgagcagaaccatgatatagctgcgcaccagattatggcggatattgcccgaccggatatcgaacctgatggacagataatccgtgtcgatataaatctggtttatgctgaagaacaagtgcgacctgaagaagacttcgaggaagatattatcgatggtatggctgataccttcgaaacgatagggatgcttaccccgcctcgttgttatcctcgtgacagacgtggctaccagatatggttaggcgaaacgcgtgttcgcactgcccgcaagcgtggtgatacccacattgatatttatgtcggtaaaccaccacgggaaagaaaagaacgcatcatcggtcagctcattgaaaatctgcagcagtctggtttgaaaccattagcgactgcaaaatcgttctatgagctcaagcatgagttcaatatgacgggtgagcagatcgcaaaaacaatgggtaagcctacctcatttgtcagtaaacaccttcgtctcattgatgcaccagaaaatgttaccgcccttctccgggataaaatcacatccgatgtcgatctggcatacacactgatacaggtaaatgaaaagtctcccgaagaggccgagaagcttgtcgcagctgcgcgagagtctggtatttcacgttcgcaggttaaagctgttcttgatgcagttaagaacaaaagcaaaggtgagatttcgcatgcgaaatctaagtctcagaacaaaaaatcaaccaagcttttagactgtaattcagatgtaaaaacatggcaggttgttgtcgagatagacggtcagcaaggggtaataatgactgaccgtgcgccagataaagctgggtatgtgtgggtgaaaatggaaattggtgagatttcagttgaggcttctgaactacgcgtcaaagggatgcgctctcagtga

SEQ ID NO: 445885 - DNA, 867 bp, Serratia marcescens
atgacactgaaaattggacctatcggaaaactgatcgttgtatgtagtcagaagggcggaatcgttaaatcgcagtcatccagtgaaatcgcacatgaccttcgtgaagctggtttccgtgtgcttgaaattgatatggactggacaactggtctgacggagagggcattccctgacggcttaccttatgagatagaacgcgaacctttaagtaacagttttacacccggtgaagcgaatacatatcagcttttcttttctgaaacagagattcgaccgattgagcttcctggcgggcgcttttttatcggtgctaccagtgaacttaatgaaattaactaccgaaacagcgactgcatgttcgacttcagggaccgtattgaagaactgaagaaacagtttgattttattattgctgattcagcgccatcttattcaaatgtcatgatcgcagcgcatatgtcagctgattaccttctgatccctaccctgctggagaagcaggcccgtaatgcagttggtaaacagcttacttatatgcagaaaattaagcggaactacaatccttcgctgcagttcatggggacttatgtgacgcagacgcaggtcaaaaattataaaaagccacttaaagaaggatatctggggcctattgatacactgaacctgaatctcctcatcgagatccttcagggaaaaggctactctgaagaatacattctcgcctatatatcatttgtacctgctgctgcaaaggaagcgatcgaacttggtctctcatttgatgaatatgaccccaaatgtcttcctgcaattcagtataaagaacttactaagaaaattattctgctcgcaggaggtaagtaa

SEQ ID NO: 445886 - DNA, 219 bp, Serratia marcescens
atgacatttttccttattattgcgtttgctctgatagtcgtcggtaggcttctgctgcgaaagagcctaaataaactccacaatgagtattaccgccgcgctgacgagcggggatgcgcggaacgttatgaatcgttcgttcgcctttacaattccagagatccccgcattttagaaattgcttatctggaagccatttcctgcactaaggccgcttga

SEQ ID NO: 445887 - DNA, 504 bp, Serratia marcescens
atggcgcttgagtgggtggatgtggctgacagtgccgttaaaatcggtctgggcgcgttaatcaccattgttggcggctggattacactgaaattaacacacctccatgaaattaggaaagaagcagtagctcagcgactgcgtgatatagataaaaaaactgaccgctatatagatttcctttcttcatcgcaattgctaatgcagaaatatctttatgaatcatgtgatccaggtggcgaggactacaccgattatatgcggttgcataatattgtgagtctcacttcttcgtctgaattacgagtttatgcgtttgatactcaggcaaaagtatcgcaatttattttgctcagaaagcccagtgatcttattgattcctaccgtaatgccgcgagagactccgtttctatgcttcagggggtagttagtgctgaattacttcaggataaagctgcacttcagggcaaacaacatgcatggtgggcgttctggcggaggtaa

SEQ ID NO: 445888 - DNA, 609 bp, Serratia marcescens
atgaaaaaaatagtgaaacaggatggttttaatgagtctgaaaggtatttagcagacttgtgcagcaagactttcttaagcttgtggagttatcctaacgtctatactgatgagggtaagaaaagtgatagtggtgatggtaaagagctatgtgatttattggtggtatttaatcatcatgtcattatcttttctgataaagatattagttttaaagataccgggaatattgaagttgattggggtagatgggttaaacgagcagttttaaagtcggcaagccaattgtacggcgccgaaaattggatcagggaaaggtcaaacagaatatatctcgaccctaaatgcaaggataagtttccacttagcttccctagcacagaagttattaaaatacatagggtcgccgtagctaagaatgcgaccaagcgattttcttcgatagttcaaggttcaggaagtctgataatcaacccattaataacaggagatgaacactttaaaaacccatttatgattggcatgcctataccaaataagccatatgttcatatttttgatgatgtcgcattagatgttgtattaaggaaggtgcgaacaagttcctga

SEQ ID NO: 445889 - DNA, 141 bp, Serratia marcescens; identical to SEQ ID NO: 102393

SEQ ID NO: 445890 - DNA, 1374 bp, Serratia marcescens
atgatccccttcatccacgccgaagggctgtgggacgatatcaaaatgggcggggccacctgccgggcagagagtatccaggcggtgaacctgctgccggtggtggccgacaaccgcctctgtcaggggggactgctgacgccgtcctaccgcaatcagctggcgttcctcgatatctacggcgacggactgggcaacaccaactacaacatggcggtgaccggcacgtccggggccggtaaaaccggtctggtgcagcctattctgcgcagcgtgctggactccggcggcatcgcctgggtgtttgatatgggcgacggctacaagtcgttctgtgagaacgtcggcggcacttacctggacggcaagtcactcaagtttaacccgtttgccaacatcaccagcatcaacgaatccggcgagcgtatccgtgaccagctggccgtgctggccagccccaacggcacactggatgaggttcaccacagtctgctgttgcgcggggttcaggaagcctgggaagaacacagggaaaaagcgcgtatcgaccatgttgtccataagctgacgaccatccgcgaagatgagaaataccgtaactcgcccggcatcaccaaccgtctggatgagattgtcgaactgctcgggaagtactgctcctggggaatttacggcgagtacttcaacagcgacgagccttccctgaccgatgatgcccgctttatcgtcctggagctgggtggcctgcaggataaacccgacctgctggttgcggtgatgttctccctcattatctacatcgaggacaagatgtaccgcacgccgcgcagcctgaagaaatgctgcaccattgatgagggctggaaactgctcaacttcaaaaatgacaaggtcgggcagtttattgaaaccggctaccgcaccgtgcgccgtcaccgtggggcgttcatcaccatcagccagaatatcaaggactttgacgccgatgatgcctccggcgcggccaaagcggcctggggtaactccgccttcaaggtggtgctcaagcaggatgcgtctgaattcaagcagtacaaccagaaccgccccaaccagttcagcgaactggagcgcagcgtaatcagtaagttcggggatgccaaagaccagtggttctcctcctttatgctgcgcatcaacgacacctgcagtttccatcgtctctttgtcgatccgctgagtcgggcgatgttcagttcaaagggcgatgacttcgaatttatccgccagtgccgggaacagaacatggatatccatgacgcggtgtatcagctggctgtccgtaactttcctgatgagatgcgcgaactggaagcgctcgcggaggccgcatga

SEQ ID NO: 445891 - DNA, 465 bp, Serratia marcescens
atgaccacagagcaaaaccttactcttgctcagcctgaacccacccttactgcagatgacgtcaggaaggggggaaacaccaaagcgaaaggacaccggctggagcaacgtcgccgccgctgcctgcgcaatttgttgctggttgcagccactattgtgtgtatcaacgcggcggtcacgtcgctgctgattagctggcgcaccccgacagtcgtgtcctttgatatgaaggggacggtcgaccagttcactgaccaggcgggcgcccggtccctggatgaaaaacagacgaccgacctgacggaacggtttatgcacgccctcagcaccgagcttcaggaataccagcgccgtcatgacgctcttatcctggtgacgccggcagtggtcggcggggccgctgacattaccggggagatccagagcgcggtggcgacgaagatggccgaaggagggacgccgtaa

SEQ ID NO: 445892 - DNA, 636 bp, Serratia marcescens
atgtaccgacgtctgctcattctgcttgtcctgcccggcatggtacaggcgaaaaacctggggacatggggggagatgtaccccattgccgaacaggacatgctgaccaccatccagacccggctgaaagcgatggaagccagcggcgagatggcccgggagcaggaagcgttcaaacaacgcgtcattgaaaacaccctgcgcccgaagccggttgacggtctgacgctggcgcaggagaacaccacgcactatatcgacccctccctgacggtcagtgaggacctgaaagaccatcagggccgggtgtttgcccataaagggcaggtcattaatccgctggatacggtgccgtttaccgacacgctgtactttatcgacgccgataacccgcagcagctggcgtggatgaaggtgcagaagcccgggacgctgacgtaccgcgtcattctggtcaacggcgatgtccgggaggccacgaacgccctgaatacccgtatctactttgaccaggatggctcgctcagccggaagtttgcgctgaaagccatcccggcccgggtgacgctggcagaagatcgtcgccgtctgcgggtggacacgtttgccctggacgcgccggaggtgaagccatga

SEQ ID NO: 445893 - DNA, 996 bp, Serratia marcescens
atgaaacgttatctggccggtctggggctgatatttctgtgtctggcagggatgagtggcacgacacaggcggcctctgcggaatgcgaggggaattttgtcaacccgatcaccgatgtctgctgggagtgcatcttcccggtgaccatcggcaatgtgccggtggccaaaggtcgccagccggacacgccgaatccgtcgatgccgattcagttctgcccgatgggcattctgtaccgggtgggactggccatcgggtactgggagccgatggcgctgacggacgtgacgcgctccccgtactgcatggtgaatctgggcgggttcaatatcaatatcgggaacgtcggcagcgggacaggcgggcaggaaaaccgcgcaaatcccggcgcattctaccatgtccactggtacaaatacccgctcacctactggctgaacattatcacctcgatgggctgcctgcagggtggtgacctggatatcggctatctgtccgaactggacccgatgtgggacagcagttcgctgagcatgattatccagcccgaagccattctctttggcaacatcatcgcccagggagcctgtgcggctgacgcggtggcaagcctcacgggtaaacccattgatgccctgttctggtgtgccggcagtcagggcagcatgtatccgtttaacggctatgtctctaacgaattcagcccgctgcagacctctttactgctcagtgaacgcatggcgttcaaactgcaccgtcagggcatggtgatgaacagcatcggtgaaaacacctccgtgtgttttgaatatccgtccccgatcatccctaaaagccgctggcggtatcacctggttaataaatatcccgatgcaggccagtgtcatccgctgggccgtagtgtgacccgctgggaaaccggcaagaacatgcccaacgaccggcgcaatttcgggtatctcttctggcgcaagcgtaactgtgtatttctttaa

SEQ ID NO: 445894 - DNA, 615 bp, Serratia marcescens
atgaaacgagtactgatgtcgctggccgtgcttctgacctgcggggccgggatggccagtgaccatactgagaaccgccagtttattcacgaccagttgcaactggacaggcagcgttttcgtgccctgcagacgccggagtttctgcaacagccgcgcaccgtgacaccacaggaccaggcgtttctggacgcgcaggcctcacagttccgtcaggccatgcagcccggggagcgcccggtggacgcggccctggtgtttgtgtccttctcgatgccagcggaggaactgaaacagcgcgtgaaggatgcggcacaactcaatattccggtggttatccgggggatggtcaacggtgatatgcgggccactgccaatgccgtggccggtctggtgaaagagagcaataccggcggggtgcagatagatccgaccacgtttcgcaaatacaacattaccgccgtgccggtgctgattgtggcctgtggcaatcagggcgatacggtcgaccggcttcagggggacctgacgttacatcaggccctgaagcgggtggcggaagagggtgactgtgctgacacggcccggaacctgctgggtgaggaggcgaaatga

SEQ ID NO: 445895 - DNA, 1830 bp, Serratia marcescens
atgaagcggtatcttcctttactgatggcgatggcatccttctgccttgttcagccacttgtcgcgaatgaccagtttaaccagggcatgcagcagggtaacgccagcaaagggcagggggccggtgccatacaggggtttaacccggcagaggcaatccccggctacaccgactcaccgccggaaagcggctattacgggggcgtgacgtcctccggcgtggacatgacctcacccgggtcgtcggcgctgaatacctcggaggccgggaaaaccatcaccgaatccattctgaacacgccgccggataataaaccgtcgctggatgcgccgtttatttctgaagggctggccatgaaagacaaggcggagaccattaccggcggcgggtttgccggctgcgtggaccagcctgccagctttaccgaaatcaccacccatcagtgtctgcgggatacgaagatcgagcagtactgtacgcgcacagccacgctggggtatgagggcagcacggaatatgacgtgagagtggtggaatatgagctgagtgaactgccgtcgtgggaggaaaacggcaacatcgtggtggcagtgacgccgcaaatcagcggggaaatcacggaagccacgtattcctggagtaactccctcggtaacaaaccgcgtttccatatgacgatttcctttctcggtaataacgtgcagtggcaccagaaggggtcgtacaacaacgtgagctttaagcctgttccgtcctccctgactgccggtgtgtcgttcacctcccgtcatccccgtaaagtccgggatggctccggctcgctgacgcaccgcaaacacgttccgtttaaactgcgcttcgtgctgcgggtaaaaagggacagttacaaacccgtcgtgacctggtccgaaaactgtccgttcagcaagaccgagggggccatgaccggttcacagtgcgtggaaccgggtgaaacccgcacgattgtggtcggtggccagacgctgagtgcgtatcaggcctgctggaaatggcaggacacgtacctgacccagacagagacggaaggaacctgcggggaatacatgagggactccacctgtacggtgacccgcagcgagtgtgccgacacggtggacggcttctgcgtcagtcagcaggtgacctactcctgtgagcgtaaaaaagagggtaacggccagatttgcggcggggaattcttctgtaaagacggcagttgtgcccaggcgcagacgggaaccagcaatatgtttggtcaggcggtctcggcgctggcggcagtggccgctgccggggaagatgtggctctgctgaacggggaaaacgtccgcgcctttaccggagaagcgcagcactgcaagaagatggcggtgggcttcaataactgctgcaaggactccggctggggccaggatgtgggcctgtcgagctgcagcagcgaggaaaaggcgctcgggaaggcgaaggacaaaaagctgacagtgtatgtcggggagtactgcagcaaaaaggtgctgggcgtgtgcctggagaagaagcgcggttactgcgtgtttgactccaaactggcgcgtatcgtccaggagcagggccgccgtggccagctgggcgtcgggttcggcgggggaaaatcaccggactgccggggcatcacggtggatgaactccagcgactcgattttggcgtgatgaacttcagcgatttttatgatgacctcagtgccggcagcgacatccccgaagaccaggcactactgaaaaaagcgcaggacatcatcgcggaaaaaatgaaggatgcgacgccatga

SEQ ID NO: 445896 - DNA, 777 bp, Serratia marcescens
atgaaacgactcgctgtcctgatgatggtgttatccaccaccctgcatgccgccccggatgaggttctgacgtctaactttgcccgggaagagggctggcagtggtacaacccgaatgcggctgaggaagaccctgcccccgcgccagccccgacgcagcaggcgcgtctggccagtatgactccgtcagagcaaaaaaaagtgctccagcaggcgacgcgtgaagcactcgataccgccattctgtatccgtcagcggagaactttcgccgctttatgaccctgcagaacttctggactgaccgggcgacggacttcacccagacctcgaaactggcgcgtctgaaatacccggagctcgactacaacgtgaagcgcagccactacaacggttcggtggaggcgcgtctgagcgaagagaagaaggttcagagtgcggtgataagccaggtggcgcagcgctacggcctgttcttcttctatcgcgggaataatgccgtcgacaacctgatggccggagtcatccgcgccttctgcgaagaccggggcatcacgctcatggcgatcagtgtggacggcaaaatcagcgaccagctgccacagagccgccctgacagcggacaggcggagcagatgcgcgtcactcacttcccggccacctttctggtcgacccgaaaacgcaccagtggcaaccccttgcatggggatttatgagccacgacgacctcgataaccagatggtcagcgtcctgacgcagttcagggccacttactga

SEQ ID NO: 445897 - DNA, 285 bp, Serratia marcescens
ttgttcgcaccttccttaggcaaccgcgatgcggcggcagaaaaattagtcctttctgcaaacggcaacaatttgtccgtcagtaatccgacgccattttatgtcaccgtcagccgtatctcccgcgacggcggcaaagcgctgaacagcaaaacggtgatgtttgccccgcagtccagccagaacatcgccctttcttccgcagtgagcaaaggcgagaccctgaccgttaacaacattaatgactatggcgccgatgtcgcagtgaaagtggccgttaaataa

SEQ ID NO: 445898 - DNA, 2487 bp, Serratia marcescens
atgaagcagaggtcattctgcccgggaagattaagcaccgcgatcgccatcgcgctgtgctgctttccgccattttccagcggacaggaaaacccgggaacgatctatcaatttaacgatggttttatcgtcggcagtcgcgaaaaggtcgacctgtcgcgcttctcgaccagcgctatcagcgagggcgtctactcccttgatgtctataccaacggcgaatggaaagggcgctacgacctgaaaatcaccgccggtaaagacggcaaaatgggcgtctgctataccaaagcgatgctgatgcagtatgggatttcgccggaaaaattaaatccgcagctcagcgaaaaagagggcttctgcggacgcctgcaggagtggcgtcacgaagataacgtcaaagacacgctgattcagtcctccctgagactggatattgccgtaccgcaaatctacgaagatcagcgcctgaaaaactttgtcagcccgcaattctgggataaaggcgttgcggcgctgaatttaggctggatggccaacgcctggaacagccatatctcctcggccaacggttccgataacagcagcgcgtatcttggcgttaacgcgggcctgtcgtgggacggctggctgctcaagcatatcggtaacctgaactggcagcagcagcaggggaaagcgcactggaacagcaaccagacctatctgcagcggccgattccgcagattaactcgatagtcagcggcgggcagatttttaccaacggcgagttctttgacaccatcggcctgcgcggggttaacctggcgaccgatgacaatatgtttcccgacggcatgcgctcctacgcccctgaaattcgcggcgtggcgcaaagcaacgccctggtgacggtgcgccagggcagcaatattatctatcagaccacggtgccgccggggccgtttaccctgcaggatgtctatccttccggctacggtagcgaccttgaagtgtcggttaaagagggcgatggttcggtcgaggtattcagcgtaccttacgcctcggtagcgcagctgctgcgtccggggatgacccgctacgcgctctccgccggtaaagtcgacgatagttcgctgcgtaataaaccgatgctctaccagggaacctggcagcatggtttaaataacctgtttaccggctataccggcgtcaccggatttgatgactatcaggcgttcctgctggggaccgggatgaacaccggcatcggcgcgctctccttcgacgtgactcactcgcggctgaagagcgatacccttgacgagcacggtcaaagctatcgcgccacctttaaccgcatgtttaccgaaacccagaccagcatcgtgctggcggcgtatcgctactccaccaaaggctactacaacctgaacgacgccctctacgccgtcgatcaggagaagaactacaacagcaactacaccgtgtggcgccagaaaaacgggatgacctttaccgtcaaccagaacctgccggacggctggggcggtttttatctgagcggtcgggtggcggattactggaaccgttcggggacggaaaagcagtatcagtttagttacaacaacatgtacggtcggctctcgtggtcggtcagcgcccagcgcgtctataccccggatagttccggccaccgccgcgacgatcgagtgtctctcaactttagctacccgctgtggttcggtgaaaaccgcaccgctaacctgacatcgaataccgcgtttaacaattcgcgtttcgccagctcgcagattggcgtcaacggttcgctggatagcgaaaacaaccttaactacggcgtgtcgacgaccaccgccactggcggccagcacgatgtggcgctgaacggcagttaccgtaccccgtggacgacgctgaacggcagctatagccagggcgaaggctatcgccagagcggcgtgggcgccagcgggacgctaatcgcgcatcagcacggcgtcgtattctcgccggaaaccggcactactatggcgctgatcgaagcgaaagatgccgcgggcgcgatgttgcccggttcgccgggtacccgcatcgacagcaacggctacgccattctgccgtatctgcggccttaccggataaattccgttgaaattgacccgaaaggcagcaatgacgatgtcgccttcggcagtaccgtggcgcaggtggtgccgtgggaagggagcgtggtcaaggtctccttcgataccacgctgcagaacaacatcactctgcgggcgcgccaggctaatggcctgccgttaccgtttgccgccacgatattcggtccgtccgggaaagagatcggcgtggtggggcagggcagcatgatgtttatcagcgacgccagcgcgccgaaggccacggttaagtggagcggcggacagtgctcggtggaattaagtcaggaaaaaacaaaggaaacgctatgtcgctaa

SEQ ID NO: 445899 - DNA, 975 bp, Serratia marcescens
atgtcgctaatgaaaaaactgacgctttttattggcttaatggcgctggggacaacgtcagcatgggcatcatgttggcaatctaatagagcctatgaaattaatatggatatggggcgcgtggttgttagcccggacttaccagtagggagtgtcattgcaactaaaacatggccaatgccggatgataatacgatttatgttacatgtgatagaattactactctgaaattagatgcgaaaattgttgctgctggtttggttcagggggccaataaagtctattcaactgcaattcctggaattggtttacgtttctcacgtaaaggggagatcagtatgatctaccctgatagttataccacgacaggttcctcctttatactcgcaggttcaacattcacattagatataattaagaccagtaccacaacagggagtggaaccatagccagtgggctgtatacagagtacggaccaggatttacaatccttaaaaccagccttaatgctgatgccattacaattgtttcaccttcttgtaccatgttaggtggcaaaaatatgaatgtcgatataggcacgattaaacgagctgatttaaaaggggtggggacctgggctggcggtacaccatttgatattaaactggagtgtagtgggggagtcagtgtcagtggttatgcaaatattaacacctcattttctggaacattagctacaaatacatcagcgaatcaaggtgttctactaaacgaaaagaccggaaattctgctgctaagggcgttggtgtgcaggttataaaggacaacactcctctggaattcaacaaaaaatataatattggtacattacaaaaccaggaaactcgttatatcaccctgcctctccatgcgcgcttctatcaatatgcgccgactaccagtaccggtgaagtggagtcgcacctggtctttaacctgacgtacgattaa

SEQ ID NO: 445900 - DNA, 651 bp, Serratia marcescens; identical to SEQ ID NO: 147080

SEQ ID NO: 445901 - DNA, 798 bp, Serratia marcescens
atgtctgaaatggactctccaggaaaacttatctggcacgttgcctgcgacgaatcaggcattgatggccagcgtttttatggttttggtagcctatggatgaaatatcaacgccgtggagactttgccagaatcatgcgggagcttagggataagcaccgtttttatgaagaaattaagtggcagaaagctggttcaaagagatatgcagctttttatcatgatttagttgagctttttttcaaggtgccgtggctggctttccattgcatcattgtagaaaaatccattgttaacaaaaaatttcacaatggtgattatgatcttgctaggagaaaacacttcacctctctcattacaacaaaggtgtctaatgtcatctcagctcatcctgaacgagagagcgtctttcgagtagaggttgatcctatagcttctcggtataagaaagcggatgaagaattccaagtaattgctaataatatcctcaaccgcaaacatggacgacctgaaattattagcagagttattaccaaggactctaaatcctcggaaaacattcaactctctgattttttcctaggtgctgtgatgtgtgcataccaaaataaagcctcatctgaaacaaagattcagctttcaaatttagtggcttcatatcttggatgggatcatcttcaacacgatacttggcatactgagagaaagtttaatgtctggtatttttacgataaaactaaagggatacgggatatacagacaaagtcagtaaggttaaaacacccactacctcgatag

SEQ ID NO: 445902 - DNA, 1074 bp, Serratia marcescens
atgaatgctgctgatgtgcgtaataacttcgctgcccggatgggggtttctagagttctgacgggggcgaataaaccaacatcgcctggtgtatggaatgtcgaaaattccacttggacaccggtagcatggggcacgctgtacgttacaaccggcaactcagacttgagcaccactccggcaaatggaaagtacatccactatcttttcatcgctcacggaacagggaataagctatttattgcaaccgatgtaaacggtacctttagcggctggtatccatttgtttccgcgaacggtggtacttttaccggtgcgattggctcgtcttattctgatacctacagaatagtttcaggtcaatacggtactttctggcgcaatgacggaaaagcgctctatcttatgctaaccaatgctggtgaccagtgggggacatttaataacctgcgaccgtttgctgtctccaccagtgacggctccataaatgtaggtaccagtttctcggttaattacaccggatatataaataagttaggggttaacccctatacaagtaacgggcaaagttttaaccaaacaaacgggctgcatatccaaggtgctggtgaccaatatggagatatttattatcttgagactgtaggaaaatatggttcattatcattccatatccacggaggggggctggatgcctatccggcatttaacaataatggctcgctttctcttaatgggagttggccagccataacaaattcctcagggactacatggcacccggacggcaatgtcgaaggccctcaatggggaggctaccttagcaactggctgaaccaaaatatctccaacgctcaaaataacgcgcaaaactgggcctatcaaaatcttgtccaaaacgtcaggcttactgggcgaattaaccaacctgatactggcggccaggtaagggttcctgatggttgtgtgtttaccggaatgtcgggcgccaactatgacccttcaatctgggcgtcatattcttacgtccaagttttaattaatggttcttggcgaaacatagggacttcttaa

SEQ ID NO: 445903 - DNA, 669 bp, Serratia marcescens
atgctcaccaatgctggtgaccagtgggggacatttaataacctgcgaccgcttgctgtctccaccagtgacggctccataaatgtaggtacaagtttttcggttaattatactggatatattaataagttaggggttaacccctatacaagtaacgggcaaagttttaaccaaacaaacggactgcatatccaaggtgctggtgaccaatatggagatatttattatcttgagactgtagggaaatatggatcattatcattccatatccacggagggggactggacgcctatccggcatttaacaataatggttcgctttctcttaatgggagctggccagctataagcaactccgccgggactacatggcacccagacggcaatgtcgaaggccctcaatggggaggctaccttagcaactggctgaatcaaaatatatcgaacgcgcaaaataacgcacaaaactgggcttatcaaaatcttgtccaaaacgtcaggctcactggacgaattaaccagcctgatactggggggcaagttagagctcctgacggttgcgtgtttactggtatgtctggggccaactataacccatctatttgggcttcttattcatatgtccaagttttaattaatggttcttggcgaaatataggtacttcttaa

SEQ ID NO: 445904 - DNA, 558 bp, Serratia marcescens
atggttaaatttgaaaactttgctatttacaagcctgattttaaatccaccgaagagaatgagcaagcatatagacctgatattctttacgccagagataaaaatgggcgagactggtacgcctgtcaggcggattttagtccagacacgctgaaggtcatgtatgacgagaatggcattatcgtctgtatatcaaaagacgtcacagcaattttccctcctggtttctcagtagcagaggtggcgattagcgaaaccccacctgaagcgtgcaacgatatgacgtgggtatatcgtgacggaagggtgattaagcgcacctacagctctgctgaaaaacgcaagatgttacagggggagaaagaacgtcgtatcgcacgtgttaaccacgttacgcaaaccctcaatagcaagttgctattgggtatggctaccgatgaagagaaagccaaattgcgggtatggatggactacgttaacgagatcgagaagatcagcgatgacacagatcttgaaaaaatcgtgtggccggaaccaaaaataaagccctcatggtag

SEQ ID NO: 445905 - DNA, 726 bp, Serratia marcescens
atgatgctaatgctgatcctgaatgcgggttcgagtcccgctaccacaccacattcaaacctcgccatagtgcggggctttttgcatttcagccccagccaacggacgacacacacggccccccctcttaccggctgtgtttacggctgctggctgaactctttcaactgtggcactcccaataaaaaaaacacgcttcatagtaattcgttattaagaagtttaatcatagtcgtctacaatgcgcgcccattcttcttgagaaacataaagttaggtaaaatgaagattgagctgaataaaagtcgtagagaaagagtttttcatgcagttctattcgaactgttagcaaatgttctaactgcttgttttgtcgcatttgccctacaagttcccctgatccagtccgcattgctttctgtaacctctgctttgacagcaaccatctggaactacattttcaacaaattttttgatgagtttcagaatagatatgggtttgagcggagcttcatggtgcgtgtagcgcatgcagtgacatttgaggttgggctgattgttttgttaacgccgatggcaatgattctgcttgggctgcctttagttcaggctttcgttgttgagattggattagtcctctttttcctgccttatacgatcatcttcaactggtgttacgactacgctcgttggattttggtgactaagcgcgagcctactagctaa

SEQ ID NO: 445906 - DNA, 141 bp, Serratia marcescens; identical to SEQ ID NO: 102393

SEQ ID NO: 445907 - DNA, 141 bp, Serratia marcescens; identical to SEQ ID NO: 102393

SEQ ID NO: 445908 - DNA, 522 bp, Serratia marcescens
atgaacaatgcattctggacggatatagaaacatctgttaatgagaatattgtagactcgataagaacagctccaaataaagagattagaaaatccaacaaagtagaacatgctaatcagggtattatggaaaggatatctaagaccctagagttcccagcatttattagcagaggggaaaacaacaagagtcaatcacgagctgttttgagaaaaatccaagcccgggcaaaagagaaaattgtatccttagagaaagtacttgatgcttatggcgttattgataatttaaaaataaataactcagagtatgaagtccatgctaggatttacaatctaagcaaccatgagattttagatgaaatagttttttcatcttgtgaattcagtgttagcgatcgacaaaagctagttgaaaatgcagtattctactggtacgtaggaatggaaagaactttgtttggtcaagaaaggcgagtatctgaatttagattgagaagagttttcaattctaataaataa

SEQ ID NO: 445909 - DNA, 981 bp, Serratia marcescens; identical to SEQ ID NO: 11425

SEQ ID NO: 445910 - DNA, 546 bp, Serratia marcescens
ttgaggactgtttttgccagcaacacaccgccagaacacaaagaccggtggcaaaccccgatcgaagttttcaacgcactggatgttgagtttggcttcttcctggatgcagcagcggacgacggtaacgcactatgcgctcgttacctgacagagcaggataacgcgctgtcaatcgactgggttagttacggcgccatctggtgcaatccgccatacagcgacatcaccccgtgggtgattaaggctgcggagcaatgtcacgtgcagaatcagccgatcgtgatgctgttgccggcggacacatcaacgggctggttttcgttggcgctgcagtcagtcgatgaagtccgctttatcaccgatggccgcctagcgtttattaattccgcaacgggcaagccggggaagaacggcaacagcaaaggcagtctgcttttcatctggcgcccatttatcaagccgcggtgccagttctctaccatatccagagacgagctcctgcgcataggaaaaggcatgacgatggaggcaagctttgcatga

SEQ ID NO: 445911 - DNA, 588 bp, Serratia marcescens
atgctaacgaccgaacgccagcagtttgctgcgcaaaatgaaatgagcatggagtttgcaaactggttcttcgacgagaagaaggatagctttggcaatatgtggttcttaatggctgcagcaatgtgggaagcctggaaggagcgggatagccgggaggcgcagccggtgatgtgggttatgagcgatgacctaacggacgaaaaaatcatatcgaccccggcatatcccaacagagtagaggctgaggagaggacgataggagaactaactccgctctataccgaaccgccagcgccagcagtgccggcggaagccaagattggtgaaatgccattccttggtaaaaatgagcggggttacgttagaggctggaacgactgccgcgccgcaatgctggctcaacctgtaagtggcggttacatggtgcctgacggcttcaaactcatgccgctggagatgaccgacgaaatcggcgaagccatcgccatggaagctcgttgctgcggtgggattgctctatgcatctatgaagctgcactggctgcagcgccaggggatgagaatgatcacgatacccgacgataa

SEQ ID NO: 445912 - DNA, 594 bp, Serratia marcescens
atggacaataagctgagcgaactgagcaagccaaaggcattcgttgttaccggcgggacgctatatcaagaccgtgcattcacggacaaatcaaccgctgagcgctcaaaagccgatcggcatgatagcgcagttgttgagccactctactcgcaagagtacgtctccgccctgaaacacgaatccgctgttaactgggaggcggcggcatcgctgaacgttgaaaaccaagagctgaaaaagcgcatcgacaagctggaattgcgtttggctgtggaaatcgaaccgccgcctgttatttatcctggccgttatgactgccacgctatgcattcagcaattcgccgagctggattccgcgtttccggtgattctgagcatgtcggtgatgtggatatgcgtgatgaaagagcgctggcagcggtatcagataagcagcgcatcgctgaactggaagccaggttggctacgccggtgcggttgccgcccgttcagcatcgtgaatttctgggactgaaaatagacagcatggatgcagagcaggttcgaatttccatccgcgccgctggcttcaagattgaaggagaagactaa

SEQ ID NO: 445913 - DNA, 276 bp, Serratia marcescens
atgcgcaagctgacaaagattttcgttaccaaatacgcgctgagttccggcccattctcagtgatggcagaaatcaaatatgaaggtgattcagcgttttggtgggtaggtggttatcaccatagcgcacacggaaaagacttctggctcaccgaggaagaggcgctggccgactgcgagcgacgtcgcaaagccaagctggcatcaatcgacaagcaagccaagaagctccaggcgatggcattcactatcaaggagctggcagatggacaataa

SEQ ID NO: 445914 - DNA, 204 bp, Serratia marcescens
atggataatcatacccaagggtggggattccccgcgctagctaagaaagcgcactacttcgccgatggcagcccaaccagcctgtgcggtaaatggttattcacaggcgtcctatttgatgagcgccacgaccatcctgaaaactgcgcagtttgcatgcgcaagcgggccgaggcccaggagaaagcattatgcgcaagctga

SEQ ID NO: 445915 - DNA, 642 bp, Serratia marcescens
atgaaagagcgcccagttattttcaaaggcgagatggttcgcgccattctcgacggccgcaagacacagacgcggcggattgctaaagctgacaactccaatcacttgcttggcagcccattcggacaggtaggcgatcggctgtgggtgcgcgagacgttcgccattctcggcaacgaagacggctgtcctatcgattgggaaggaaacctgattaagggcgatgagaagcatgcggcgcggatttataaagcgtcgtgctggcaagagccgggaaactacggactgtggtcgatacctgatcgagacacccaatacgaaggcgcatggcgcccatcaatccacatgccgcgctgggcaagcagaatcacgctggaaatcaccgccgtgcgcgttgagcgtctgaacgatatcagcgaagaggatgcagaggcggaaggaatcgatatggaggcactttatgactctcaggactgttacgactgcattgcagaccacaatatgaccggaaggccaacggtaacaggcgcattcaagtacctgtgggaatccatctacggcgttgatagctggagcgctaatccctgggtgtgggttatcgagttcaagcaggtcagcgctagggatgtggagcgtgggtaa

SEQ ID NO: 445916 - DNA, 213 bp, Serratia marcescens
atgaatgcagcacaacgccgcaaggcatatcgcaagcatccaaaagccggtgaaaccgtaattcttcgcggagttccccgcctggtgctggggccatgcacattcaatagctacaccggcgaagaacgcgccaagccgtcagtaagccgtattcgcgtgcagatgagcggcggttcaacggcagcgcctctgattagcaacttaacgttctaa

SEQ ID NO: 445917 - DNA, 243 bp, Serratia marcescens
atgtcaggcactgtagagatcaccccagcccaaacaatccgtcttcggttacttgaactagttaattacgacaccgcggcagcagcgaaagccattgagtttgtcggcgacgatgcgctcaagaacgcgatcttccagcagcagtttgcgcgtgtttttacggagagtgagattgtcgctaagacggtcaaagctattcaggaaagcaaagaagccctggcgctgttcgacaccgaggcatag

SEQ ID NO: 445918 - DNA, 1896 bp, Serratia marcescens
atgaccacaccaacgaataagccaatcccaagcgaggacgtaagggatttaaaattcaactctggaaaaattgatgagattgtaacttctgataaaagaacatacatcgataggtttggtgttgaaagatatacatgggctggcgcactagcaaatatagcaccacttggtcatccatggactgagtcagaagcgagcgctgcaattgcatctggagagatccctaatggtgcgtattactttgtctggtcaccagataaaaataatattgcagatgtatggcgtaatgtgaacggaacgcctacaaaaacagaaaagagttatccatcaagcgagtttgtgtacgaacttagtgataaagttgatgacctatccgcgcaagtaagaaatgtagtaaatatcagtggtgtgaaagatgagttgggtagggagattatcggtggaatagcatcagataacggtaagatcccgctccatgtaaacagcaatggggatacgttcttgtcgggattgaaggttattaacttacctggtgacaatggtgttgtttttacggacaaatactacaggccatacgcttgttctgcaggatacaaaaacgatgaagggcttcctgttattggcggtgttagcatttccgaaaagccgacaagtaaaatagaactatctggcattatgggtatagagaatggaggtcaatcattaagtcaaggggtgacaaatcctgccagtgtgaaaattgttaactccactcagccttatagtaatgtaacatttagcgggacaattcgaagcactactcctgaaactgatgtacttgccccattggtagaaagcaaccgcgtgctgccgggatttgaaaattatccacaatcagagacatatttgagttcattcataaacgaactgacaagaaagttaatggttgagttaggggttgactcttctgaatcacttaaatttaaattcttcggggcatctcatggtgttgcaggtctaaagcttattgagctgatgaaggggtctgaaagctataatacttatatcaaatatgttaccaacgcaaagcgtttggctaatgatagtggggtgatatattcggaactatgcgagatattcagccagggagagtccgattatcgggatcagacgcctcaagaggaatgggagtccttgctgattaaatatattgaggataagaataatgacgcaatggctataactggacagtcctttgaccgtgttatgattgccgcgcagttagcatcacaccgggcttatcagagagtaaagccaacaattgctttgtctatagctaagcttgccaggaagggttatttacagatcggttatccggcatatgttggtaaatacgttgacggtgttcacatgtctcctgatgagtatatctatgttggacgcttggcgcagaggtcatttcatcgagccatcaaaaataaccaggaaggtaagtcattcggcatcacatggcttgcagtgacttctgagcgcgtgcagggtaatattcgtgagttaacgtataatgtaccaacacccccaattcgactaaaaacagattgggtatggaagtctgccaattatgggtttgaggttgttgatagaattacgaatgaatatgtggacattattacctcggtggaagtttctggctccaatcgcattactgtagttacttcgcgtccactggcacaaaatgaagtgctaacatacggatggggagtttctgtagagataggaaaaagcggtagaattaatgggccgcgaggtaatgtttgtgatagctcaggcgatctgcctggtgaatcttacactgattccactggcgtgctgcgcccgatggatgactacgctgaaatttggatgtcggggttataa

SEQ ID NO: 445919 - DNA, 747 bp, Serratia marcescens
atgtttaccccgttcaatactgttgcagggtgcatggctgcttggaggggagattttagtgttgaccttacagggaatggacatacgctcactaaaattggctctcctaaccaatctgtaaacacagttttatgcaacaaagataacggttatatcacaaacgtacctgacggaataaatcgcactttaatcgttgttcaccgcttgcctaatactgttgctccgccaaatcaaacatatagcaatccactgggcaatctatctcagcttggaactagtcaaggtgttggtattggtattgttcaggccactattgctggtgataacggttttcaacagatgagtggctgtgttggtgctgataaaaaggatacacctttgttctcaaaggcgacgccagcacaagacaaaccagtaaccaatgctcttaaatggcaatggtctgcatttgcagtagatggcgataacaatatctgtgcaatgtatattccgcgtcagctggatgaccttgttatcggtgttaatgcgccagggattcagttaaaaaacaggtgggtaactgagaataacggcccgtcaatgtaccgcattggtgcttggcgtgatccatcaacaccagggattgcatcttcatcggtagagatagcatatgctgccatctacaaccgaccattgttattgtctgaccttcgtcagcagtatcagtacgacaaattttattgcgggcaagtgaacatagcagtttaa

SEQ ID NO: 445920 - DNA, 852 bp, Serratia marcescens
atgaaacggaatttgttactgtcattcatagtaattttaattcttggttttttattcttgtcttattactatttctattcaattgctggaaaggtttcttacctcacaataatagacgacgacaccaggattgaaacatatacatactggggtaagttatcaaaagaaacaggtgtcaatataaccatagccgccgtgccaaactggataaatgggaatggccctgatggcaaaaaaaccatgagtttagagcagttaaaagaaatgtataataatggaagcgatgttgtttctcatgggttcgatactttaacaatacaagacaacattagtaatgatgagattacaaagaagcaactgtttgaatcaagacagtggttaatcgataacgggtttactaggcgtaatggctatgactattttgtgtggcctcaagggctaagtggttcagaagacgttaaggaaaaagtaaagcttgaagcaagtaaatattatagttttgccgttaatgcgtttactgatgaaaggtatctaaaaaaaggattattcgatgcctatgatataccccgcgctacatcagacgggcaaagatctttaagacttattcattggatgcggcaagctatcaatgatggtggatggatggttgttttgagccattcatggcacgcgaaagattatgatgatgataactatgataagtgggcatctagatatcgttatctaatatggtacgccaaaataaacaacgtacagatagtaactcttcctgagggaatgaagctatggtgtatggaaaatgcattgaatgaacagtgtaagtggctcaatgctcaaaatgtaaatctataa

SEQ ID NO: 445921 - DNA, 204 bp, Serratia marcescens
atggatgtttggacaaaagatgtgccggactcctacatgaaaacaactaaagaattgcacgtactgaataaacataaggcgtttggttatgtgctcgaacagcctctcgcaacttgtaacgagatgggtaaagaaccagatgacagagctaaagtgatgatgctctcaaaaactcatatgtttggaatgccaaagtcaaaataa

SEQ ID NO: 445922 - DNA, 219 bp, Serratia marcescens
atgtttcattgcccgttatgccagcatgccgcccacgcacgcacaagccgttacatgaccgatacgacaaaggagcgttatcatcagtgtcagaacgtgaattgtagtgccacgtttatcacatttgagtcggtgcagcgttacattgttaagccgggtgaggttaatgccgtcaggccgcatcctttgccatcaggtcaacaaacaatgtggatgtaa

SEQ ID NO: 445923 - DNA, 1170 bp, Serratia marcescens
atgattacgggtatgactattgatgccggtaccagccttgcaccggcgtttatgctgacactgaacagccaggacattaccagcaattttagcgaccggctgatttctcttaccatgaccgacaatcggggttttgaggctgaccagctcgacattgagctcgacgacaccgacggcaaagtcgagttacccctgcgcggggcggtgctgacgctgtggcttgggtggcagggttccgcgcttctgaataagggcgatttcacggtcgatgagattgagcatcggggcgcgcctgataccctgaccatccgggcgcgtagtgcagactttcgcggaacgctcaattcacggcgtgaggagtcatggcacgacaccaccctcggtgagctggtcagcaccattgcaaagcgcaataaactgacggccagtgtcgcggattcactgaaaaaaataccggtgccgcatatcgaccagtcacaggagtccgacgccgtatttctgacccggctggctgaccgcaatggggcggcggtgtcagtgaaagcgggtaaactcctgtttctgaaagccggtagtgcgatgacggccagtggcaagcccgtcccgcaaatgacgctgacccgcagcgatggcgaccgtcaccagttttccattgccgaccgtggggcttacaccggcgtaacagcaaaatggttgcacaccaaagacccaaaaccgcaaaagcaaaaagtgacgctgaaacgtaagccaaaagagaagcacctgcgcgcactggagcatccgaaagcaaagccggtcagcaaaaagacaaaggccaaaaaagagccggaggcgcgcgagggtgagtatatggcaggtgaggccgataacgtgctggcgctgacgactgtctacgcttctaaggcgcaggcgatgcgcgccgctcaggctaaatgggataagctgcagcgaggcgttgcggagttttcaattacgctggcgcttggcagggctgatttattccctgagacacctgtgcgtgtgtcgggctttaagcgcgtcatagacgagcaggcatggttaatcagtaaagtgacccacagcctgaataatagtggcttcacgacgggcttagagcttgaggttaagctctctgacgtagagtataaagcggaagatgatgatgggtga

SEQ ID NO: 445924 - DNA, 483 bp, Serratia marcescens
atgcttgctcttggaatgtttgtgtttgaacgtcgcaccctgccttatcagtcgatgcagcactcgaagaattaccgctgggcgtctaatgaccgggtcggcaaagctcctgcgtatcagtttctcggcgagggggaaaacgcgatccagcttgccggtacgctttatcctgccattactggcggtcgtatatctctgctggctgtcgagctgatggccgacgagggcagagcttggccgctgattgagggaaccggcaatatcttcgggatgtatatcgtcgagacggtgtcgaccacgcataccgagtttttcagcgacggcgcggccagaaagattgatttcaccctttcgctgaaacgggtcgacgaatcactgacggcaatgtttggcgacctgaataagcaggccggcgagcttctcggctctgccggtaatctcactgataagctgcagggtgcgctcggagggctgacagcatga

SEQ ID NO: 445925 - DNA, 2442 bp, Serratia marcescens
atgagtaataacctgaggcttgaggtattgctgaaagcggtcgaccaggcgacccgaccgcttaaatccatccagaccgcgagtaaatccctgtcgggtgatattcgcgacacacaaaaagggctgcgtgacctgaatggtcaggcgtcaaaaatcgacggctttcgtaaggcaagtgcgcaactggccgtgaccagtcaatcgcttgagaaagcgaaacgcgaagccggtgagctggcggtgcagtttaaaaacaccaccagtccgacccgcgcgcaggcgcaggcactcgaagcggcaaagcgagccgcctctgagctgcagacgaaatacaacagtctgagaacgtcggtacagcgtcagcgctccgagctgatgcaggccggtattaatacccgcaccctgtctgccgatgaacgtcggctcaaaacctccatcagcgaaacgacggcgcagcttaaccgccagcgcgaggcactggcgcgcgtcagtgcgcagcaggcgaaattaagccgggttaaagctcgataccagtcaggcaaagagcttgccggtaatgcggcggcggctggtgctgcaggtgttggcattgcggctgcgggaacgatggccggggtaaaattactgatgcccggttatgattttgcgcagaaaaattccgagctgcaggccgtgctcggggtcgataagcagtcgccagaaatgcaggcgctacgcaaacaggcgcgccagctcggcgacaatactgccgcctctgccgatgatgccgccagtgcgcagattattatcgcaaaaggtggtggtgatgctgaagctatagcggccatgacgcctgtgactctcaacctgtcacttgcgaacagaaaaacaatggaggaaaacgcgcaactgttgatggggacaaaagccgcctttcagctttctaatgacgcggctgcacatattggtgatgttctttcaaccacgatgaacaaaaccaccgctgattttcagggactaagcgactcattaagttaccttgcccctgttgcgaaaaatgccggagtgagtcttgaacaagcggcggcgattaccggcacacttcatgataataacatcagagggtcaatggctgggacgggcggcgcggctgtaataacgagactacaggcaccaacaggcaaagcatacgatgccctcaaagagttgggtgttaaaacctcggacagcaaaggcaatacgcgcccgttatttaccatcctgaaagaaatgcaggccagttttgagcgcaacaagctcggaactggtcagaaagctgaatatgtgaaaaccatattcggcgaggaggccatgaagtctgcaagtgtgctgatggccgcagcggcaagcggaaagctcgataaactcaccgctacgattaaggcatccgacggaaaaaccgaggaactggtcaaggttatgcaggataacctcggcggtgattttaaagagtttcagtcggcttacgaggcggtcggtactgacctctatgaccagcaagagggctcactgcgcaagcttacccaaacggcaacgcagtatgtgttaaagctcgacggctggatccagaaaaataaggggctggcggaaaccatcggcatcattgccggtggcgcacttgctctgattggtatcatcggcggcattggtctcgttgcgtggccggtggtgatggggattaacgccattattgccgctactggcgtgctgggtacggtctttactgttgccggtggtgccattatgacagcgctcggtgcgattacctggccgattgtggccgtcggtgcggcgattgtggccggggcgctactcatccgcaaatattgggagcccatcagcgcatttttctcgggggtgattgagggcatcatgagcgcctttgcaccggtaggggaaatgttcgccccactggcacccatttttgacggcctcggtgagaagctgcgcggcgtctggcaatggtttaaagacctgattgcaccggtcaaagccacgcaggagacgctagatagctgcaaaaatgtcggcgttatatttggtcaggcactggccgatgcgctgatgttgcctctgaatattttcaataagctgcgcggtggtcttgatgtaattctcgaaaagctcggccttgttaaaaaggaatcgagcagtattgatacggaaacggcaaaaacgccgccggttggtcagggtggagggtatattccgacaaccagctcgcttggtgggtatcaggcttatcaacctgtcacggctcccgccggtcgtacctatattgaccagagcagccctacctatcaaataaacctgccgggtggcggcgcgccgggtggtcaattgggtaaccagttgcaggatgtgttagaaaaatatgaacgcgacaagcgagccaaagcccgcgctagcatgatgcacgattaa

SEQ ID NO: 445926 - DNA, 336 bp, Serratia marcescens
atggcaaaagcaccacgtaaaaccgctgaatttgttgatacggctggcaatgaaattgcagacgcaaacccgaacgtcgtgaccctcgataagccgattaagcgcgccggtcagacgattgataaagtcaccctgattgagccgaatgccggtaccctgcgcggtgtcagtctggcagcggtggcgcagtccgaagtcgatgcgctgattaaagtcctgccccgtatgacctatcccgcgctcacggcgcaggagcttaccgcaatgaacctgcccgatatgctgtcgctggccgctaaggtgattggttttttgtcaccggcttcggcggaatag

SEQ ID NO: 445927 - DNA, 519 bp, Serratia marcescens
atggcactaccccgcaaactcaaatatctgaacatgttcaatgacggcctgagctacatgggcgttgttgaatccgtgacgctgccgaaactgacacgcaagctcgaaaactatcgcggcggcggtatgaatggtgcggcggcgattgacctcggcctcgacgacgatgcgctcaccgtcgaatggtctgtcggtggcctgcccgatgtggcgctgtgggcgcaatacgccgcgccgggtgctgacgccgtgccgctgcgttttgctggatcctatcagcgcgacgacaccggcgaaatcatcgcggtcgaggtggtcatgcgtggccgtcacaaagaaatcgacggcggtgagaataagcagggtgaaaacacctcgaccaaactgtcgaccgtctgcacctactaccgcctcacgattgatggtagcgacgtcatcgaaatcgacaccgtcaacatggtcgagaaggtgaacggcgtcgaccgtctggaacagcaccgccgcgcaatcgggctgtaa

SEQ ID NO: 445928 - DNA, 1179 bp, Serratia marcescens
atgagtgattttcaccacggcgtacaggtgcttgagattaacgacggcacccgcgtcatttcaactgtcgcaactgcaatcgtcggcatggtctgcacggccagcgatgcggatgccgaaacattccccctcaatgagccggtactgattaccaatgtgcagagcgccattgcgaaagccggtaaaaaaggcacgctgtctgcttccctgcaggctatcgccgaccagtcaaaacccgtcaccgttgtcgtgcgcgttgccgacggcacgggagaagacgccgaagcgcagaccatttctaacatcatcggcggcacggatgagaacggtaaatataccggcatcaaggcgctgctgaccgcagaagcagtcaccggcgttaagccgcgcattctcggcgtgccggggctcgatacgcaggaagtcgcaaccgccctcgcgtcggtttgcatcagtctgcgcgcgtttggttatgtcagcgcatggggctgtaagaccatttccgaggcgatgacctatcgcgataatttcagccagcgcgaactgatgcttatctggcctgatttcctcgcatgggacaccaccgcgagcgccactgcaacagcctacgccaccgctcgcgctctcggtctgcgtgcttacatcgaccagaccgtcggctggcacaaaaccctgtctaacgtcggcgtgcagggggtcaccggcatcagcgcgtcagtcttttgggatttgcaggcatccggcaccgatgctgacctgctcaacgaggccggggtcacgacgctagtgcgcaaggatggtttccgcttttggggtaaccgcacctgctctgatgacccgcttttcctgtttgagaactacacccgcaccgcgcaggtgctggccgacacgatggccgaggcgcacatgtgggcggtcgataagcccatcaccgcatcgctcatccgcgacattgtcgatggcatcaacgccaaattccgcgagctgaaatctaacggctacatcgtggacggtgaatgctggttcgacgaggagtcgaacgataaggaaacactcaaggccgggaaactgtatatcgactacgactatacgccggttccaccactggaaagcctgaccctgcgccagcgtatcaccgataaatatctggtgaatctggccgaatcggtcaacagctaa

SEQ ID NO: 445929 - DNA, 597 bp, Serratia marcescens
atggcaaaagcaacgctgaataaaaacggtatcgccactaaagctggcgatatgacggtctataactttgatggtgagacgctagaatatttatcggtatccgtggaatttcttgctgtcggcgttggtattcctgctaactcctgcaccgatgctcccgtcgacgcaaaaaatggctttgctgtgtgccgcgcaaccagtctggatgggtgggattatgttatcgaccaccggggcgagacggtgtatgacacagaaaccggccagcctgtcgagataaccgggcttggtgattatcctgataatgtaaccaccatcgaaccgctgacgccttatgaccgctggaacggtagcgaatgggtcgcggatgaggaagcacagaaaagcgctcaggttgttgaggcgcagcagaaaaaagcctcattgcaggccgaagcgaaaagcacaatcagcctgtggcagactgagctgcagctcggcatcatcagcgacgatgacaaggccagtctgattgcgtggatgaaatacattcagtcgctgaacgcagtcgacacctccacggcacccgatatcgagtggccggttaaaccggagtaa

SEQ ID NO: 445930 - DNA, 1065 bp, Serratia marcescens
atgaccgcaaaatattttgccattctgaccaatcagggcgcggcgcggctggcgaacgcggcggcactcggtaccaagctcaacctgacgcagatggccgtcggtgatgcgaatggtacgctgccgacccctgacccggcgcagaccaagctcattaaccagaagcgcatcgcgccgctgaacctgctgaccgttgacccggccaataccagccagattatcgcggaacagattattcccgagaatgagggcggtttctggatccgcgagataggtctatatgacgacgacggcattctgattgccgtggcgaactgcccggagacctacaagccgcaactgcaggaggggagcggtcgcacgcagaccattcgcatgattctgattgtgtcgagcacgtcgaccatcactctgaaaatcgacccgtcggtcgtgctggcaacgcgccagtatgtcgacgataaggttattgaggtgaaagcctatgctgatagtttgctggccgcacaccttgctgctgctgacccgcatccgcagtacctcaaaacagcggaaattgataaatatattccggtcggcgtgccgctcccttatccgtcagcgacgccgccgacaggttggctgaaatgtaatggtgcggtatttgataaggtgaaatatccggggctcgccgcagtatttccgtcagggaatctgcctgatttgcgcggtgagtttatccgtggctgggatgacgggcgcggagtagatagcggtagggggttattagcctctcaggactcattagtcgcagggcatgctcactcgttaggcagaatgtggtcgtcatcagatgaaacgaataatgccgccaagcatttgggtgtatctaaaaccattcacaacacaacgaaagataatatgggtaatgggattatcgaggatgttgatagcgcgttagggattgcaattggttatggtcagggcggaagttttacgtctacaacggcgataaaaagcaatacaacctcgacggacaacaggccgcgaaatatcgcatttaactacatcgtgagggcggcgtaa

SEQ ID NO: 445931 - DNA, 609 bp, Serratia marcescens
atgagtgacaggctgttacccgttggctcgtcgccgctggaagttgccgccgctgctgcactctctgagattcagcgcgtgccggtaccgttgcgcaccctatggaactggcgtacctgcccggtaaacctgctgccgtatctggcgtgggcgctgtcggtcgaccggtgggatgagaagtggccggaggcgacaaagcgcagcgtctgcgcgtcttcgtttttcgtccatcagcacaaaggcaccatcagcgcattgcgtagggtggttgagccgctcggctttctgattgaggtgcgcgaatggtggcagctcaacgaggagccaggcacattccgcctcgttgtcggtgtgctcgatagcggcatcactgacgaaatgtatcaggagctggagcgcctgattgaagacgccaaaccggcaagccgacacctgacagggctggctatcagcctgagtgcaaccggcgagctgtatgtcggcgcgggatgttacgacggtgacgcgctgaccgtttacccctacacccccgaggaaattgtcgtcggcggtgaatattacccggcctcggccatccatttgattgataacctgagagtgaacgcatga

SEQ ID NO: 445932 - DNA, 909 bp, Serratia marcescens
atggcaaccgttgacctgagtcagttacccgttcccgacgtggttgaggaactggactatgaaaccatccttgcggaacgcattgcgacgctgatttcgctctatccagaagaccagcaggaggccattgcccggacgctggcacttgagtcggagccgattgttaagctgctgcaggaaaacgcctaccgtgaagttatctggcgtcagcgggtgaacgaagctgcgcaggcggtaacgctggcctattccgccggtaacgacctcgatgtcgtggccgggaacaacaataccgaacgcctgaccatcaccccggcggatgacactaccatcccgccgacgcctgccgttatggaatccgataccgacctgcgtctgcgcacgcaacaggcgtttgagggcttgagcgtggcggggccagtcggcgcatatgagtatcacggtcgcagcgccgacgggcgggtcgctgacgtgtcggtcgaaagcccgtcgccagcctgcgtgacgattaccgtgttatcacgcgagggtgacggcactgccagtcctgatttactggcgattgttgataaagccctcaatgccgaagatgtgcgcccggtcgctgaccgggtgaccgtccagtcagccgagattgtgccgtaccagattgacgcgacgctctacgtttaccccggtcccgaatctgaacccatcaggcaggcatcagagcagaagctgcagagctacatcagcgcgcagcaccgcctcgggcgtgatatccgtctgtcagccatttatgcggcgctgcatgttgagggggtgcagcgtgtcgagctggcatcaccgcaggccgacatagtgctgagtaagtcgcaggcgtcgaactgcaccgagtaccagataactatcgggggctcggatgagtga

SEQ ID NO: 445933 - DNA, 348 bp, Serratia marcescens
atgacggcgcgctatcagggtatgaaccgaaataccggcctcggcatcagcgacactgagcacatcagccagagcatgcgcgacatactgctgacgccggtcggctcgcgggtgatgcgtcgtgaatacggctcactcctgtcggcgctgattgatatgccgcaaaacccggcgctcaggctgcaaattatggtggcgtgctattcggcaatccagaagtgggagccgcgcatcaggcttaccgctatcagctttgagaccggcgacgctggcgagatgtatgtcgatattaccgggatgcgtaccgataccggtgcgtcagtttcaaccactgtttcactgagttaa

SEQ ID NO: 445934 - DNA, 636 bp, Serratia marcescens
atgaatacgttatccacgatacaggagctcgcacgcgcgattcgcaacctcatccgctcaggtgtggtgactgaggttgataccgtgcaggggctgtgccgcgtacaaagcggcgggatccagacaacatggctgaactggctgaccacccgcgccggtcgttcgcggacgtggtgggctccctcggtcggtgagcaggttctgctgctggcaatcggtggcgagctcgataccgctttcgtgctgccgggtattttctccgacgataaccccgccccgtctgcctcggcggatgcgtggcatgtggcttttcctgatggcgcggttattgagtacgagcccgaaaccggtgcgctgacggtcagcggcatcaaaacggccgacgtgacggcatcggagtccatcaccgcaaccgtgccgctggtactggtgaaagcctcgaccagtatcaccctcgacaccccggaggtgatttgcaccaataagctgacgacggcgacgcttgaggtgcagaaaggcggcaagatgaacggcaatatcgaacattccggcgggtcactgtcgtctaatggcaaggtactccacacccataaacacccgggcgacagcggcgggcaaacgggggcaccgttatga

SEQ ID NO: 445935 - DNA, 450 bp, Serratia marcescens
atgagtgaattaaccgcgctgcaggaacgccttgccggtctgattgccagcctgtcaccagtggcgcgtcggcaaatggcggctgagattgcgaaaaagctgcgtaccagtcagcaacagcgtatcaagcgccagcaggcacccgacggcaccccgtatgcggcgcgaaagcgccagccggtgcggagcaagaaaggtcggattaaacgtgaaatgttcgccaaactgcgcaccagtcgctttatgaaagccaaaggcagcgacagtgcggcggtggtggagtttaccggcaaggtgcagcgcatggcgcgggtgcatcagtacggcctcaaagaccggccaaatcgcaacagccgggatgtgcagtacgaggcgcgcccgttgctcggtttcacccgcgacgatgagcagatgattgaagacgtcattatcaggcacctcggcaaataa

SEQ ID NO: 445936 - DNA, 468 bp, Serratia marcescens
atgcagaagcacaaaagcctgcgcaaagcgctgattaacgccgtgccgcagctccgaaacaaccccgatatgctgcgcctgtttgccgacaacggccataccgattcccgactggcgagctcgctgtcgtttgaaaaggtgtacgtgcttaacgtggtggtgaccgacttcaccggcgacctcgatttgatattcgtgccggtgcaggcgtggctgcgtgaacatcagccggacattatgaccaccgacgacgggcgggaaaaaggattcacctggattattgatatcaataacgacgattcgctcgatatcagtatcagcctgaggctcaccgagcgcacgcttgtcaaagaggtcgacggcgcgctgcacgtcagctatgcccctgagccgccactgcctgagccggtgacgcgcccggttgctatgtatgcaaatggtgaattagtgagccagtgggatgagtga

SEQ ID NO: 445937 - DNA, 159 bp, Serratia marcescens; identical to SEQ ID NO: 143670

SEQ ID NO: 445938 - DNA, 414 bp, Serratia marcescens
atgaaagtgttagccgtgctgttagtgttgtccgtgctcgggctgctgtggttgcgccatgagaacggcaatttaacccgctcctttgagacagcaaaccgcgtcgcgagcgaacaaaagacgacgattggcatgctgaaaaatcagctcagtgttgccggtcagattgccagacgtaatgaatccgcgcaggtggcactgcgtgaacagctcgaaaaagctagcgaggaagccagccgccgcgagcagacgataacgaggttacttaatgaaaatgaagcctttcgccgctggtataacgctgctttgcctgatgttgtgcgtcggctgcacacccgcaccgcctgtgccagcgccggtgattgtggtcagcggatgcccgagggtgagcctttgcccgatgccgggaagtga

SEQ ID NO: 445939 - DNA, 510 bp, Serratia marcescens
gtgagctcaatcgttaaacgttgcagtgtggccgcagtgctggcgctggcggcactgatgcctgattttcgtctgctgaatacctcgcctgacggtctggcgctgattgccgacctcgaagggtgtcgcctgacaccttaccagtgcagcgcgggcgtgtggacgtcaggcatcggccacactgcaggggtggtaccgaaacgcgatatcactgagcgcgaagcggcgacaaatctggtcgccgacgtgctgaatactgagcgccgtctcgcggtctgcgtgccggtcaccatgccgcagccggtttacgacgcgctggtcagtttctcttttaacgtcggcaccggcgcggcctgtcgctcgacgctggtctcttacatcaagcgtcatcagtggtggcaggcatgcgaccagctcacccgttgggtgtacgtcaacggggagcgtagtaccggcctcgaaaatcgacgccagcgtgagcgtgcttactgcctgaagggggtgaaatga

SEQ ID NO: 445940 - DNA, 222 bp, Serratia marcescens
atgggactgagtatggaaaaaatcaccacgtttatcgcctactggctggccgttgggctggcgtatttcggggcaatgtcgcccgaaaaactggcgctgtatgtgggtagtctgtgcgccatttttacggcggcggtgaatttctggtaccgacgcaaaacctttcgttacctgaccgaaatgggaatcgacaaaggggtgacccgtgagctcaatcgttaa

SEQ ID NO: 445941 - DNA, 204 bp, Serratia marcescens
atgaaagtctacgcgatgcagggcgataccctcgacgcgctttgcgtccggtattacgggcgcactgagggcgtggtcgagacggtgctgcaggctaatcccggcctgtctgagctgggcgtcattctgccgcatggcacggcgattgacctgccagacgttgaaacatcacccacggcggagaccctgaacctatgggactga

SEQ ID NO: 445942 - DNA, 510 bp, Serratia marcescens
atgacgacagtaatactgaatcagcccgacgaaccgcaggacgtaccgggcgtggtgattcccgcaccggagacgggcgacgcagtgattaaaaacacgttctttttccctgatgtggatccgaagcgggtgcgcgagctgatgcgccttgagcagacggtttccgatgcgcgcctgcgcaacgccatcaagaccggcatggcggaaaccaatgcagagctttacgactaccggctgcgccagattgccgccgggtttaagacactggccgacgtgcctgacgccgaggaaatcgacggcgagaatgtgcgtgttttccactacctgagcgccgtgacggcgatggcgacagccaccctgtatgagcgttatcgcggggttgaggccaccggcaagggtgacaaaaaagccgacagcgtcgaaaccacgattgatgacctgtggcgggatatgcgctggtcggtctcgcgcctgcaggataagccgcgctgcatcgtgggccagctctga

SEQ ID NO: 445943 - DNA, 750 bp, Serratia marcescens
atgacgagccccgcacagcgtcacatgatgcgggtctcggcctctcaagccgcgcagcgggaacaagccccgctgcgccatgcaaccgcctacgagcagatgctggtaaagctggccgatgaccgtcgcacgttaaaaaccatccgttcaaacgaactgaaagccgcgaaaaagcgcgagctgttgccgttctatgcgccgtgggtcgccggtgtgctggctgatggccgtggtacgcaggatgacattgtcatgaccgtcatgctgtggcgtctcgatgccggtgatatcgctggcgcgctggaaattgcgccctacgcgctgaaatacggcctcacctctgaccatcgccgaaccacgccttacatgctggttgaggaggtggcacttgccgcgctgcgcctgcgcgatgccggtgagcctgtcgacctcgcattactgctgaccaccctcagcctgaccgacggtgctgacgttcccgatatggtgcgcgctcgtctgcataaggtgactggcctgaccctgcgcgatgccggtcaggacgccgaagcgctggcgcagtttcagcgcgcaatgcagctcgaccgcaatgccggtgtgcgcaaagagattgagcgactggagcgggcattgaagcctaagcccgatgccgcgccccgtaaaacgactaaaccgcgcacgcgcaaacctgccaccagaccggcggcaaagcgcgggcgtccaccaaaggcggtaaaaaccgccggttaa

SEQ ID NO: 445944 - DNA, 1068 bp, Serratia marcescens
atgcgtcaggaaacccgttttaagttcaatgcctatctgacccagctcgccaaactgaacggcatcagcgttgatgacgtcagcaaaaaattcaccgtcgagccgtccgtcacgcaaacgctgatgaacaccgtgcaggcgtcatccgcatttttgcagatgattaacattctgccggtcgcagaaatgaagggcgagaaaatcggcgtcggtgtgaccggcaccatcgccagcacgaccgacacctcgggtgacaaagagcgccagaccgcagatttcaccgcgcttgagtccaacaagtacgagtgcaatcagattaactttgacttccacctgacctataaacgcctcgacctgtgggcgcgttttcaggacttccagcgccgcatccgcgacgccattgtccagcgtcaggcactggatttcatcatggccggtttcaacggtaccacccgcgctgatacctcagaccgcagcaaaaacccgatgctgcaggatgtggccgtcggctggctgcagaagtaccgcaacgaagctcctgcccgcgtgatgagcaacatcaccgacgctgacggtaaggtcgtttcggcggtgattcgtgtcggtaagaacggcgactatgagaacctcgacgcgctggtgatggatggtaccaacaccctgattgacgagatttatcaggatgacccgaaactcgttgccatcgttggccgtaagctgctggctgacaaatatttcccgctggtcaacaaacagcaggaaaacaccgagtcgctcgcggcggatatcatcatcagccagaagcgcatcggcaacctgccagccgtgcgcgtgccgtacttcccggcgaatgcggtgttcgtgaccacgctggaaaacctctctatctacttcatggatgagagccaccgccgcagcattgatgagaacccgaaaaaagaccgcgtggaaaactacgagtcgatgaacatcgactatgtggtcgaggcgtatgccgccgggtgcctgctggaaaacatcaccctcggcgatttcaccgcacctgcagcaccggaaagcggagcctaa

SEQ ID NO: 445945 - DNA, 855 bp, Serratia marcescens
atggcaaaaaaagtctcaaagttctttcgcatcggcgtcgagggtgatacctgcgacgggcgcattatcagcgccagcgatattcaggaaatggccgaaacctacgacccgcgcgtctacggttgccgtatcaaccttgaacacctgcgcggcctgctgcccgatggcgtattcaagcgttatggcgatgtggtcgagctgaaagccgagaagattgacgacgattctgcgcttaacggcaaatgggcgttgttcgctaaaatcaccccgaccgatgaccttatcgcgatgaataaagccgcgcagaaggtctacacctcaatggaaattcagccgaattttgccaataccggcaaatgctacctcgtcggccttgcggtcaccgatgacccggcgagcctcggcactgaatacctcgaattctgccgcaacgcgaagcacaacccgctgcagcgctttaaggccaaccctgaaaacgtcttttccgctgccacgctggccgagctggaatttgaagacgttcccgacacggtgctaaacagcctggctgataaggtgaaagccattttcagccgtaagcaggtcagcgacgatgcgcgcctgaatgatgtgcatgaagcggtgaccaccgtcagcgagcatgtgcagaccaatctgaccgcgcaggataagcgcatttccgatatggaaaccgcgtttgccactttcaaacaggaactgaccggcaaggttgacgaaaccagccaggcattttccgccctgaaaaccaccctcgacaaaaccgaaagtttcagccagccgcgacgcacaaaagccagcggcggtggcggtgatgagctgctgacagactgctga

SEQ ID NO: 445946 - DNA, 1770 bp, Serratia marcescens
atgaccatttccaccgatacaaccttgttgcatgacccgcgacggcaggcatcgctgctttactggcagggtttttccgtgccacagattgccgaaatgctgcaggtcaagcgcccgaccgtgcagagctggaagcagcgcgacggctgggacggcatcgcaccgatttcccgcgttgaaagcagccttgaggcgcgcctgattcagctcatcgccaagccgcaaaagtcagggggcgacttcaaagagattgacctgctcggacggcagattgagcgactggcgcgcgttaaccgctacagtcagacaggtaacgaggtcgaccttaaccccaatgtcgccaaccgcaacaagggcgagcgtaataagccgaaaaagaactttttcagcgacgaggctatcgagaaactggaggaactatttttcgaccagtctttcgagtaccagttgcagtggtaccgcgcagggctggcgcaccgtattcgcgatattctcaaatcccgccagattggcgcgacgttctatttctcccgcgaggcgctgctgcgcgcgctcaagaccggacataaccagatttttctgtcggccagtaaaacgcaggcttacgtgttccgcgaatacatcatccagtttgcgcggctggtcgacgtcgacctgaccggcgacccgattgtcatcggcaacaacggcgcaaagctgatttttctcggtaccaattccaacaccgcgcagagccataacggcgacctgtatgtcgatgaaatattctggatcccgaattttcagaagctgcgcaaagtcgcgtcgggcatggcctcgcaaaagcacctgcgttcgacctatttttcgacaccttccacgctggcgcacggcgcttaccccttctggtctggcgagctgttcaacaaggggcgcagccggattgccgaccgcatcgaaatcgacatcagtcacagcgcactcgccggcggccagctctgcgacgatggccagtggcggcagattgtcaccattgaggatgcccttgccggtggctgcaccctgtttgacctcgaccagctcaaacgcgaaaacagtgatgaggactttaagaacctgtttatgtgcgagtttgtcgacgataaagcgtcggtattcccgttcgaggagctacagcgctgcatggtcgacgtgatggaagaatgggaggattttgcccctttcgccgaccatcctttcggctcgcggcctgtctggattggctacgacccgtcacacaccggcgacagtgccgggtgcgtcgtgctcgcgccgccggtggtctcgggtggcaagttccgtatgctggagcgccaccagtggaaaggcatggactttgccgctcaggccgagggcattcgcaaactgaccgagaaatacaacgtcgaatacatcggcattgacgcaaccggcctcggtctcggcgtgttccagttggtgcgctcattctacccggcggcacgcggcatccgttacacacccgaaatgaaaaccgcgatggtgctcaaggcaaaagacaccattcgccgtggctgtctggagtacgacgccggggcgaccgacgtcacgcagtcgtttatgtccatccgcaaaaccatgaccagcagcgggcgcagcgccacctacgaggccagccgcaccgaggaagccagtcacgccgatatcgcatgggcgaccatgcatgccctgttaaacgaaccgctttccgccggtagcggcatgcagcctaaatctattctggagtttaattaa

SEQ ID NO: 445947 - DNA, 747 bp, Serratia marcescens
atgaaaaataacgttttctcacaaagccagattcaggcaatggccgatattctgcacaatgacagctttgactatcaggcaacatggttgcgtgtcgggaaactcaatatcgaccgcagcatcaccaaatcgcgccagattggcgcaacgcagctctttagtcgcgaggcgctgctcgatgcgctgacaacgggcgataatcaggtctggtttgctcacaccattgagcatgcgcgcgtggcgctgatgtacatgaataacctttctgcgcgcgtcggcgtccgtctgacgagcaacggccacagcctgcagctcgacggcggtgcggttattagctttgtcggcgaggaatcccactgcgccgcgctggcgggtaatatctaccttgacgagttcggatggttcagtaacccgctaagagcggcaaaagtcgcggcggctatcgcctgccataaacgccacaatctgacgatgttcaccacaccatcagacagctacgcagcattcagggtgtggaacggcacaacccgcaagcgccgaccgtcaccgctaatcaataccggcgacagcgtattttgcactgatggtgtctggcgtcagtcggtcactctggatgcagcatgccagcgcgggtgcaatctctttgcgcctgaggaaattaaacgcgaatacagcgacgatgattatcgtctgctgtttggctgcgactggtctttcgctgttgcagcgggtgaggtggcagcatga

SEQ ID NO: 445948 - DNA, 1023 bp, Serratia marcescens
atgagcaagcgcaagccacgcaaagcagtagccatgagcgccagcgtcccgcaaaaaatggaggcgttcaccttcggcgagccggtgccggtactcgataagcgcgacattctggattacgtcgagtgcatcagtaacggcaaatggtacgagccgccggtcagcttctccgggctggcaaagagcctgcgctctgctgtacatcacagctcaccgatttacgttaagcgcaacgtgctcgcgagcacctacattccgcacccgctgttgtcccgtcaggatttcagccgctttgcgctcgactatctggtattcggcaacgcctttcttgagcagcgccacagcgtcaccggtcagttaattaagctgctggcctcaccagccaaatacacccggcgtggggtcgacgattcgattttctggtttgtggaaaacttcactctaccgcatgagttcgcgcctgataccgtgtttcacctgctggagcccgatattaatcaggaaatttacggcctgcccgaatacctcagcgcgcttaattccgcctggctgaatgaatccgcgacgctgttccgccgcaagtattaccagaacggcgcgcacgcaggttacatcatgtatgtgaccgacccggcgcagagtgcgaccgacgtcgaatcgctgcgcgaggcgatgcgcaactcgaaagggctcggcaacttcaagaacctgtttttctatgctcccggtgggaaaccggacggcattaaaatcgtgccactgagcgaggtcgccactaaagatgactttttcaacatcaagaaagccagtgccgccgacctgatggacgcgcaccgcgtaccgttccagctcatgggcggcaagcccgagaatatcggctcactcggtgacgttgagaaagtggcaaaggtatttgtgcgtaacgagctgtcgccgctacaggacaggttcagggaggtaaacgactggctcggcatggaggtcatcaggttcaaagagtacaccctcgacaacccggaataa

SEQ ID NO: 445949 - DNA, 2139 bp, Serratia marcescens
gtgcaaggcgttttatccaaaattgaccgcctgccttactttttaagttctctgtttgcctcgcgttatgaatatatcaggcgtaacaaaagtcctgtgcatgggctgtatttcctcaagtcgacatttctgcgccggttgtggccgcgcattgagcgggttaatcagcgtaacgaaatgaatagggaggcgtcgctgctgtttcttgctgaaagcgagaattacgcgcgcctgccggggatgaacgataaagagctgaaaaaatttgcgtctcgtatcgcctcgcagcttttcatcatgtacgaggagttaagcgacgcatgggctgaggcgtacggtggcaaagagtcgctttttactgatgaggctcaggcgcacctgtacggtcatgttgctggcgcagctcgggcttttaatgttgccccgattttctggaagaaataccgcaaaggccagatgacaatccgacaggcattttccgccgtagctcgcctgattaacgatgaatggtggactaaccagctcaaggcgcagcgcatgcgctggcatgaagcgctgctgattgctgcaggcgaggtgaataaagaccgctcgccgtatgccagtaaaaatgccgtccgtgatgtacatgcacgccgtctggcaaatcttgaatacctgaaatcctgcgagctggaaaacaaagttaccggcgaacgtatcgaccttatcagcaaagtgatgggaagtatttccaatcctgaaattcgccgcatggagctgatgaacaccatcgcggggattgagcgttatgccgctgctgagggtgatgtcggtatgtttatcacgctgactgcaccgtcgaagtatcacccgacacgtcaggtcggaaagggtaaagataagactgtacagctcaatcatggctggaatggtgaggcttacaccccgaaggatgcacagcgttacctttgccgtatctggagcctgatgcgtaccgctttcaaagataatgatttgcaggtttacggtatgcgtgttgtcgaaccgcaccacgacgggacgccgcactggcacatgatgttgttttgcaagcgccagcagcgcaaagaaatcaccgaaattatgagtcgttatgctctcaaagaggatggcgacgagcgcggtgcagctcgcaaccgctttcaggctaaacacctgaacaaaggcggtgcggccgggtacatcgcgaaatacatcgccaaaaatatcgacggttacgcacttgatggcgagctcgataaagataccggcaagccgctcaaagataccgccgccgctgttactgcatgggcgtcaacgtggcgaatacctcagtttaagccgattggcctgccgacgatgggggcttaccgtgagctgcgcaagctgcctcgcggggtaagtattgctgatgagtttgacgagcgtgtcgaagcaacacgcgccgcggctgatggcggtgatttcgacctgtatatcaccgctcagggcggcgcaaatgtcccgcgcgacggccagaccgtcagggtcgcccgtagcgtcagtgatgaggttaatgactacgaggaagatatcgagagggtggtcggtatttacgcgcctcacctcggcgcgcgtcacgttcacattacccggtcatcagaatggcgcatcgttccaaaggttttggccgttgagcctttgaccttaaaaagcggcatcgccgcgcctcggagtcctgtcaataactgtggaaagctcaccggcggtgacgttccggttatgacccctacaccgtctgagcatgccgcagcggtgttaaatcttgttgatgacggggttatcgcatgggatgaccccgaagtcgtgacggcgctcaagggcgcactaaaacacgacgcgcggcagcaaaatcgccagcaaagaagcggagagccattaaaaccgcatgacgttgccccatcaggcaggctgactaaatccgaacgcgcgcaaataccgcgtatccgctttgaccttgcgcagcatggcatcaccccgaagcgctgggagcttgaggcgctggcgcgtggtgcgaccgtgacatacgacgggaagagattcacatatccggtcgctgatgagtggccggggtttactggtatatctgaatgggggtaa

SEQ ID NO: 445950 - DNA, 276 bp, Serratia marcescens
atgagcattcgtatcgagattggcgagcgctatgtcgtcacaagtgaccgttttcagttcattttgcaggagaaaaagaccgccgaaacagggaagaatgccggtaaagagtggctggatgttgtcggctattaccccaaattaaaccagctcgtttccggtctgattcatcacgatattttgagcggcagcgctgtctcttttgaagcgttgagcactcaggttgaactgctcggtaagcagtgtttacgggcttttgacacaaatggccgttga

SEQ ID NO: 445951 - DNA, 225 bp, Serratia marcescens; identical to SEQ ID NO: 81348

SEQ ID NO: 445952 - DNA, 297 bp, Serratia marcescens
atgtctctgatgcactccgtattacttaataactggctaaagattgcggttatgaaaaacggtgaattatcgcttgctgacattaagcgcgataaagaaaccggagcaatgacggaatcaaccatcgctatttattcgagtgagttaaacctcctgacggatgtggtcaatttgcttgtgaaacgcgccgtttttcataagcaaatcaccaccgtcgatgaattatcgaaattaaccattgagctgaccggttactgcgccggtgagtttaaaaagctgaacaaagagaggagctaa

SEQ ID NO: 445953 - DNA, 234 bp, Serratia marcescens
atgcatacagtaacaggaaagcagcgcggtaacttctcattaatactgcaacaggcgcgagccgaagcgcaggccgatgcggcggtgcgcttttcctctcatctggacggtttaatccgtcatatagctggcgctgagttgtcgcgcgtggagattgtcgagttactcagtcaggaatccatcaagtttcataatatcggcctttctcgtggggagtctctttcatgtctctga

SEQ ID NO: 445954 - DNA, 501 bp, Serratia marcescens
atgcctgtaatgacgcttggtatcgtggagaaacagcctgcagctctgcgcggtctgattggtaaatatctggccgcacctcgctggcaggatagttgcgatttttacaatcagatgatggaacgtgagcgcctgaccgtttgttttcatgctcagttaaagcagcgtcacgcgacgatgcgttttgaagaaatgaacgatgtagaccgtgagcgattagtttgcgctattgatgagctgcgtgctgcattttccagacgtcgacaggttggcgcgagcgagtatgcgtatattagttttttgacggtcagccaacgccgcactttgtttatgcatgctggattaactgaaaaagaatttaatcagccttactggcgtattaatgaagattcctgttattggcgtgatgccttatttcgtgcgttgcgggagctttttaatttatttgaatatgcaccaacaatattaacctcggtaaagcctgagcaatatctgcattaa

SEQ ID NO: 445955 - DNA, 183 bp, Serratia marcescens
atgattatgaatgagcctcgttgcattgctcagttattgcgtaacgagagcccgagggcgatggatttcactatcacccacggcagagggcgcaagggcatcatcatccgcaccaaaaaaccgagcgctattagcgccgtttttgcttttctgaaatcccggaggttctggaaatgcctgtaa

SEQ ID NO: 445956 - DNA, 273 bp, Serratia marcescens
atggaaccaaacgattatttgttgcagtacccgctcgacgcggttcatgtagaaaagtttgctgagttattaggcaagcccaaaacggctgttgcagaaatggtgaaagctaacaagctaccggtaattgagcttcgggatccatgcaaaccgaatgctcgcgccggtgaaaagtgggttttcatcccggaatttaatcgcgcagttcgtgaggcgttctacaaccgaccgatagaacagcgtgacgcgtggctgctttggatggggctatga

SEQ ID NO: 445957 - DNA, 981 bp, Serratia marcescens
atggcaattaagaagctcgatgatggtcgctatgaagtggacattagacctcgcggtcgcgatggaaaacgcatccgcaggaagtttgaaagaaaggctgaggcggtagcatttgagcgatacaccatcgccaatgccagccagaaagaatgggcaggccagcgagcagaccgtcgaactttagcggaattgcttgacgtctggtggaagtatcacggtcaaaaccacgaacacggcacaaaagagtttaatcacctgctcaagactatcagcggcttaggtgatatgccggtgagccgcgtgagcaaaagagctctgatggattatcgctctacgcgcctgcgtgatggcatcagcgccgcgacgataaatcgtgatatgtaccgcttatcgggcatgttcaccaagctaatccagttggatgagttttccgggcaacatcctattcacggactgccgccactggcggaagccaacccggaaatgacgtttctggagaaatcagaaatcgagaagctgttaagcgttttggttggtgatgacttgctggtcgcgcttttgtgcctgagcacaggcggaagatggacggaagttgccacactgaaaccagcacagataacaagctgcagggttacctttttgaaaaccaaaaacggcaaaaagcgaactgtgccgatttctgcggaactggagaaaaaagttaaagaggaggctagcgctaaattgttcaaggtcgattatgagaagttttgcgggattttacgcagagtgaaacctgacataccacccaatcaggcaactcacatcctgcgacacacattcgcaagtcatttcatgatgaacgggggcaacataattgcgctgcagcagattctcgggcatgcgagcattcagcagacgatggcctacgctcaccttgcgcctgactacctgcagaacgccgtcgcactgaatcctcttaacggtggagtgacgttataa

SEQ ID NO: 445958 - DNA, 150 bp, Serratia marcescens
atggcatcactgttcctatggataaaagatccaaagacaatattaattttgatcaactcaacgccactgattttgatgctgttattctcactggcggtcatgaagcgcctgatagagttcgccaagatcagagagttaaagattttctaa

SEQ ID NO: 445959 - DNA, 2880 bp, Serratia marcescens; identical to SEQ ID NO: 445321

SEQ ID NO: 445960 - DNA, 339 bp, Serratia marcescens
atgctggcgccgttcctgctgctgctgtcgggctacatcagccgcggcagcgcaggcaaggcggaaaaatccgccatcaccattccgtggtttgccgtgctgtttatcgccgtcgccgggctgaactccttcaacctgctgccggccacgctggtgcggcacctgatcaccgccgacacctggatgctggcgatggcgatggcggcgctcgggctgaccacccacatcagcgccgtgcgccaggccgggatgaaaccgattctgctggcgacgctgctgttcgtctggctgctggtcggcggcggcgcgataaaccaactggtgcaacacctgctgtaa

SEQ ID NO: 445961 - DNA, 1170 bp, Serratia marcescens
atgaaaaaccaagataaaactgatgattacaatggaacttactttatgcttgacagggagcgcctgcgcccgggtgatattattcttgaacgtggctacgaatggtactcggaagaaatcacgaagcgtaccaacagcaattactcacatgcaatgatatatgtaggtggcaccattatggaggccacattagcgggaggcgtcttcagtcggataccaaatcgctcagcagtgcggaacattgatgatttcaaggttcttcgattaaaagagtaccctggatctgaaacaataaacactatctgcgaacgagctcgttatctgactggtagccagtactccctcgccgaagctcttctcgttaaggggcctgatacggtcaaagcatttaaagctgacagtagaaagcaattctgttcaaggcttgtggtgcaatgctatctggctgcaaatattgagttagtaaacgacccaagattctgttctccggctgatatagaacgtagtgaattactggaagtcattcctcatacggtgtatgaagcctcagaaagtgaagttgcgcacgttaagggaccttcagcacacagccagcattcagctgatactgttaattatgtgaaaacagcattagacgtactgaagagctatggagtaaaaacaataggctcatcagatggtgaaatagtagtcactaccctgagcgatatcactaccgcggtatacgaaaacaggaatgcacctggtctggatgaacagatgactgaagttatggtttcatctggttacctcagccatattgagaacgaccggatgaacaatcctttcagatatgatcctatcttgtttaaagatactgttgaaaaagctgcaaatggtgatctgcatgagcttactgaaattctgagagttgaactaaacaaagaacttaaggttatcgatagtcgcattaaatattatcaagctgcaaggtggaatctaaaatccggtttgagtttttctcaagctgaatttcgcattccaaatggtctattgaaggctatgctggagagattgcttgttatagataaatacctcgaatccaaaaagggactgctagatgttggggatatgaatacttattgtaaggctgccatacaaaagattgtcacagctgcgcctgaattgtag

SEQ ID NO: 445962 - DNA, 630 bp, Serratia marcescens; identical to SEQ ID NO: 170735

SEQ ID NO: 445963 - DNA, 972 bp, Serratia marcescens
atgaagattttttgtgatgatggttctacagccgtaaaacttgcttggtacgataacgataaattgaatatgtctttgtcatctaactcttttagatctggctggaaggttgaggggatggggatgcgtcagacctttaactatgagttagacggcaagaagtacacttatgacgaagttagcaatgaatccatccgtactactcatattgagtatcaatataccgacctaaatgtcctggctgtacaccatgctctcctcaatagtggtttgaagccgcagacggtatctctgacagtaactctccctataagtgagtactatacgaaagagtgtcaaaagaacgagctgaacatacaacgtaagattgccaatttgatgcgtaaggtaaagttgaacaagggtgaggtgtttactattgaacacgttgaagttatgccagagtctctgcctgctgtatttgcgcgtttggtaaaagacaatgtcggccagtatgaaaagtctctggtgatcgacctcggcggcacgactcttgacgttggtgttatcgttggtcaattcgactctgtcagcgcaatacatggtaactctgagattggcgtatcgctggtaacgaatgctgcactcacggctttaaaaatggcgtccagcaacacaagtgcaatggttgctgatgaactcatcaaacagcgcaataaccctgactttgtccgtcaggtcataaatgatgaaaacaagacagcattagtgctggacacaatcgagagcgcaatcgcttctttgagcgcacaggttgtcgatgacctggcaggcttccgggatgtgaaccgggtatatatcgttggtggtggcgcgccactgatcgaggatgctgttaaaactgcatggcatcacctgggctcaaaagttgtaatgatgcactccccgcaaacatcccttgtggaatccattgcggcatttaaaggggagtag

SEQ ID NO: 445964 - DNA, 1275 bp, Serratia marcescens
atgtttgccctggctgacgtcaacagtttctacgcctcctgtgagaaggtgttccgccccgaccttaaagaccgcccggtcattgtgctcagcaacaatgacggatgcgtcatcgcgcgcagcgctgaggcaaaagccctcaatatcccgatgggagagccctggtttaagctgaaggccacggctgaaaaatcaggcgtggtggtgttctccagcaattattccctgtaccactcgatgtcggagagggttatgcgctgcctcgaggccctctccccccgcgtggagcagtacagcatcgacgagatgtttctcgacgtcgccggcatcgacagctgcgtgacgtttgaggacttcggtcgtcagctgcgcgaatatgttcaccgccatacggccctgaccatcggcgtcggcatggggccgaccaaaacgctggccaaaagcgcgcagtgggcgtcaaagcagtggcgccagttcggtggcgtactggccatcaccccggataatccacgccggacagcaaaattgctcgccttgcagccagtggaagaagtctggggcgtgggcagaaaattatcaggtaagctgaacataatggggataagcaccgcgctgcagctggcgcagacaagcccgtcattcatccggaagcatttcagcgtggtgctggagaggacggtcagggagcttcatggcgaaagctgcatcagtctggaagaagcgcctccggcgaaacagcagattgtctgcagccggagctttggcgaacgtgtttcggacttcttcgcgctgcgtgaggccgtctgcagctatgcagaacgggcggctgagaagctgcgcggcgagcggcagttctgtcggcatataggggtgtttgtgaaaacctcaccgtttgccgcaaacgagccgtattacagcaatatggcgagcgaaagcctggtggtaccgacgaaggatacccgggatatcatcgccgccgccgtgcgggcgctgaaccgtatctgggctccgggtcatcgttatgccaaagcaggcgtgatgctgaacgacttcacgccagtgggcgttacgcaactgagcctgttcgatgacgcacggccacgggaaaacagcgaagccctgatgaaagtcgtggacggtattaaccattcagggctggggaaagtgtggtttgcgggacgaggtatcacgcctgactggcaaatgaaaagagaaatgctttccccagcatatactacacgctggggtgacatccccgtcgccaggatcagctga

SEQ ID NO: 445965 - DNA, 447 bp, Serratia marcescens
atgcgtacagagcctcacttctcaccgaccgtgctgcaggtgcatccgcagacaccaacccggctggccattccccttttttccgaggcgtgtccggccggctttccaagcccggcaggggattacgttgagcaggagcttgacctcaacaccctgtgtatccggcacccttccgccacctactttctgcgcgccagcggagaaagcatgcgcgatatcgggctgcacgacggtgatatcctgattgtcgaccgcgccgaaaccgcacaggaaggggatatcgttatcgcggaaatggacggggggtttaccgtcaaacgtctgaggctgcgaccccgcccggcactggagcccatgaatccggattatccgacgctgtaccctgaaaccctctccctgttcggggtggtgacgcacttcattcaccggacccgggcgcgcctttaa

SEQ ID NO: 445966 - DNA, 246 bp, Serratia marcescens
atgctacaggtttcagtacgtttttctccggaacaggtaaaggccatgcccgccggggcatttgccgctctacagcaggaaattgagcgacgcctgacgccacattatccgtcactgtggctcaacgtcagcaagggatcacagagcagcctgagcgttagcggcgcccgaaatgaccgggagaaggctgacgtcatggaagcgctggaggctatctggctcgacgacagctggctgcctctgtaa

SEQ ID NO: 445967 - DNA, 234 bp, Serratia marcescens
atgaaaaaacgcatgaccgtgaaagcctttataaacaggctgtcgcagtaccccgacgacgcgctgtgctgcggcacgttctggctggccgatgattttctctcactggacggctcgctcacggacggcgacatcgatgcagcgatggagcgggcgcaggacagccatgatgcgaatgacggatttaactggagccacctgcaggcggctattgatgaggtaaaacgtgtatga

SEQ ID NO: 445968 - DNA, 336 bp, Serratia marcescens
atgaatacctggctggtcggctttgccgttgaaatcagcggcgtggaaatgatggtgcaccacatgatatcagcaaccggcctggcgcaggctgaatcgggcgcgatacagatgggcaggacgtggtgggacagtctgctgcgcgaggatggccgtcaccgctggcaatatccggatggcgtggtctggtttaacagcatcatcctgctcgatgacgtggagaactgtatcctgcgcggactgaagtttctggatacgtgggcagtaaccggcgtaacggatacgcccaccctctgcgatgagtacggtaatgactggcgggatatcacccgctga

SEQ ID NO: 445969 - DNA, 702 bp, Serratia marcescens
atgtccagattcattctcggggactgtactgacgtgatgcgcggatttcccgaccgcgccgttgaccttattgtgaccgatccgccttacctcgtcggctttaaggaccgttcaggccgccagattgccggcgacgtcaccgatgaatggctggagcctgccacccttgagatgtaccgcgtgctgaaaaaagacgcgctgatggtcagcttctacggctggaaccgcgtggaccgctttatggccgcatggaaagcggcgggattctacgctgtcggccagattgtttttaccaaaacctacgcttcaaaccgccgctgcgcgaaggggcgtcgcggatttgtggattaccgccatgaaggggcgtacgtgctcgccaaggggcggccgacgccgcctgaaaaaccgctgccggacgtgctgcccttcccgtacacgggcaatccgctacatccgacccagaagccggtggaggcgctccagccgctgattgagtcattcagcgccccgggcgcgattgtgctcgacccgttcgcagggagtgcctcgacctgcgtcgccgcataccgcgccggacgccgctatatcggcatcgaaatgctggagcagtaccaccgggccggcaccgaacggctggccgcgatgcgccgcgccgtgaacaccccggcggcgaacgacgactggctgccggaggccgcctga

SEQ ID NO: 445970 - DNA, 222 bp, Serratia marcescens
atgaactacgacggacacgatgggctgcggcgcgatatcgccggactggcgaacggcatgtgcgacctgaaaaccaccctgaacgtgctggaagaacggtatcactggcagcacgacggactgccggaacggctggctggcgtgagcctgcgtcgtatccgcgccctgatggacgaggctttcaatatcgccctgttgcttgacgaatcctttaaagactga

SEQ ID NO: 445971 - DNA, 411 bp, Serratia marcescens
atgctgtacggcacacgaaaagagctgaacaaaaagctgaaacgcatgtttggcaacgaggagcgcattgccctgctggtctggacgaagcaggacgttatggcgcaggtggaaaatatgacggaggccgaagccgacgccgtgcttgagcttatcgggcgcgcggggacgggagagcataccgaaggcggcgtgtcgttccgcaccgttcaggcgctgtatgccgggattggcacgaacaccccgcgcgtgagcgtccccgccgatacgctggcgcgtatcacggatattgccgcaagggctatcagcggggaagacgcacaggcgtggccccttgtgcgacagcactacccgagcgttgccgacgctcagaaagatattgcctggctggaaaacgaaatcgccgcataa

SEQ ID NO: 445972 - DNA, 762 bp, Serratia marcescens
atgagaaatgacaccctgaacgcgctgatactgcgccacggcgaccggatgctacaggatgcgggctggccgccctgcgtggatatgatgcccgtcgcgcccgaacagatgcccggctggcttgtcgcctgcggctcgctcgatgccgcgcaaatcctggcgctggtcacgcatctttgccagccgctgacgtatggccgggcggcgctgctgaccgccagcgcccggcggctggcgggaacacctgcccggttgcacctgtaccccgcgaaacgcgatacacccccggagcgcctggccgatgccatgacgattcacctgccgtttgcgcaggaatggctgaccgcggcggaatgtgacgacctgctggccttcctcagaggcagcattgatgcgatttgcaatatcgtccgggaggacgcccgccgcctggccgccgcgctcaaaccctccttcatgccgcgactgatggacaggcgcttcggcgactggcgcattctcgccgacgagtacgaccacgaaaactggctcgatgaggacgacgcggaacaggtggatgccgtccttgacgcggtactggtgcgcggggctcggttctgcccggtgctgctcaccgtggttaacgagcgggaagaagatattaaggccgcaggcgttatcacagacgtgctgcggttccccggcgaccccgcacgccgctggattgaccgccgcgtcctgcgtgaggtcatgagcgaggcccgggcgatgcccgcgcagtaa

SEQ ID NO: 445973 - DNA, 432 bp, Serratia marcescens
atgttacgcacgcacacctgccagaccgtttcccccgtcgcccgcgaggcgcgtttttccttcctgcccgtcctgtttggcgcggactacctgaccgccgaagcctgcatttacgcctatgccgctaaatacattcgtgactatgacggcggcgagtggacgtttaacaccctcccgcagggggcgggctatctcgccccagatgaagaccgcgtgacggtatttaaccccgataacggctttgagggggaaatgtcgggcgacgcggcggggattgtcgtcaccgcgctggtacttaatcaccggagctggatgcacgaccaccacgacgagcgggacgcctgccgccactacatccgccgttatgagcagctcatgagcattgtggccacccaccgcgaaagccgcgccatttatcgcgcccttgactga

SEQ ID NO: 445974 - DNA, 399 bp, Serratia marcescens
atgatgtacggaaccgtcagtgaaatctgcattgcgctgctgaaaacgcacgaaaacaacgaaaaaatcgccgttatcacctggacggaggaggacgtgcgcgaggccggcgcggaatataaccccaccatcacagaaacggcgcgagtgcttcaggctatcggggaggccgactgcgacatcatgtatcgctacggcatcggtcaggactttgtttcgggggaactgcgtcagattgccgcagagcgcgcgccgcgtcagatagccattcctgaaaacgaacttcgcttactgctgccactgatagaaaggggaatgagccacgtcgatgacttatccggtgaggcttgcgccgcagtggaaacgctgcaactggtgctcggctcaccctctgcgtaa

SEQ ID NO: 445975 - DNA, 228 bp, Serratia marcescens
atgcaggctcaggcaatgcggacgtatcagattgcgtttaccggacgggatgaaaagggcgttttgccgatgtttacccgcgtacgggccaccacggggaaaggggctgtcagggcgtttatcgcgcgctacagacccgtcagcggctggcttttgggcgaccccgaagacattaccgacaagctgaataaggaggcaaaagaagcagaaagtgtatcgcagaaatga

SEQ ID NO: 445976 - DNA, 231 bp, Serratia marcescens
atgtcagtaagtattgtttcaccttccgcagaggctgtaaagccccgccgccattcgcgcataccccgtgcagatattcctgcaccggatatcgatcctgccctgaaggctttcgggcggcatattgcccgcagcctgcgcaaggggcgcggcgtgcacatccccgcgatgaaaaatgctgcctttgggcaggtgctccgcacgctggaactgacgcgcgcatttaactga

SEQ ID NO: 445977 - DNA, 876 bp, Serratia marcescens
atgacacagaccaccacacgggcactcagcgcagacgttcagacgcacggcgacgcgggcgacatcatcccgtccgtacccgtcgggcgcattgtcgcgcagcgtaacagcggcgtgacggcgtttctggaggggattgccctgatacgcgaagcgcagaccacgctggcggaggcttccgggcgaagctggtttgccgggttatcgcagatcgtcgaaagcagcctgtgcagcgaccgcagcgaacagcggaatgccgccattcgccggcgtatctgccgcattgccgaccgggatatctggacgcggctgatgaatgaaacgggcatgttcacgctgatgagcgaggcgcagcgcaaacagtgggatacgcagctgtacagcgacgactgccccgaaatatccctggacaatgtgatcgccacgttccgggcgctgaatgccagtaaaggggcgacgtttgagcagggcgttatcgacgtgttccgcaatctgtcatgggactacaaaaccaataccccgtgcctgctgggaaagcgcatcatcattgatggcgtcctggacaaccatcgcgggctgtatttttccgtgcgcacgtatgcgcagagccggatcaacgatcttgcccgcccgttctggattctggacgggaagaatgtccctgattttcgcgtgtcggagggggccgggctgagtgagtttatcagtcggggcggggcgaacagcgtgggtgaagtgtttacctgcgaatacttcacgattcgggcatacaaaaaaggctccgcgcatatcacgtttacgcgacctgacctggtggaaaaggtgaacgacattatcgcccggcactatccgggggcgctgccgccaaaagtctga

SEQ ID NO: 445978 - DNA, 231 bp, Serratia marcescens
atgagtgaggcggtggcggttttacccgacgacacctttacccgcgaacaggccgaggccgttgcggcgcagtacatcaacgtggcaattgaggacgatcagggggcgcattttcgcctggttgtccgtaaggacggcgagatggtctggcgcacgtggaactttgagccgggcggcacgtactggctcaaccgttatatcgcggactacggcatccgcaagccacagtaa

SEQ ID NO: 445979 - DNA, 324 bp, Serratia marcescens
atgaagtggcggtactcgctgcgctggaagcgtcccggtccctgtcccggtgaacctgaactggcgtcagaagtggtggaggcggggaaacccgcccctgagtccgtgatgtcactgtgggtggcaggagccggatatgccgtctgcgtggattttctgtgtgacagacagatcaggcgctggagtgatgagcgcaagggggccacccgtcgccggaatctggcgcgtcgtgttaacaggatcgcgcccctgtttgctgatgagctgattgagcgggaactgacggcacggcctgaatattttcggggaaagtcgcctcactga

SEQ ID NO: 445980 - DNA, 477 bp, Serratia marcescens
atgaaactgattgctcttacgtttttaatgttgtctttttctggaatgttgaacgctgctgattgttttgatctggcaggaagggattatcatatagatccggatctgcttcgggcaatctcctggaatgaatcgaacttccgcacagacgttaaaggctacaatcctgtttcgggctttggctccggacttatgcaggtggactcccagcactttaacgaactggctcgttatggaataaagccggagcaccttatttccgatccgtgtatgaatatctacaccggggcttactatcttgcaattgcattcaaaaagtggggagtcagctggcaggccgtgggcgcttataatgcaggtttcaggaaaacagaagaacaggcgcagagaagatatgtctatgccagaaaaattgaggcaacatatcgggcgattaagaataataaaaaagcagcgcagactcttgcaaaacaataa

SEQ ID NO: 445981 - DNA, 288 bp, Serratia marcescens
atgcaaatagagaaacaggcgaaaaccaccgctgacaataaaactcctgttcgtttggattatgtagactcgatacgaggaattgcggcgataagtgtagttattgcccattttctggtgccgatttacggttacgataagtatattttttcccatgtttttgatgtcggtaaaataggtgtcgtattattttttattatcagcgggtttatcattccctttagttttcgtcgtgaaaacggcggtgttcaagccttcttcggtgatgctgccaacttactgatttag

SEQ ID NO: 445982 - DNA, 894 bp, Serratia marcescens; identical to SEQ ID NO: 384727

SEQ ID NO: 445983 - DNA, 327 bp, Serratia marcescens; identical to SEQ ID NO: 118044

SEQ ID NO: 445984 - DNA, 378 bp, Serratia marcescens
atggacgaacagtggggctacgtcggggctaaatcacgtcagcgctggttattttacgcctatgacaggatgcgcaggacggtggtggcacacgtctttggtgagcgtactctggccacactggagcgtcttctggagctgctgtcggtctttgatgtggtggtatggatgacggatggctggccgctttatgaatcacgcctgaagggaaagctgcacgttatcagcaagcgttacactcagcgcattgagcgacataacctgaatctgagacaacatctggcaaggctgggacggaagtcactgtcgttctcaaaatcggtggagctgcatgacaaggtcatcgggcattatctgaacataaaacactatcagtaa

SEQ ID NO: 445985 - DNA, 1557 bp, Serratia marcescens; identical to SEQ ID NO: 105522

SEQ ID NO: 445986 - DNA, 1638 bp, Serratia marcescens
atgtcgcaaaatgctttacttgaagagaagattatccgcttagttctgtctgagctgggccaccctgttgaaggtgagcggcttttacttctatcgcaggacccatcccttaccgaagaaattatgcggcttaaagagcggattgagagccttgcacagggtttatctgcgcgggttagcgaaggtgataacgacgcagagattgccgcctcgtcagcatccagtctttccgatcagcaacaaacggtcgtaagtgttgctgataacccgggcattgacgctaccgatacatcagcactgcaacccctgccagaaaatgagcctcatcctccgttctggaagctgatgccttattacgaatttgataaaccagcacagagggaagacgaaaacctgtcttccctggtattaaaacccgggcagataccgacaggccagcagcgggccagcttagctgtgccacctgccgttcccccgagagctaaaataacgatccccaacgcccgcgcaggcgaacgtttctcttcgccggttgctatcgttctgggtgagggccagcaggctactgtcagggacgttgtctttccccggaacattggcctgtcttttgacaaagaacaggagttgctgacaggtactcccaccgaaagcggcgatatagagctttcagtaatctggtcatgcacgtcgcacgacgaatgtgaaacaaaacagctatttataatcaatcccgatccgagaagcctgtggaaggtggtagagccaccagcagacgctccctaccctaagtcccatctggacgctgctggcctggtcaggggtgatatacgtattgctgccgccagtcgccggggacgctctcatgagcatgccggaagcttcagagatgacgacttctacatcaaccactgccaggaaacaggatggtctgtcatgctggtcgcagacggagccggtagtgcggtaaattcccgggaaggctcccggattgcagtcaaaacggctggcgattaccttttaaatcagctcagtggtgtgaaaggcgtccatttaaagcagcacatcacggcgtgggaagggagcgatcagcaggcaacaataaacgccatgcttcatcattttaaacaggcagctacgctcgcggtcaacagtatccagaacgaagccatttgtgcagaacaacctgtgaaatcctattcaacaacccttctggcaactgtagcgctacgaactgataacgagctgtttgcgactgcattctggcttggtgatggtgcgataggtgcatacagcccttccggtaaagtcaggatactgggaaatcccgatagcggagaatacgcaggacaaacccgtttccttgaccagagcattatcgcagacccctcgtttagcggccgcatcagcgtgggtaaatggaatgatgtatctcacttgatcctcatgacagacggcgtctcagaccctctgtttgagacggataatgggcttcgcagtgacgaaaaatggacccgtctcgttgatgagctcaaccctgtccttacagacgccagtattgcgcctgagaggttaggcgactggcttaactttttctccacagggaaccatgatgaccgcactattgcggtgttgtggtaa

SEQ ID NO: 445987 - DNA, 1041 bp, Serratia marcescens; identical to SEQ ID NO: 105524

SEQ ID NO: 445988 - DNA, 639 bp, Serratia marcescens; identical to SEQ ID NO: 105525

SEQ ID NO: 445989 - DNA, 642 bp, Serratia marcescens; identical to SEQ ID NO: 105526

SEQ ID NO: 445990 - DNA, 639 bp, Serratia marcescens; identical to SEQ ID NO: 105527

SEQ ID NO: 445991 - DNA, 468 bp, Serratia marcescens; identical to SEQ ID NO: 105529

SEQ ID NO: 445992 - DNA, 1209 bp, Serratia marcescens; identical to SEQ ID NO: 105530

SEQ ID NO: 445993 - DNA, 912 bp, Serratia marcescens
atgcctgcaacacgggaagatattgctgatgccgtcctgcacgggaaaatcccgggtttgcgctctctggtgatttgcctggaggatgctgtcagtgaagcagacatccccatcgccctcaaaaatctggagcacctgctgcacgagctcagtaacagcatgcgtagcctgggtaaaaatgactggcctctggtgttcattcgccctcggcatgccgaaatgggcagatggttaaaagcgcattatgatctttccgctgtcgatgggtttgtgttgccgaaatttaccctcagttcgttagctgaatggtgggatatcatgggcgggactcacctgtgcatgatgccaacgctggaaacagaagacgtctttgacgtggttcagatgcgcgagctggccactcgcctggtggaacatccctgccacgaccgcattattgcgcttcgaatcggcggcaacgatcttatgaacgttgtgtcgcttcgccgcccccgggacctgacgctgtatgacagcccgatgggctacgtcatcaaaatgctcgtttcagtcttcggcccgcgtgattttgccctgaccgcgcccgtatgtgagcatattgacgatcatgccgttatggccagagagctggctcttgatatggcacatgggcttgttgggaaaacggccattcacccgggtcagatagaggtcattcaaaacgcgctgatggtcactcagggtgagtattctgacgctctgcggatcctgaactctacccaggccgtgtttaagtcgcagggagcaatgtgtgaacccgccacacatcgccgctgggcggctggcattctggacagagctcgtttttatgggttacagaacgagcaaagcgctgatggaatcagattacttaccgtgacccagcatcattaa

SEQ ID NO: 445994 - DNA, 1080 bp, Serratia marcescens; identical to SEQ ID NO: 105532

SEQ ID NO: 445995 - DNA, 774 bp, Serratia marcescens; identical to SEQ ID NO: 105533

SEQ ID NO: 445996 - DNA, 1143 bp, Serratia marcescens; identical to SEQ ID NO: 105534

SEQ ID NO: 445997 - DNA, 1059 bp, Serratia marcescens; identical to SEQ ID NO: 105535

SEQ ID NO: 445998 - DNA, 582 bp, Serratia marcescens; identical to SEQ ID NO: 105536

SEQ ID NO: 445999 - DNA, 1158 bp, Serratia marcescens; identical to SEQ ID NO: 105537

SEQ ID NO: 446000 - DNA, 456 bp, Serratia marcescens; identical to SEQ ID NO: 118149

SEQ ID NO: 446001 - DNA, 1041 bp, Serratia marcescens; identical to SEQ ID NO: 118150

SEQ ID NO: 446002 - DNA, 579 bp, Serratia marcescens; identical to SEQ ID NO: 118151

SEQ ID NO: 446003 - DNA, 576 bp, Serratia marcescens; identical to SEQ ID NO: 105538

SEQ ID NO: 446004 - DNA, 456 bp, Serratia marcescens; identical to SEQ ID NO: 31745

SEQ ID NO: 446005 - DNA, 840 bp, Serratia marcescens
atgctcgcgactcacgaatacgccaacgacttgattctgtttgccctgattgtcgactgcggctcgttcagcaaggcggcggagagcgccggcattaccagttcggtggtgagcaaacgcatcgggcggttggaaaaatcgctcggcgcccggctgatgtaccgcaccacccgcagcctgacgctgaccgaaagcggccaggcgctctaccagcaggccaaggagatcggcgccaaagtgcaggaagcgctgtacgccgtcagcgaaaagagcgaagagctgaccggcaccattcgtatgtcggtgccgaccatttcgggtgagctgctgctgagtgaaagcgtggcggagttttgcgcccagcaccccagcctgaaggtcgagatgcggctggaaaaccgcttcgtcgatctggtggaagaaggcatcgatctggcgatccgtaccggcaccatgccggactccagcctgattgcgcggccgatcttcgattcccgctgggtgatcgtctgctcgccgggctatctggagaaccacccggagccgcgcaatcccgacgatctgcttagccacaactgcctgacctatacctatcaagagagcggcaccgccaactggctgatgaagcggccagggcgcaacgaaatctacgagctgcaggttgacggcaacctgtcggccaacaatgcgcgggcgatccgcaaagcggtaatcggcggccatggcatcgccatggtgccgcgctgcatggtgtacgaagatttgcaggacggcaaactgacggagatcctggccggccactgcggcaaggtattgggcatttacgccgtctacccatag

SEQ ID NO: 446006 - DNA, 2118 bp, Serratia marcescens
atggaaaacaccctccctacgccggtcttgcagagcgaaatcaatgagtgcgggctggcctgcatcgccatgctggcggaaacgcagggcgttcgcgcgccattgacggaactgcgtgagcgttaccccgcttcgcaacacggcacttcgctggcgacgctgtgcgccattttaggggagctggcgttgccggcttatccggtggcgttcgagcaccgggatctggcggcgctgcctttaccggcgattctgcattacggcgcgggccactatgtattgctggcatatcgtcagggcggttacgtgtgcgtaatgaatccggcgttggggcaacagctgctgccgtacgccgctttgaaagcggaaatcagcggctacgcattggtgctcgatcgcgacgatttaccgtccaccccccccgccgcgcggagccaccgacgcggtgctttcgccagtttaagcctgaaggataccgccggcatcgccggcatttatcgcctggcggcgatgacgtttcttatctcgctgacgctgttcatcatgccgatgatggtcgccagcgcgatcaatcaggtgttcgccatggccggtgaggtcgcgtttccttacgcctactatctgctggcgtttgtggcatccacggcgctggccctgatggcgcgcatcatcaccgagcgttttatcaaaaacttcgtgttgctgcacggcgccgccgggttttcccgcctgctggaaaattcgctgaatttcttcagcaagcgcgcgcccggcgagattttcagtcgtttcaccagctggcagatggccgccggccagaaaatcgagctggataacggcctgcgcaccgactggatcatcgctgctatcgcgctggcggtgatgggctatttgagcccgatgttggcgctggtgccgattgccggcgtactgctgatgggggcgagcagcgtttgggccatttatcgcgatcgccacttcacccagcagctgcaggtgagaggggcggcgcagaatgattttattctggaaaccattcaggggttttcgaccatcaagtccgccgggctcgccggccagcggcaagagggctttgccgagcatgcccgttcgctgttcaactgcctgcagcggcaaaaagtctatgagcaggtcaagggcagcatttatcaactgattggcagcctggaaatggtggtgttcatgctgctggcgctgccgctgctaaagggtggcgaactcagtctgggggcattcttcgcctacagctttctgcgcgaaatttttacctcttacaccagcaagatcttttttgccgtcctgcagaaaaaccaactgcacgtgatcgatgagcgcgcgcgggatctgtttcctgccgtatctctgcgtactgggtctggcgacgaaagcgtgaaccattttgatgtgcagttggcgtatcggggggtgagcttcgcgtacgacgccggccaaccggttttgcgcgacctgtcgctgacgctggaacggggcgagtgtatcgccatctgcggcggttccggcgcgggcaagagcaccttgctgaaggtgctcgcctgtctgttgacgccgcagcggggggaactgacgctggatggccgcgtgctggctaacgccgccgcgcagcggctgttcttcctgcaaagccaggaggacattctgttcaatgcctcggtgttgcaaaacgtcacgctgttcgccccgtcggcgccgggccagcagagacaagtggaacaggcgctatgcagtttggggctggcggatgcggtggcgcagctgcccggaggcgtgaacgctctggtgcgagagagccatgccgggctgtcgctggggcaacggcagcgtctgttgctggcgcgtgccatgtacagccgttgtccggtgttggtgctggatgaaccgacggcgaatctggatgaaaaaaccgctgcggcggtgatgtcggctctggtagcgcattgccgtgagaagggtaaaaccttggtgaccgtgacgcataacccgcggctgctgccgttgtttgatcgggtgctgcacttgtcgcagggccggttgttggccgccgtcgacaccaggatgaatgactgtgctgaggtggagtga

SEQ ID NO: 446007 - DNA, 318 bp, Serratia marcescens
atgattttaaataagcttaccgcttcactgtccccgatagtgaacgggatgctggcggtgctggcttttgtgcaacagaaacaactggtgctggcattattagcggggctgacgatgccgttttttgcatcaatgaaaagcgatgaacggcagaaagccccgttatggaaaaggttgattatcgctttttccctgctgtgttttctctctggcacactggccccgatagttatcggatccttccagtggctgtataagaccagactcaccagtgataatacggtactggtctggtcggtgatgctgccaacttactga

SEQ ID NO: 446008 - DNA, 303 bp, Serratia marcescens; identical to SEQ ID NO: 445440

SEQ ID NO: 446009 - DNA, 909 bp, Serratia marcescens
atggcagtgagttctaaggaactgatgagctggagtaaccaggaggggcgtgacaaggttcgagacgtagaagtagtttatatctatcacgataccattgatgcgattggtgataaggctgcaactgaagagaaaacgtttgaagcctgtcgtagtgccattgaagagctaaaagatctcgttgggcgggtcatcaaccgtctaaacggcagccgagttgtgatcaccgctgaccatggcttcctcttccaacaaaaagtacttgtagcggctgacaaaacctcgttgaaaaccaaacctgctggcgcgatagaagccaagaaacgttatatcgttggtaataacttgccttcagatgaagcctgttggaaaggctcaataaacgatacggctcatggctctagtgataccgagttcctgcttccaaaagcggctcaacgcttccactttgttggtggtgccaagtttgtgcatggcggagcgatgctacaggaagtatgcgtcccggtactgcatgcgcgagagctgcaaaaagaacaagcagcaaaacatgagaaacaaccggtaggtgttgttgcagccactcagcccatcaaattagtaaacaatatcgacaaggtcagatttattcagacagaccctgtaggcgagcgttttgtcgcacggttgttggatgtctatatcgtcgatgcacaaggtaatgaagtatccagtcgtgaaacgattaactttgatagcgtgagtaaagttatggatgagcgtactcgcgaagctaggttaaagcttattggctctcagttcgacaggaacgctcaatacacattagttcttgagaatgcggaaatgagaacccgttatagccaatacgcggtaaccattgatttggcattccaagatgattttttctaa

SEQ ID NO: 446010 - DNA, 2076 bp, Serratia marcescens; identical to SEQ ID NO: 177146

SEQ ID NO: 446011 - DNA, 417 bp, Serratia marcescens; identical to SEQ ID NO: 177149

SEQ ID NO: 446012 - DNA, 351 bp, Serratia marcescens; identical to SEQ ID NO: 15282

SEQ ID NO: 446013 - DNA, 744 bp, Serratia marcescens; identical to SEQ ID NO: 15283

SEQ ID NO: 446014 - DNA, 678 bp, Serratia marcescens
atggatactcaagcactcttgccagctactaaaacgtttaaaaaacgcgccagtataaagcaatctaacgaattgaccgaagctgcatattacctgcctcttcaggcaaaacgtgtgctgtggttatgcctcatgcaggcctattttaatgacagccaggaagatgactctgacgtattgccgctcttcaaaatcagcgtttccgattacgtcaaatacttcaatgtcgctacgtctgtcgccagtcgtgatgtgaaggctggggtaaatgctctgggcgaatcaacggttaccttttatccaaaagaaggtgagtttgaagaagttaaacgtccgtggctggctgaagcaggaatgaagcgaggccggggttcctggcagattgaatttaactacaaggtcatgccattcctggtcggcttaacctcccagttcactacctattctctctatgactgtggccagcttaatagtgttcgtgtcatccggctttatgaaagcctgtgtcagttccggagcactggtgtctggatcaccacacatgactggttatgtgaaaggtttatgctccctgcctcgcagaaaaacaatattgctgaaatgaagcgtaccttcctggaacctgctctgaagaaaattaatgagaagacgggcactgttgcaaatagtcggtggtga

SEQ ID NO: 446015 - DNA, 801 bp, Serratia marcescens
gtggtgaatgtcggcgtccgcgattccacctatgtgctcgacggcctgctgtaccacgagtccgacctgcggatcgaggagcactacaccgacacggccggcttcaccgatcacgtctttgccctgatgcacctgctaggcttccgcttcgcgccgcgcatccgcgacctcggcgaaaccaagctgtacgtgccgcagggcgtgcaagcctacccgacgttgcgcccgctgatcggcggcaccctgaacatcaagcacgtgcgtgcccactgggacgacatcctgcgcctggccagctcgatcaagcagggcaccgtcaccgcctcgctgatgctgcgcaagctcggcagctacccgcgccagaacggactggccgtggccctgcgcgagctgggccggatcgagcgcacgctgttcatcctggactggctgcaaagtgttgaactgcgccgccgcgtgcatgccggcctgaacaaaggtgaggcgcgcaactcgctggccagggcggtgttcttcaaccgccttggggaaatcagggatcggagcttcgagcagcagcgctaccgggccagcggcctcaacctggtgacggcggctatcgtgctgtggaacacggtgtacctggaacgcgccacccaggggttggtcgaggccggcaagccggtggacggcgagctgctgcaattcctgtcgccgctgggctgggagcacatcaacctaaccggcgattacgtctggcggcagagccgcagactggaagacgggaagtttcggcccttacggatgcccggaaaaccttag

SEQ ID NO: 446016 - DNA, 387 bp, Serratia marcescens; identical to SEQ ID NO: 15296

SEQ ID NO: 446017 - DNA, 1113 bp, Serratia marcescens; identical to SEQ ID NO: 11536

SEQ ID NO: 446018 - DNA, 186 bp, Serratia marcescens
atgaaacgaccaacactgaaagaatgggatgttgttgatcatcttgatagcaaagaagaaatcctgttgtatctggaagaggtttttaacgagaatgatctggcatttgagcttaaggcgctggatgatgcaaagcgggcacttgaaagactctatggcaacgtcaagccatcatcatcatcgtag

SEQ ID NO: 446019 - DNA, 270 bp, Serratia marcescens
atgtcagatgagataatcatcaagacaaaatattgcaatcccaatatgagctttggtagccctgacggatgcgatgaagtgactttgaaattacctaagtcagaagttgcaaaattacagtcttcggtagtttctcaggataagcctgttcccgatattgattattcagtcgcggcgcaattctgggggctggcttttacgacaacctttttcctgtggctctttgcaaagggaataggtgaaattcttaaacacgtaagaaatgcataa

SEQ ID NO: 446020 - DNA, 1173 bp, Serratia marcescens
atgcaactgactgaaagaaatgtgaaaattgactatctggccttcaccatgcctttctgttctctcaagtcgctggaaacttacccgcatgggctgaatgagtggcgtaagtacggcatgtatccgacatttcataatcatgtatctcataaagatgcttttttcaccgatgtgattaaaggcggtaaatggtgtccgtcagacgatgaacttaatgaacaggttgaaagttacagtacttgctcaaaaaatgaacttgaacaaaaaataaacgacctgaacagggaaatttatttagcgcgcatgcatcgccttaaattgtggctttccgcagtctttggacttcatcttggccctgaacgggacaggggcggctataactatgaccgttccgcacctctgtattcggttgatggcggctatgaacatcttggaatggtgttttggggcggtaataacgacacaatttatattcaggtcagcggggaaggttgtactcatgtttttaatggtacgtctccgcatgaaatctataactggctcaatcatcttgatgtaacgatgctgaagcgtatcgatcttgcggttgatgattttgacggtgtgtttactgtttctgccgccatgcgggatcataaatgtgaagcgttttatggtgggaaggggccaaaaccgggacttggtatttctcacaaatatcatggagatggttctttacagcaggaaatgatcactgttggttctcgtgagtctcgcgtttactggcgcatttataataaggcgcttgaacagaaagttgatgatgtctggcatcgttctgaggctgaacttaaaggcttcccgcttgaggtattactggacatagaaggaacttttactggtctctgtgaatacgcgcaacagataaatccagccagcccgaaaacttttcaacgctctggtgttatccggattgcgattaatagctttgagtctgacgttcgctggcttcgtaagcaggcatcgaaaaccattgccagaatttttcatcaacttggtaatgattatgaggctgtattttcatctattgttcgaaaagaacatatggatgatttaacaattaaattcaggacacctgatatttatcaaaatattgtagctcagaagttttacaaccgtgaatgtgcattctaa

SEQ ID NO: 446021 - DNA, 198 bp, Serratia marcescens
atgcagatcatctacttcgactacacgccaaattttggagtcaacgccagcgttggcggggagtgggatttttaccgttcctttgatgaactggtagatgagtgcactggcttctatggtgatgattttcttttagtctctgtggtgttgcattctggctctttcgtgggttacagggagtcactgtcatgcaactga

SEQ ID NO: 446022 - DNA, 201 bp, Serratia marcescens
atgagcagaaaaaacataggaataagtaacgagcgatacttgcgtatagagcgtgccgccgtagacatcacagcaaagacaggaaaagttacgaagtggtcagatatagtcaattatctgatagatcagtatttaaacgatgcaaaacatgacatggtttcaaaaaacgagatcggacaaaaaaacaaacagcagagctga

SEQ ID NO: 446023 - DNA, 396 bp, Serratia marcescens
atgttaaacatccctatttcactatgcatttacacaggaccaacacaaaccaagtatgatgtaaaaactggcattaaggctgaagaggcgtataacgcattaaaaactgcgtatatcgttggaattaggaataaatctcaaaaaatactcgctgctggtatcttcatatccagcatagaagacaaaaaagatccaaagctagcagatgtggcttatgagatttttaaggcgcacaaaccaaccaagaagcttgttaaagatatctactcgttaccgattgcgagactaaagatcaacttagcgaatggcacaatacaagaggcattttcagatctagaaactgatatgttattcgctgatttctatatgaataatagcatcgatgggaaagcgtaa

SEQ ID NO: 446024 - DNA, 2085 bp, Serratia marcescens
atgcatacttctgtcgtagtagtccaactgataaccattaagcagatctgctttaagcttatcgttcccggccgtaagtatacagtcacagaaaatcatttctcatcagtcacacaaagtgacgacgaatctgagcatcgttacttcaaacaactttccgttgtaaagtttcctgaatacgtcaatttcggttgtatgtatgagttagtagttaactggatgcatggacgtaagacaattttcagcccatttatgatcactcagactgttcagtttgccgatccgctcaagttgtcaaaagaaaacgtccgctacaaagcaatcactaataaacaggcaagtataccttcagttgtcacattctgccctcgcctgcgggatatggataatgactacatggccgtaactcgcgagcttgaggatggcgcaaagcttttaagagggtatcttactttcactgttatgggtagtaatgccaattctgtgcagacagcagctaacgatctcaaatccttttacctcgaaagccgggtcaaagtagcagatgattcctttatcgttttcccgtcatttatgtcatgtctgccaatgtgcaatgacccaaagacaattttcgaccttgaccgttccgaagtagtgagcaacaccggagcggctcatatgacaccgatctttgggccctggaaaggtaatacagatagaccagtactgagtttagtttctcgtgaaggtcaactcatgggacttgatattttcaagacttctgcaagctataacatggttattggtgcaacgtcaggtgcagggaagtcattctggacagcatatctaatcaataactatcttggagctggaccgcgatctaataacctcgttcattatcgctcaacatttaagcattttttagaaaacgaatacccagatgatgatcctgacggtgctcaagtatttgttgtggacgtgggccgttcttaccaggggattgcggaacaatatacaaacagtcaatttattgatttcggtaaaacccctgacttcaccctaaatccctttgccttcctaactgacatcactgttaacgacgatgtatttaacgaagcacctgaatttaccggtgaatcaacttcaaacgatgcagaaaaagacaaagttgctcagaccataatggttttgaatcagctaaaaattatggcttcagagaaaggccttatcgatgattatcaacaatcagtgatgcttcagcttattgcagaagagtaccaagaatccagaaaatcaggtcggaccggttcaataaccggctttgctctgcgttgcaagaagcatgaagacaaacgtataaaggatattggggagcaactcggagcatggtgcgaaggtggaatttatgggcaccggtttaccgatacgttgcctccaatcaacttcgacagcagatttattgttttggaactggaggagctaaaaggcaccccccaccttcagacagttgtattaatgtctatcattcaggctgctcagcatgcaatgttcatcaaaaaagatgggcgtcgtcgcttgttcatccttgatgaagcatgggagtacattcgtcctgataattcatcaggtgccggaaatcaatcaaaccaattcttctcttccttcctcgaagcggcatggcgtaggttcaggaaaacaaactgcgctggcatctgtatcacacagtcgtttgaagattattttacttcttctgttggccgggccctgactgctaactcgccttggaagataatcatgaaacaagaaaaagaaagcattgaagcaatgaaggctaataaatatttttctacttcagatgcagaatatgaacgtatgaaaaatattcgtacagtcaaaaaggtgttttcagagatgttagtcaggttcgaaaacttccaagagatctgtcggttatacgtagaccggaaaatggagctttgttttactacggatagtgctgacaggagtaaattatgggaaattcaaagccgcgagaattgtagctatggcgaggcaatagaaattctctatgctcaagaagtagcagcgggtttggccgcgtag

SEQ ID NO: 446025 - DNA, 504 bp, Serratia marcescens
atgccgggcaaccgcccgcattatgggcgttggcctcaacacgattttacgtcacttaaaaaactcagaccgcagtcggtaacctcacgcatacaaccgggcagtgacgtcattgtctgcgcggaaatggacgaacagtggggctacgtcggggctaaatcacgtcagcgctggttattttacgcctatggcaggatgtgcaggacggtggtggcacgcgtctttggtgagcgtactctggccacgctggagcgtcttccgggcctgctgtcggcctttgaggtcgtggtatggatgacggatggctggccgctttatgaatcccgcctgaagggagaactgcacgttatcagcaagcgatatacgcagcgaattgagcggcataaccagaatctgaggcagcatctggcaaggctgggcaggaagtcactgtcgttctcaaaatcggtggcgctgcatgacaaagtcatcgggcattatctgaacataaaacactatcagtaa

SEQ ID NO: 446026 - DNA, 417 bp, Serratia marcescens; identical to SEQ ID NO: 15292

SEQ ID NO: 446027 - DNA, 603 bp, Serratia marcescens; identical to SEQ ID NO: 15291

SEQ ID NO: 446028 - DNA, 432 bp, Serratia marcescens; identical to SEQ ID NO: 15290

SEQ ID NO: 446029 - DNA, 1272 bp, Serratia marcescens
atgtttgccctggccgatgtgaacagcttctatgccagctgtgaacgtgttttccgcccggatttgaaaggaaagccgatagtcgtcctgagcaacaacgacgggaatgtaatcgctcgcagtgccgaggcgaagccctggatcaaaatggaaactccgtggtttcagataaaaaacgaaagatacccggaaaaaatatatgcgttttcaagtaactatgaactttatgcctcgatgttcgcgcgcgtgatgaacagcctggaggaactggcccccagagtggaacagtattcaattgatgagatgttcctcgatttgaccggcgtggagcactgtatggagcttgaggacttcggccggcagctgcgtcagcacgtgtatgactgtacccacctgaccattggcgtgggcgccggaccaacgaagaccctcgcaaaatcagcccagtgggcctcaaaagagtggaaacagtttcgtggcgtacttgctctgaccaggggaaatccgcagagaacgcggaaactgctttcactgcagccggttgaagaaatctggggggtgggtaaccgtattgcacgcaagctgaatgtactgggcattaagaccgcgctcgatctcgccctgacgaacccggccttcatccgcaaaaatttttctgtggtccttgagcgaacggtacgggaactgaacggggaaagctgcctttcgcttgaggaagcccctccgacgaaacagcaaattgtctgcagccgcagttttggcgtgaagatcacggagtacgagtcactccgtcaggctatctgtcagcacgcagagcgggcctctgaaaaactgcgtaaagagcaccagtattgccggcatatttccgttttcatcaaaacgtctccgttcgccattaaagagccttactacggcaacgtggctacggaaaaacttcttacacccactcaggacaccagggacatcattgcagccgctacaacggctctggagcgtatctggagggatgggcaccggtatgccaaagccggagttatgctgaatgacttcaccggctccggcgtttcgcagctgcagctgttcgacgaacgcccgccacgcccttacagtgctgagctgatgaaggttctggacgggatcaacaactcagggctgggtaaagtatggtttgcggggcggggtattgccccggaatggcagatgaaacgggagatgctttctcctgcttatacgacacgatggtcagatattccttcagcgaaactggcgtaa

SEQ ID NO: 446030 - DNA, 975 bp, Serratia marcescens; identical to SEQ ID NO: 15288

SEQ ID NO: 446031 - DNA, 1206 bp, Serratia marcescens; identical to SEQ ID NO: 120690

SEQ ID NO: 446032 - DNA, 1167 bp, Serratia marcescens
gtgcaggaaatcgaagtcctcgggttgcgcgagccgctgcgcttcggtgacgctctcggcgaaagcatcccaggacatgacggcctcgatggcggcgaacggatcgcggcccgcttgcttggcctcgatcagcgcctggccgatgcgcccgaacagccgcaccttggcattgatcgccttgccggatgcctggaactgctgctgatgcttgttcttggcggcattgaacagcttgcccaggatgcggtcatgcaggtcgatgatttcgtcggtgacggtggccatgccctcgatggcgagcgccaccagggtcgcgtaacgccgctgcggctcgaacttcgccaggtcggcgggcgtcatctggccgccctcgcgggcgatcttgagcagccggttctggtgaaccagccgctcgatgccggagggcaggtcgagcgcctgccacgccttgaggcgttcgatgtgttccagcatgtgccgcgagttcggtttgaccggggattgccgcagccaggccagccacgtcgtcttgccgttgtcgcggcgcttgagcagatcgtcgaggcgacggcgatgcacgtccgtcagcggctcagccaaggcgtcgtagagacgccggttggcgcgggtaatcgcttcggcgctcgcccgctcgacggcgttgagggcgggcacaatgaccgactgccgccgcaggtgctcgatcaaggctctggccagcacgatgcccttgtcggtttgcatggccagctcggtcagcaactggacagcctgccggtagtggccaatcgtgaacggctggaagccgaacaccgtttgcagctcgaccaggtgctcgcgtcgggtctgctcacgctgcccgtactcgtcccagctttcgatgccgaccttgagctggttggcgaccagtctcagcaatggcgggaacggtggctcatcagcgccaaggatgacgccgggaaagcgcaggtagcagagctgcaccgcgaagcccagccgattggccgggccgcgccgctgccggatgatggagaggtcgctttcgctgaacgtgtagtgacggatcaactcatccttggtgtccggcaacgccagcaggctttcgcgctcggcggcggagaggatcgaacggcggggcatgcggtttccttcttcttgaaaacgtag

SEQ ID NO: 446033 - DNA, 183 bp, Serratia marcescens
atgccggtgtcggtcatcaccagcttctgccagcgcggcttgatgaactcggtcggcgcgtcggtgggcaccttgcgggcgttgtcgctgttcatgctgcgcagcacctcgatggcgtcgagtacgtccttggcggcgggcgcggcccgcaacttgagcacgtcgagaaattccggcgcgtag

SEQ ID NO: 446034 - DNA, 573 bp, Serratia marcescens; identical to SEQ ID NO: 143279

SEQ ID NO: 446035 - DNA, 183 bp, Serratia marcescens
atgcttacatttattggtgtagtggtagtcgccgttattgcatttaaattatttatgcttttttttagttcatctgaatctgccgtcgaacgtgctacccgtaaatatatggagaacccgacgagagctaactataaaataatggtggctacacgcatgagaaatgagaagaaaagagggtga

SEQ ID NO: 446036 - DNA, 555 bp, Serratia marcescens
  misc_feature (498)..(507): n is a, c, g, or t
atgctgtctgataacccaacgcttatggttctcaaagatgggcaggtattaactaaacgagcacccgtatacttcctgaacgagattatcgttgcagctttccaggggcaggctggggttgctgacataaaatcagtaacaatagacaacaaagtagtttcgttaacacctacaaattataaaggtatttactacctgccggttggagacgatttagcagttaattcggatcacgagattactgtggtggctgaaaacctttatggaaaaaacgtaaatttcagtaccgtgttcacttatcaacctactggattcactcttaagaatctggaaaaaaacgtaactctttactcgcgcgtacgtcagtatacggacctgcttagtcaaacagctggtgataaatgcactctgtttaccacagaggaaaatgcgaatgcttacctcgcctggtatggggaaaaatcagatgttacagcatgctaccctcagtggaacaannnnnnnnnntccctgatgggttggagttctattttaaaggacgtaccccgggtctaa

SEQ ID NO: 446037 - DNA, 1881 bp, Serratia marcescens
atgtttccctctgataacaaggagctctgcttagcgacagcctggcgtctaattgaagatggacagaccgtacttatctactgcccacttcgccggagcgtcgaaccgtttgccgagacaattgtcgatctgcatcagcgcggactactgccatctttatttgatgctgccccggacattctggatacggctatctcgctgggagaagaatggttgggggcacacagcccgatacttgcctgcctacggttgggcgtggctcttcatcatggcgcattgcctacggcttaccgcaaagaaatcgaacgtttgctgcgagatggggtacttaaagtgacgatctcatcaccgacgctagcacaaggtcttaatctttcggcaacagctatcgtcatgcattctcttcatcggaatcgcgagcttatcaaagtgtccgagttcagaaacgtcataggcagagcagggcgcgcatatgtagatgttgaagggctggtgatttatccaatattcgataaattaaataaacgccagactaactggcataccctcacatctgacacgggggcccgtgagatggagagcggactaatacagcttgtctgtgtgttattgattcgcatgcatacacggcttggtggggatttaaaagcactcactgaatatgtgaccaacaacgccgtagcgtgggaatttccagaaattatgaccgaatctccgcaagaaagagatattgcgcaggccatctgggaaaaacaactttcaacgcttgatactgctattctgagccttcttggtgagaatgatatcccggatgaccagattgaaactgctcttgatgacattcttcagtcttcactttggcaacgcagtttgcagcgttatagggatgagaatgaacggattttgctgaaatcgggactcctgtcccgcagccgctacatctggcagcgctcaacggcatcagggcgccgggggtatttcctgtcgggggtaggacttacaaccgggctacgacttgatgctattgccgctaaggccaaccaactattgattgatgcgaatgcggctataatgggcggtgatgccgaagaggcaattgctgctatcacggcgctcgctgaagaggtctttatcttctatccgtttatacccgatccattgcctggcgactggagaggtattttacgttcctggctattgggtgaacccatgactaacgtcgcgaatacgcaggcgtctgaaacgcttcaattcgtcgagaatgggctggtgtatcgacttccgtgggcaatggaggctattagggtacgtgcaacagctaatggagacctcataggtgctacagataccacgctagacgattatgagttaggttttgcggttgctgctgttgaaacaggtaccttgagccgttcgtcttcactgcttattcaggcgggttttagctctaggcttgcagccataaaagtggttacagacactactgccgattttcaatccggccaggagcttagaaggtggctgaactctgaagaagtgataagccgcacggataatcatgactggcctacacctgaaaccagagtgatgtggctggaattcttgggtagtctcagccccaaaggcagccaggtttggagtcgtcatcgttataacggaatggtggactggagagatactccggcagtgatcggcacaccattgcagctttacactgttgatggtattcatcacgtactggctgatgatggcactcctctgggaagtataaatggcagaattaacacaaacagaagaggtcttcttagagttgaggtggatgatgagaatggtcgtgccatgttcgattatttaggaccggacgactttatttctacctga

SEQ ID NO: 446038 - DNA, 174 bp, Serratia marcescens
atgcagtgtttccggcagcagggactttacggtgcggacatcggtgcgcaattcgcgttcaagggtagtttttttaacaagatgtttctttattttgtccagttccggcgtgaatacccggcgaagcataatatgaaaaataattccggttacagtgaaagcaatccgtactga

SEQ ID NO: 446039 - DNA, 201 bp, Serratia marcescens; identical to SEQ ID NO: 31764

SEQ ID NO: 446040 - DNA, 216 bp, Serratia marcescens
atgcctctactgattttgttttgggatgccaaaaaattagggcttgcattcattctggttgcatttgggaatatcttcgaatgcttcgggttattaattgttgctggcaattggtattcttcagcgattacgcagttcgaagtcgtgagcatgatcaatgctgtaattgcgttgaagcctaagcccttttttttaatcatcacttgttacctgtag

SEQ ID NO: 446041 - DNA, 1074 bp, Serratia marcescens
atgagagctgccaccgctacgaagccaaaaaaaattgatgcctaccgtaaggagccatcagtaaataaaaagtatttgccctattcttatcacctcaatgattacgtgatttcgatggaaaacggcgatctgatggcttttttcaagctggatggccgcacacatgactgcgcatcagatcgggaactggtcacctggcataaagaccttaatacgctggtcaagagcttcggaacagaccatgtagagctgtggacgcatgaatatcaccatgaggctaaagagtacccggatggtgagtatgaccattttttccctgcttatgttgatcaatataaccgtaagctgcacggtgattccaagcagctgattaatgacctttatctgaccgttatttacaaacaggtaggggataaaacacagaagtttctggcgaaatttgaaaagccgactcgtgacgaaattcagcaaatgcagaatgaggcgcttgaaggtctggaagatatttctgaacaaatcctggaagcaatgaagccgtatggcattcagcagttgggtatctattatcgtgacaaacgcggtgttgaaattcctgcgcctgataaaaaagaacgtgaagaacttgctgaagtcgatgaatcagacatttttgacgaagccattgttatcgaacgcaacgagcctgaaccttcgcaggctcacgcttattcaaaagcgctggagttcctttatttcctcgcaaatatggaatgggccatcgtgcctgtttgccgtgatcgtatccgtgagtacatcatggacaaccgccctgttagctccctgtggggggatgttgtccagatcagaacggtagatcacaacttctataccaccggcattgaatttcgtgaatacgaagaagatacagagccaggccagcttaacatgcttaaagaagccgattttgaataccttctgacgcagagtttttcttgcctctctgaatcttcagctaaaacgtttctgacgcatcaggaaaaatcggcactgttgcaaatagtcggtggtgataaacttatcatccccttttgctga

SEQ ID NO: 446042 - DNA, 717 bp, Serratia marcescens; identical to SEQ ID NO: 31752

SEQ ID NO: 446043 - DNA, 267 bp, Serratia marcescens
atgctcaaaaaaataagtgattggatcttatccaatagccattatgaagttaagtacaatgctaatgattttacagatagtctggttgttgatatagatgacgatacgaagattgcacgttttacggtgtgggatgatgcatcttgtatgttggagatcattgatgttgaaaccgggaactatataattaatgaacgaagagaattatcagacgaggaaactgtaatagaagcatttaaagagtttgtatcgttgcttagaacttag

SEQ ID NO: 446044 - DNA, 1626 bp, Serratia marcescens
atgccagcaacagctgatgaaattatcgaagctattaaggaagcttcagctgtaggttttcgcgggcgcctgattgcacgcgggcaagcccggtcggtgatctggcgagacggtgacttgccgccggatgcaccggagtttagcgcactgctcagtcaggaccttcaaggctatgcttatgccctaatcgatctcggccttcgtcttcgagaacttaatggagacgacgcctatgcgcgaattgcttttgaacaggccggaaccgcactcgagtcggctattgctaaaggaaaacgagacagccgggatacagattttcacttcgtaatggctgctgcaagctatcaccttgcgcatctttcagcacgagcctattcgttactcgcaatggttggtcaggatgataatttttcaccaatagagagggctcttacacaactgatccggcgtgatttgcgtactctgcgcgataatgcgttgggctttcggctcagaggtgatggcagtgacgtgaaaattactgaaatcctccaggctcgcctaaacttgccgcaagacgagaacggtgacagtgagtcagaggaggacatcctttttgatgggcttgatttggcactgactgacgcctatatgtcggccatttctctctaccttctcgctgtagaaaggggagaatcacgtttgctttccagggctattgaaaaattaagaattagtctaagtatatgtgctcagtttaatatgctaccccagtggtggctaaactttattaccattcatctgttatctgacctttggtcagatacattccatgaaagattgccactggttccagttggtggtgacgctgctgaatggcccgtgcttcgggaactgtttattgcactgcttcaaagacgacctcgagccgaaattgatctctggccatcgcagagagaggccgccggacgctctgttaatgacaatgacgatttggttgtttcgttgccaaccagcgctggaaaaactcgtattgctgaattgtgtattcttcgctgtctggcgggtggcaagcgtgttgttttcatcaccccgcttcgtgcgctttctgcacaaacagaagccactctctccagaacatttgggccgcttgggaaaacaatatcaatgctgtatggaagcattggcgtaagtggtatggatgaggatgcaattcgccagcgtgacatcgtcgtcgccacgcctgaaaaacttgactttgctctccggaatgacccgtcaattattaatgatgtaggactttttatttttgatgaggggcacatgattggggccgatgaacgagaggttcggtatgaagttcaaattcaacggctgttgcgcagacaggatgccgatacgcgcagaattgtctgcctctcggcaattctacctgatggtgagcaactcgatgattttgccggttggctccgtcgtgacaagcccggaggaccaatcaaaaataattggcgaccgacccgcttgcagtttggcgaggtcatatggtccgctccagcaggtcggcttaatctcagcgtcggttatgaggcggcttgggtatcgcgttttatcgtcagcagacaaccgccaaagggctttgttgaataa

SEQ ID NO: 446045 - DNA, 1302 bp, Serratia marcescens
atgcagtcatctttcaccggctgcacatttatgggactctttactgaactcgaattaccctgcaatctcgaaccccgcttactcaggcggtacgaaaccttggtcaaagagcataccattgtgaatccatctaacgctccgggcgtcaaagccctcgccaatcatcaacaggcctggagtttcactcaggcggcttggcgtttcttcaacaatgacaacgtcacttttcctatgctggctgagccattatttgctctggcccgtgaggctgcaacaacgtcgaatagcccctttttattagtggcccatgactggtgccgctgtaattttcgtaagcataatagtaagttagacaaaacccagatgtcgcatgcactggacgtcggctatgagttacaggcttctttgctgattgatggctcgtcggggaagcccttggctccgcttggtttgaatctggtctctagccgtggagtgtatcagtgccatgaggtcacgcctcagcctacacaggggcatcttgacgagctggtcgagcgtattcatcggcaagaccaactggggctggacaagcccttggtacatatcatcgaccgtgaggcggactccttgcctcatctgcggcaattgatgaacacgcgctggctgacgcgctgcaaaaaagattcgaccctgctgcatgacggtaagagcaaacgggtagagcagatcgctagctgtgtacccagtgaggtgattggcagggtatcactgcgaggccgcgttgggtttctgtttgtcggcgaaacgctcgtcagcttaaaacgcaaaacagaatcgcgtccagatgaactggtcacagcacggttggtgttgagccgagtcgtggatgaagcaggcaaggagctggccagttggtatttactgagcaatgtaacggaggtcagtgcccgggagatagcacaatggtattgctggcgctggaacatagagtcatggtttaagttactgaaatcagacggctttcacgttgaggagtggcagcaaaccagtggcgaggcggtataccgtcgcctactggtgagcagcatggcttgcaccttggccctcaagctgtatcaagatgaaagtgaagacgcgcaagagctgaaacactttttgatcagactgagcgggagagtcaccaagcggtcgaaaccggtcacgttgcccgcactccttgccggtttgtatcaattcattcagatgcaggaagtaatgaacacctataccccggaagagctacagaggctggccaagatagccagtcgatattttggttaa

SEQ ID NO: 446046 - DNA, 558 bp, Serratia marcescens
  misc_feature (428)..(437): n is a, c, g, or t
atggtcgacctccctcctgcccaggaacacaaagaatttttaattgaccctacagtgagggtcactcaggacgtaaaagataagcagggccgtgtaatagcttccgccggtgagttgattaatccactttcgagatttcctcaaaacctgacgatgataattttcgatccactcaatccgggccagctggtatgggctgagcagcagtatcgacaacgtctgggtagtggaaaagtaatgccaatgtttacccgtatccaaaaagataatggatgggatcacctaaatgatttacgtgaaaaatttaacggtaaggtgtttaaagttaacgaacagatcatctcacgctttcagattaaaaacacaccagcgcttataactactgaccaagataaattccggatcaccctgtttagcgaggcagaagnnnnnnnnnntattataggcgctctctttgcaacatggctgacgctaaattatccggaccagatgagaagttattttaccaaagccgtcgactatatcgaaagtgttgcaacatttattacatccaagtga

SEQ ID NO: 446047 - DNA, 144 bp, Serratia marcescens; identical to SEQ ID NO: 246075

SEQ ID NO: 446048 - DNA, 213 bp, Serratia marcescens
atgcgtaaaacgcaaaaaagcgcagctatgctgcgctgtttctccgacaaaaacagccagagaaaaggccccgaagggcctttgattagggtgtgtttgcttttttcacttattattcggttaatgcgagctaccctgagagatgcccaacccggtttgcgaacggacaaactgagcccggaagcgttcccgctcttgctgcccggccagtga

SEQ ID NO: 446049 - DNA, 402 bp, Serratia marcescens; identical to SEQ ID NO: 223637

SEQ ID NO: 446050 - DNA, 303 bp, Serratia marcescens; identical to SEQ ID NO: 24284

SEQ ID NO: 446051 - DNA, 2106 bp, Serratia marcescens
ttgcgcggaggccgaatcctttggggtcagatcgccgtagtcatcaccatcgttctggtgatgacgtgggcggcgacgcaatgggttgcctttcgcctcggcttccagccccagcttggagcgccatggttcgatctggcgggcctgccggtctattatccgccggccttcttctggtggtggttttccttcgacgcctacgcgcccgctatcttcgtcgagggcggcatcatcgcggtatcgggcggcttcatcgccatcgccgccgccatcctcatgtcgatcattcgagcgcgggaagcccgcaacatcgccacctacggatcggcgcgatgggcggaagacaaggaaatccgtgcggccggattgctcggccccgatggcgtagtgctcggccggcatacgcaagactatctgcgccatgacggtcccgagcatgtcttatgcttcgccccgaccagaagcggcaagggcgtcggattggtggtgccgacgctgctgacatggccggcatctgctattgtccacgacataaaaggggaaaactggacgctgacagcgggctttcgcgcgaagcatggccgtgtgctgctgttcgatccgaccaatgccggatcgtccgcctacaacccgttgctggaggtgagacggggcgagtgggaggtcagagacgttcaaaatatcgcggatattctggtcgatcccgaaggcagcctcgacaaacgcaatcattgggaaaagaccagccatagcctgctggtcggcgcgatcctgcatgtcctctatgcggagagggacaagacgctggcgggcgtcgccaatttcctgtccgatccgcgccgcccggtcgaggcgaccttgcgcgccatgatggatacgccgcatctcggcgaggcgggcgttcatccagtcatcgcgtcgtcggcccgcgagctgctgaacaagagcgagaacgagcgcagcggcgtcctttccacagccatgtcctttctcggcctctaccgcgatcccgtggtggcgcgagtgacggcacgctgcgactggcgcattgccgatctggtcggcagccgccggcctgtcacgctctatctggtcgtgccgccatccgacataaaccgcaccaagccgctcatccgcctgatcctcaaccagatcggcaggcggttgaccgaggaattgaccacctccggcaagcgccatcgcttgctgttgatgctggacgagtttcctgcgctcggccggctcgatttctttgaatcggcgctcgccttcatggcgggctacggcatcaaaggcttcctgatcgcgcagagcctcaaccagatcgagcgcgcctatgggccgaataacgccattctcgacaactgccatgtgcgcgtcagctttgccacgaacgacgaacgcaccgccaagcgggtgagcgacgcgctcggcgccgcgaccgagctgcgcgattccaccaactatgccggccatcgacttgcgccgtggctagggcacctcatggtgtcccggcaggagacggcccggccgctgcttacgcccggcgagatcatgcagctaccgcccacggacgaaatcgtcatggtcgcgggcacgcccccgatccgcgccaccaaggcccgctatttcgaggacgcgcggtttcaggaacgcatcctgaccccgcccaaattggtcgccgctccgctgacgtccagcccattggatttcattgcaaggctggccgccctggtaccgaagcccagagtcaacctaacccgcttccacggggtgttcgcacccaacagtcggcaccgggcgttggtcacgccggcaaaacggggcaggggcaacaaggtcagggtggctgatgaaccggcaacaccagcacaacggcgagcgtcgatgacatgggcgcaacggctcaagcgtgttttcaatatcgacatcgagacctgcagcggctgcggcggcgccatgaaagtcatcgcctgcattgaagaccctatagtgatcaagcagatccttgatcacctgaagcacaaagccgaaaccagcgggaccagggcgttacccgaaagccgggcgccaccggctgagctgctcctgggtctgtttgactga

SEQ ID NO: 446052 - DNA, 984 bp, Serratia marcescens; identical to SEQ ID NO: 52737

SEQ ID NO: 446053 - DNA, 1215 bp, Serratia marcescens
atgaccaccacacgccccgcgtgggcctatacgctgccggcagcactgctgctgatggctcctttcgacatcctcgcttcactggcgatggatatttatctccctgtcgttccagcgatgcccggcatcctgaacacgacgcccgctatgatccaactcacgttgagcctctatatggtgatgctcggcgtgggccaggtgatttttggtccgctctcagacagaatcgggcgacggccaattctacttgcgggcgcaacggctttcgtcattgcgtctctgggagcagcttggtcttcaactgcaccggcctttgtcgctttccgtctacttcaagcagtgggcgcgtcggccatgctggtggcgacgttcgcgacggttcgcgatgtttacgccagccggcccgagggcgtcgtcatctacggtcttttcagttcgatgctggccttcgtgcctgcgcttggcccaattgctggagcactgatcggcgagtttttcggatggcgggcgatattcgtaacgctggccgcgcttgcgttacccgcactcttgaatgccggtttcaggtggcacgaaacccgccctctggatcaagtcaagacgcgccgatctgtcttgccgatcttcgcgagtccggctttttgggtttacactgtcggctttagcgccggtatgggcaccttcttcgtcttcttctcgacggctccccgtgtgctcataggccaagcggaatattccgagatcggattcagctttgccttcgccactgtcgcgcttgtaatgatcgtgacaacccgtttcgcgaagtcctttgtcgccagatggggcatcgcaggatgcgtggcgcgtgggatggcgttgcttgtttgcggagcggtcctgttggggatcggcgaactttacggctcgccgtcattcctcaccttcatcctaccgatgtgggttgtcgcggtcggtattgtcttcacggtgtccgttaccgcgaacggcgctttggcagagttcgacgacatcgcgggatcagcggtcgcgttctacttctgcgttcaaagcctgatagtcagcattgtcgggacattggcggtggcacttttaaacggtgacacagcgtggcccgtgatctgttacgccacggcgatggcggtactggtttcgttggggctggtgctccttcggctccgtggggctgccaccgagaagtcgccagtcgtctaa

SEQ ID NO: 446054 - DNA, 1233 bp, Serratia marcescens; identical to SEQ ID NO: 242679

SEQ ID NO: 446055 - DNA, 219 bp, Serratia marcescens; identical to SEQ ID NO: 246804

SEQ ID NO: 446056 - DNA, 339 bp, Serratia marcescens
atgctgaccgataccaagctgcgcaatctcaagcccagggacaaactctacaaagtgaatgaccgggaaggtctctatgtggcagtgactccagccggctccatctcgttccgttacaactactcaatcaacggtcggcaggagaccatcacctttgggcgttatggtgtcggtggcatcaccctggccgaagcccgcgagctgttgggtgacgccaagaagatggttgcggcgggcaagtcgccggcgtggcggccagggccgatgaacgcaagaagctcgaacggctgtgccggtacatcagccgcccggcggtatccgagaagcggctgtcgttaa

SEQ ID NO: 446057 - DNA, 243 bp, Serratia marcescens; identical to SEQ ID NO: 34931

SEQ ID NO: 446058 - DNA, 390 bp, Serratia marcescens; identical to SEQ ID NO: 28364

SEQ ID NO: 446059 - DNA, 228 bp, Serratia marcescens
atgatggataaacaagattggcatccggcggacgtcatcgccgctttgaagaagaagggcacgactttggcggctgtttccagaaaagccggattggcatcttctacgttaggcaatgctttggctcgacattggccaaaaggggagaggctgatcgctgaagcattggagttggcgccggcggaaatatggccttcaagatatggtgctatgatgcaccgtgagtga

SEQ ID NO: 446060 - DNA, 270 bp, Serratia marcescens; identical to SEQ ID NO: 25098

SEQ ID NO: 446061 - DNA, 366 bp, Serratia marcescens
atgtctatcactaaagaccaaatcctggaagcagttgccgctatgtccgtaatggacgttgttgaactggtttccgctatggaagaaaaattcggcgtttctgctgctgctgctgtagctgtagctgctggcccagctgaagctgctgaagagaaaactgaattcgacgttatcctgaaagctgcaggcgctaacaaagttgctgttatcaaagcagtacgtggcgctaccggcctgggtctgaaagaagctaaagacctggttgaatctgctccagccgctctgaaagaaggcgtgagcaaagatgacgcagaagctctgaaaaaatctctggaagaagctggcgcagaagttgaagttaaataa

SEQ ID NO: 446062 - DNA, 378 bp, Serratia marcescens; identical to SEQ ID NO: 16550

SEQ ID NO: 446063 - DNA, 315 bp, Serratia marcescens
atggttctgggcgccggcgatcaggtcgtagctggattccatcagttttgtgaactggcggatctggtaatactctcccacaaggcgagcatagcctttgaggtttgctgcacttggacatttccggcaggtttccatgacatcgccaaagtgctgatcccccattgcctcagcgaccagcaaactgtcaatcaggccgcgattattggcctggcgagaaatttccctgaacgtgttgcggtaaaacggaacagaaaatgcttctgggtcaagcgtagccacaacgtcagcggcatccggtgtcaacccgcttag

SEQ ID NO: 446064 - DNA, 315 bp, Serratia marcescens
atggttctgggcgccggcgatcaggtcgtagctggattccatcagttttgtgaactggcggatctggtaatactctcccacaaggcgagcatagcctttgaggtttgctgcacttggacatttccggcaggtttccatgacatcgccaaagtgctgatcccccattgcctcagcgaccagcaaactgtcaatcaggccgcggttattggcctggcgagaaatttccctgaacgtgttgcggtaaaacggaacagaaaatgcttctgggtcaagcgtagccacaacgtcagcggcatccggtgtcaacccgcttag

SEQ ID NO: 446065 - DNA, 414 bp, Serratia marcescens
atggaagcggtagaaatagcaagaaatgttttaactaatttcataataaagatgaataagtgggaagtgagatgttatccactgctttctgaggatgactcagaaaacattaaggttgtgttgaaggatgaacttgatgagatattcaataaattttgtacggtgaaggaaaggaagcaaggtcgtcaaacctccctatcttgtagtgaaccaccagaatattctcctagcgaagaggtgctaagctctgaaataaacaaaaacaaggcgatttttgtcactcaacaacatacgggatttaaaaataaatatcgatacaccctgcatctaaaaaatgatgaatggcgtattgataaaaaagagtggcttgatgacgataatggtattgaaaaatggaaacagtgctacctttga

SEQ ID NO: 446066 - DNA, 534 bp, Serratia marcescens
atgatgagaaaaatagcactgcccctgacgctgctcggcgccgccatgctggcaccgccgctgcaggcggcggatgggaatattaatgtgactggtcaggtacgggaaggaacgtgccgggtagacgatgagtccaagagtatcatcgtagattttggtacacggctgggtaattctatatcgggtttcgcttcctcgtcagaagagaagacgattaaattatgggactgccctgtggattctgtgcgtattaaatttgaaggtaatgcttcatcttatgatggacggtattttgtaccggacaatcatgatcagcctggcgcagcgagtaatgtagcgttttatatatatgacaataagaattatcaatatgttagacctaatgaatatttacaagcgactggactaaaaacaggagtggggagtagaagtgatattctatttggtattgcagttactcgcctggagaaaaataaagttattacagttgggaaggctaatgtcaatatccagctttctgttgcatataactaa

SEQ ID NO: 446067 - DNA, 540 bp, Serratia marcescens
atgaaaaaagtaatttacggtttgttgttaagctgcttcggagcagtattctctgcctgggcttcagatgctacattaaaagctgaggcaacatttattcatgctagttgtaatttgacaggcgagagtaaaacaatgaccgtaccattagggaatgttcaccggaatgatgttattcattcatcatatgtttatccaactttatattttaagcttaaggctactggatgtccgacagatggtagtgctcgtgttggtattcgctttgatggttctgggttgaattctatatatggacaatatttttatttagataaggaatccacggcgaagggagttcatatcgtcataggtacctatgatgaatctgggtattttaaccgaataggccctggggaggaaagggctggatttgtccctgactctttaggtgaggctacgttagggttttatacggggtattatacttcgggatccaatagggatattgttcctggtagcgctaatgctaccgtgcagattagtcttgtctataggtag

SEQ ID NO: 446068 - DNA, 396 bp, Serratia marcescens
atgataaccaagctgtccctcatcgtgtcagaatttgagacgcaagagagggtagatagttacgacagttggtttcgcgccaaagtacaggcggcattggacgagccacgtcctggtatcccacatgatgaagcgatggcagagatcattgattatattgaccaatataacccagctgcgagtagaaagttgcacagccaaattgtacatgcttcgagaatctgcctcagcacccttatctttatcgctttggcagggggactggttcacgggaaattattattcaccctaactatattattatttaccatgtcaatgagttgtaaatggagattttacgtgtgctacatactcaccgggaatatccttaagtcatacaaagagagatcaaaatga

SEQ ID NO: 446069 - DNA, 942 bp, Serratia marcescens
gtgacacagaaagcatggtcctttaaaaatattgaacaggatgatttaaggtattggggaaatgatggttaccatgatgactcatcctcattttatcgttatgacagttttgtcgctaaccacaaaaatgtaaaagtaggtgatgttgttatcattacaaacagaaacaaggttctaggggtttctgttattgatagagttgcaacgagaaatatagataaaaaacgcaataaatgcatccacatggattgtggcgcaaaaaaaatcattccgaggaagaatattaaacctaaatggcgctgtgataatggtcatgaatttaatgagccaagagtgatatttgaagcagctgtggagtttattgccaattatggcgttcattacaaagagataactggtgttacaatggagagactcatcgctgagactccacgctataatggtcaaatgtcaattcaggaagttaattttcattgggccatcaagttatttggcactcaatccgctttagttctgggtcttgaagccggagatgctgataatgacgcaccaattttgatgattgatgatcaaagaaatatggttgaaagacaaataaaacaacgacgtgggcaaaaaaaatttcgagaccaacttttagtatcgaaccctgtctgtgctgttaccggatgtgagctggtagatattctcgaagcagctcatgttgatgcgtatcgaaacgatagccataatcatatcagtaatgggttactgcttcgtagtgatattcataccttgtttgatttaaatttatgcgctatcgatcctgctgataatagtattcgtttttctaaaggtgcttttgaaaatggttatcaacagttcgaaggtgtttgtttgaaagtaaatcataaagtttctcaagatgcattattaaagagatgggtgatatttaatgggtga

SEQ ID NO: 446070 - DNA, 933 bp, Serratia marcescens
atgccccgccctattatcatcgattgcgatcccggcctcgacgacgccatcgcgctggctatggcgctgcgttcgtcagaactggacatcaaagccatcaccacctccgccggcaaccagacgccggagaaaaccctgcataacgcgctgggcctgttgaccctgatgcagcgcgaggacatcccggtcgccgccggcgccagcggcccgctgatgcgcgaactggtgatcgccgactatgtccacggcaaaaccggcatgggcaacacccacctgccgacgccgacaatcaaacccgatccccgcggcgccgtcgagctgatcgccgacttgctgcgcgccagcccgcagccgataaccctggtggtgaccggcccgatgaccaatatcgccctgctgctggcccagcatgccgagctgaaaagccatatcgaacgcatcgtattcatgggcggcggtatgaacgccggcaatactacgcctgtcgcggagttcaacatcttcgtcgatcccgaagccgccgaaatggtgctgaaatccggggtgccgctgaccatggccgggctgaacgtcacccatcaagcgctggtgttgccgcaggatatcgagcgcattcgccagatagacaatccggtcgcgcaggcggtcgcggagatgctcgatttttacctgccgctgtacctcagccatccgcgcggcctgcccggcgctgcgatgcacgatccctgcaccatcgcctggctgctggcgccgcagctgttcaccggcgtagaacgctgggtcggtgtggagaccaaaggggaatacaccgtcggcatgacggtggtggactatttccagcaaaccggcaacgcgaccaacgtggaagtgctgaccagcatcaaccgcgaaggttttatcgatctgctggccgagcgcctggcgcgttattga

SEQ ID NO: 446071 - DNA, 786 bp, Serratia marcescens
atgaacaatatgaatacagttgtcccgctaattcagggtgaactacctgctggccctagctatatggatatctcagactttatagtagaaaatccgttttatgaccttactatattgaatgggcttatcggggcttattttttatctagtcagatgaaaaatccgcttaataaccatgcaaatttaagtaagccacttaaaagagtgggtaatccagttattggcagcaagtatacttcattcagcgatggaaaccagtttgacacacagatcccagttgggagttcagctgcgtcgaatgccgcagtaacaatcatcgctgttgcaaaaaatccgtcaacgacagtagatgcgtggcctgtcggcaactacctcggtggatctggcagcatcagtaccgataatattcttcttcgtaaagataataatattgaatcttatacatcagatggatcaggcttagcatccgttgttaccagcactaccaatggcggtagtgctggtcagctgctggttgttgccgggcagtttggccctacgagtattactggttcatgctaccaaccagggacagataacttattgcagaatacaagggccatttcatctcgtaaggcaaatccaaccactaactatcgaatcggcggccgcccaggaatgacaggtaatggcactcctaatgtatctgccgttctgatctacgaaggaagattgtcggattcagacctgctgacagtgtgtcgctatttccgcacaacgtttggaactcggtacagcttgtggtaa

SEQ ID NO: 446072 - DNA, 1290 bp, Serratia marcescens
atgtggtgtcgaaatggagcctggggtgctgctgctatagagccagatacagcggacagggtgattaaaagcgctcgatcattctcatcatataacatgtcgccaaataacgttgcgctttatgtggacaccattggtcaagtccctatccgtttaataggaggggcattcgacgcggcagatgtaactcaggaaacggctaacatcattggtgataagatcggcgctaccggaaatgtagccgtgcgaagtacatcaggtagcacgctttattcaatgcgaattaaaaaagccaaactgaaaaagggagttagcggtcgcctagtaggaatggctgtcggggattcgtggtcagagttctacaatatttcgcaagcactggcgaatcgtatgtatgcagactggggtccgcgcgccggtgcaggatggtttcagctaattacagatccatcgtcacgttgggaaaatatgattgtcacacgcagtgggtggactgagtacgacgccagttattctaatgctcaaccaccgtatggatgtggcgtcgatggcattgcctattacacctctgctaataacgcaacggcatcaatcacaaacgttaaggacactacaggaactgtattttattacgacggtaacggcacgtttgttattggcgttggcggcacgactaaaacggtaacaggcactggttccggtgagtaccgcaacacgtctattcccggcctaacctctgggctggacacggtgaccattacaacaacaggaaatactggcgtcgtttgcctgcatggacttgtgtttgagacggagttgaattccggttgcttgatgcacaaatgcgggaacggaggaacctgggcggctcagcataccaatttcattacacctcgcattcagttctttgcacaaaaacttaacccagattttattgtagttaatctgggcactaacgactttctgcaaagtagaacgacagagacgtatatcaccggacttaatgggataatcgattcttggagagccatactgccggatgttgggattattttagtatctccgcctgttcccaatgcagaaggaagaacgcctatggttgatttccggaacgccatgcgaaatgttgctcgcgataaaatggtagaatggtatgacctttacgacgacatgccaaaagactgggctaccggaaatgcaatgggttggtggaaagactcgtatcatccgaatgacgttggcgccgaacaaatcgtaaataccatgttcgaactcctattagataaataa

SEQ ID NO: 446073 - DNA, 429 bp, Serratia marcescens
atggcacaaagatacaacaccggaaacccacgtccttctaacagtatgaaggatcttaatgataacgcccttgcttatgatgacttccttaacggcgaacaagatgaggcttacgatcggtttcaaaaaccattccctacagtgcgccggcaggttgctgatcgcattgatgagataactggtgcgcaaaagagcattgagcagtatacggatgaggctcgcgcgtcagcggagatcgctcaatctgcctctgaggcatatcccagcaaagcggccgcccaggatgctattgataaaggcactgaaaagagaccggattttatcgtgtggggtgttatagacggcgatatatggactgagcgatatcagaatattaatggtgtcgccacccccaaccggcgtgacaatgaaaaatggcaaattcattga

SEQ ID NO: 446074 - DNA, 360 bp, Serratia marcescens
atgaaagtcattggtacagagtataagaagcggctcaaattgctgtcgttacaagcagcagcttcgctgaaatacgcagaggccttcgaagctgtctgcgatcacagtaagtcagaagaggttgccgaaaaggatttgttgtcactcctctcgtttcatgctgagaaaatgggctatgtgctggttgaaaaggtcgtgagcgatgaggaggcaacgctcattggtttggatggcaagcatggatatgcgagcaggcatcctatccctaacgctgacacaacgaccgaacattgcccatgccatgacgtgcagcttggtgaggtagccgaacgcgtgctggaaagatttcaaacaaaatga

SEQ ID NO: 446075 - DNA, 201 bp, Serratia marcescens
atggaaaacaaacagcgcagtagtgatgaagatggtggcgaatcctgggctactgggagtttcgaagatgcagccagaccacttatcgagtggctggcagagagcagccactcgcactacacagcaattgtcaccggcaccagcgcggagctgctagaagcacaatcagtggttgtgactgaagtctacgtgaaagagtaa

SEQ ID NO: 446076 - DNA, 621 bp, Serratia marcescens
atggttcagagatataaccctgattacgtcatgcacgcggcgcgctttgcgccgtttgctcgcgaagcagaacacggtgagtacgttaaattctccgattatgaagccttggtttcagaactcgccagcagccggcagatcaacgcccaaaagctgcaggtaaagctgacaatggctgaaaccatcaaagagctgactgatcgagttgagcggcttagcggcatgcttaccgaatccagggttgcgacaaagtcggcagaagaacgagtcgatgcgctggctgtggagaatgcggcactgaaatcgaaagccgccgagcgtgtgcatgaagcatctgaagtctactcagcatacaacgccaccatcagagaaccagacggtgacttcatggatatgcagacgctgcaagagatgaagtgtatccaaaccccagccactgacgcagcacttgcagctatccggtctgattatatggctgaaggtgctgaaattgtcgcaaggaaagctcaggttatttaccaagagcgccataaatctggagattttgaatctgcggggaaatatctaacgacaattaagtttgcaaataatattgccactgacattcgggaggccaaatga

SEQ ID NO: 446077 - DNA, 189 bp, Serratia marcescens
atgaaaaacaatatcgtaatcacaggtcgtgcattcgttgaatttcgtcgcgtaatcagcggtctagataacgttgaaaccagagagatcatcaacagccacgatttagcagctcaacagatcgatcttgaccattgccataccattgtggaaatcaacgtcattgatattgaggtaaatccgcaatga

SEQ ID NO: 446078 - DNA, 513 bp, Serratia marcescens
atgactaatttgagcgaactgtgcaagccggttgccgagattcgaaagcattacccactggggatagacgctccagcaagcgctttctttcagccgctagaagggctgtcagcggtgaattttggggatttactctactcgcaagagtacgtctccgccctgctggcagagctggaagcgaaggataagcgcatcgccgagctggaatatgatctgaaatgcgtcattgcggataacgaggattgcgaaaagactattgtacgcaaagacgccgcaatcgacactttcataacggaatacgacgatgcgcagaagataatcgccgagcttgaagccaagctggctacgccggtgcggttgctgggtgagatgttacttcacgattgggagcaccgcgttgaacggcaggctactttccagcacaggaaaatagcgtgggatgcccgcttagcggaagacaagaaagcaatcctggcagctggcttcaccttcaccgtagagggggatgagtag

SEQ ID NO: 446079 - DNA, 522 bp, Serratia marcescens
atgacactaacgattgaagagttgaagtacggcgcggctatcggcgatctgggtatcgatgccgtgcgcgcggtgtgtgccgaagcgctggctaaccgggaggcgcagccggtgggatacatcgcagaagtcagcggcaatagagttggcgtgctcaggggtctaccaatgccggatgttggctcattgatctacaccgccccgccagcgccagcagtgccggacgaaatcagttctgcaatccgccatctcaaggacacgttggtagcctgcaatcgttttaactactgcgctgatgctgtgaatcgagtagaaaacgcctgccgcgccgcaatgctggctcaacctgtaagtagcggttacacgttgaactctccggaaattccggatggttggaagctggttcctatagatgcgacacgggctatgattgacgcggctcaaatggtggaagaagacggttacgacgccatgtacaaagcaatgctggcagcagcgctggagagtgggaatggtgcataa

SEQ ID NO: 446080 - DNA, 858 bp, Serratia marcescens
atgcgccgtcatgtcgtgatatatctaatatgttccatgttcctatcgatatcgtctaaaagtcacgccgtactacatcctgtgctcaccaaccccagaataacaagttgtaaggggtccacccctggaatgcctgcatacgggccgtgctcgcaatctgttaagtatgagtgggggcctagcacgatgatcgacatcttaccgcaaggggtgccagatgcgcgtctgggcaccgaactcgtcgctatcgggatgcactgtcattgggggaatatgctcacaggtactccgttcacagggtgtacgtttgtggacgacttcgcccatgcgccgaagctctccaactgtcggcttaagaacaccgattcctggttgatatcctccgattccacatgcgatgttattaccgccaataatgctggccattatggagctgggcctggcggtgaatgtgtcctctttacacagcgcaacgccatcgcgaagggtgttgttaactcgatctacggcatcgtagatgccaataccgttgcaaattccgggaaccggttctgccaaaaacctctgccgccaactgttgagtgcgatatctcgctgcccgatatgatcgatcatggtgtcataggtccgaatagctcatcaagttatactctggacggcacgatcagctgcggcagtaatcccgttgtctcctttgttccggggagtggcatagatctagcgcccggggtgactacccgtttgtcttccaaactatcaagtgggggtcggatacagattacctccgatctcaagacgaataacggcgccccaggagctcacaatgcttcggtcgtagtcttggtttcgccgtattga

SEQ ID NO: 446081 - DNA, 2220 bp, Serratia marcescens
atgccgccaaacgcatactcccgacgaggttctcatctgcgagaacacctgcttttcctgctgctgttgctgaccctgagcgtcttcgcaccaccggcgctggcgcaaaacgcgccgcctgcgcccgccgacaagagcgagcagcagaaagccgcctacgccgcgctagccgatctgctgcaagacgaccaagcgcgcgcggaactcatcgaccacctgaaacagaccgccggcgacgctgcggccgccgcgccggcaacgccggaggaatcgacgcccgctacgctgagcgacagcctgaactcgctggcgcaggaaggcatcggcacctttaaccagaagctcggcgcgctgcaaaagctgatcgattccggcccgaagcgcgttttcaatcccgccggctttttccgcgcgctgggctactttctgctgacggtggcggtcacctttgcgctgttccacctgatccgccggctgatcgcgccgctgtacaagcgcatgggcagttgggggcacaacgccagactgcagcgcggcccgtggtataagcgccccgccgctattctcggcgctttcgccatcgatctgctggtgctgctgctggcgctggcggcaggcaacctgtttgcccgccacgtccacgccgacagcgccaccatcctgcggctgcagaccctgtttctcagcgccttcgcggtaattgaatttttcaaggcggtgctgcggctgattttcgcccccagcttcgactatctgcgcccgttccccttcagcgatcggagcgcgcgctattggaacacccgcctcgcctggctcagcggcctgatcggctatggcctgatggtgatggtgccggtggtggcggtgcagatcagctattcggccgccgccgccgtcaatctggtggtgatgctggcgctgacgctgtacgccatttggctgatcctgcacaaccgcaaaccgatacagcaacagatcaacctgctggccgaacggtcgatggcgtttttcagcgtgatcctgcgcgggctggggcatgtctggcacctgctggcgatcgcctattttctggtgctgttcgtgctgtcccagttcgacatcggcaacagcctgcgctttatgatgagcgccacggtaaaaagcctgctggtggtcggtgtcggcgctctgctgtccggcatgctgacccgctggattttccgccgcatttcgctgccgaccgacgtcaatttgcgctatccgatgcttgagcggcgcatcaactcttacatccccaacgggttgaagatactgcgggtgatggtggtgctggcagtgacgctgtttctgctcgatgcctggcatctgatcaacctgtatcaatgggcgggcagcgaaaatggccagcggacgctcggcgggctggtgcatattctgctgatcctgttgatcgccgtgttcagctggacgctgatggccagcatcatcgagcaccgcctggcgctggagctgagcaacggcgtgcggccgagcgcgcgcgaacgcacgctgctgacgctgtttcgcaacgtgttggctatcgttatcagcaccatcaccgtgatgatcgtgctgtcgcaggtcggactgaacatcgcgccgctgctggcgggcgccggcgcgctggggctggccatcagcttcggcgcccagacgctggtgaaagacgtgatcaccggcgtgttcatccagtttgaaaacggcatgaacaccggcgaatatgtcaccgtcagcggcatcaccggcaccgtggagcgcatgaccatccgctcgatcggcctgcgcgacgactacggcgtctatcacatcgtgccgtactcttcgatcaccacgctggccaactatgcgcgtgagttcggggtgtatcgcgccaactacaccgtcagccgcgacgaggacatcgatcgggtcaatgaggtgctgcatcaggccatcgaggcgctgaagcaggatgaacaggtgaagcatttcctgattggcgagccggtcttcaacggcgtggtggcgctgggcgatcgctcgttcaccacccgcgtgacggtgcgcacgcaggcgctgaaacagtgggtggtgcaatacgccctcgaccggctggtgaaaatccatttcgatcgggccggtatcggcatgccgcaacaggctatgcagatctcccgcgcgccgcagccgcacgaagaacaggcgccgcccgcggcgatctga

SEQ ID NO: 446082 - DNA, 1488 bp, Serratia marcescens
atgggtggtgatggtcgccatcgcctgcaccggataggcctgcggcgcgcggaaatggtattcaccgtcgctttcgaaatagagcactttgtaggaatagacgccgctgtcgcgcagcttgccgacgatttccaccggcaccgtgccgagatcctcgccgatcaccatgcaacggtggcgctggctttccagcgccaacaccgccagcagatcgtccaccgggtatttgacgtaggcgccgcgatcggcggtttcgccatacgggatccaccacagccgcagcagcgccatgacgtgatcgatgcgcagcgcgccgcagttggtcatgttggcgcgcaaaagatcgataaacggctggtacccgcgtgccgccatcacgtgcggatccatcggcggcaggccccagttttgccccagaggccccagaatatccggcggtgccccgaccgacgctttcaggcagtacagttcgcggtcacaccaggtttccgccccgccttccgccaccccgaccgccagatcgcgatacaggccaatcggcatctgctgctgccggctctggtcaaaacactgcgcgaactgcgtggccgccagccactgcagccacaggtaaaagcggaccgcgtcctgatgttcggagcagaacagccgcaccgcttcgctctgcccctgccgatagcgctctggccaggccggccagccccactggctggcatctttggccgccagatgggcatgcagcgcgtcgaacgccgcctgctgatacaggctgtcgccgccctcgctgacgaactgttcgaacgcctgacgctgcccgtcgtttggcttgcgcgcctgaaacagcggaaacgccagcttcagcgccgccagcttcagctgcatcacggcggtgtaatccacccactccgcggcgcgcgccttggccagctgcttctgcgtcgccggcttctgccaccagcgctgcgccgcatcgctgcgctggaaatcctccaccgcgttgacgtcgatatacgccagattcagccagcggcgcgacgaggggctgtaagggctggcgctctccggattagccggatacagcgcatggatcgggttaaggccaacgaaggcgccgccgcgctcccccacctgctccaccatcagacgcagatcgccgaaatcgccgatgccccagttgcgatcggagcgcagcgtatacagctgaacgcaagcgccccacagcttcttaccggtcagcaaggcgtccggctcgaagcagcgtctcggcgcgacgatcagccggcatggccactgctgctcgccctggctcagcgtcaattggtggtaacccaccggcagatcgccgggcagcgtcagggtcttgcgcgcgccgatgcgcccctgcaggcattcgccgtcttcacgttgcagcgcccacaggtactcgccttcgcccgccggggtcagcgccagcggcgcgccctgatagaacaccttgaccgccggtaa

SEQ ID NO: 446083 - DNA, 1209 bp, Serratia marcescens
atggacgaaaaacagttgcaggctctggctaacgaactggccaaaaatctcaaaacccctgaggatctcaaccagttcgatcgcctgctgaagaaaatcagcgtcgaggcggcgctcaatgccgaaatgacccatcacctcggctacgataaaaatcagcccaaaccggcgaccaacgcccgcaacggctataccccaaagaccgttatcactggcgatggcccgctggagctgcgtacgccacgcgatcgtgatggttctttcgaacctcaactggtgaagaagaaccagacccggatcacgggcatggataaccagattttatcgttgtacgccaaagggatgaccacccgcgagatcgccgccgcatttaaagagctgtatgacgctgatgtctcgccagcactggtctcaaaggtcaccgatgccgtcattgagcaggttatcgaatggcaaaatcggccactcgatgcagtctatcccattgtttaccttgactgtatcgtcctgaaagttcgacaagatagtcgtgttatcaacaaatcggtgttcctggcgctgggtatcaatattgaaggccagaaagaattgctgggaatgtggatagccgaaaatgaaggtgccaagttctggctgagcgtactgacagagctgaagaatcgcggactgaacgacattctcatcgcctgcgttgatggcctgaaaggcttcccggacgccatcaacgcggtgtatccgcaggcacgtatccagttgtgcatcgtgcatatggtgcgcaacagtctgcggttcgtctcctggaaggactacaaggctgtcacccgcgacctgaaggccatttatcaggcccctacggaagaggccggcttgcaggcgctggaagcgttctccaatgcctgggacagccgttatccgcagataagccgcagctggcaggcaaactgggccaacctggccacgttcttcgcctacccaacagacatccgcaaggtgatctacacgaccaacgcgatcgagtcgttgaacagcgtgatccggcatgcgattaaaaagcgcaaggtgttcccgacggatgactcagtgaaaaaggtggtgtggctggcgatccaggcggcctcgcaaaaatggaccatgccgctgagggactggcgtatggcaatgagccgctttattatcgagttcggtgaccgcctggacggtcacttctga

SEQ ID NO: 446084 - DNA, 357 bp, Serratia marcescens
gtggctaagatctctgccaaaacgcataccaccaccctgaggatcgatgcgggggccgtgggccgtctgcagctgatggtggctgagaaccccctctacaacacttcgcgggtgatgcgcggcgctctgctggccttaagccggttgtccgacagcgaacgggaagcttgcttgccgctgcaaagggaggtgtggatgagctttaacgccaaggacatgacgcagggcgggcaactcgcctttatgcgcctgcgcatgttcgtgcaaattggctacgtggattttcagcgcataccctattttaacagtaaatgtcctgttattttgtatcttgacgttgagctcacactttactaa

SEQ ID NO: 446085 - DNA, 729 bp, Serratia marcescens
atgaatgggaagttttttgtttttttgtcagtgtgttttcttgctggttgtggtgttcgtagtatgagtttgccgaaccctaaagcgtataccaatgcagcagattatgctaacgctttagtaagtgacgcttggtgtacaggaaatatggatagggtgctgggatttcctgttggaaaaatattcctagattataaaggaaagcttaattttgctgcaagtaatgccacagcacattgcacaaaaaaagacttctccattgcgatggggaaatactgccatgataaaggcggagtctaccagtatagttggtgcgctgttaataatgatcccatattctatgtaggtgaattcaccactattgaaaagggaaggttgggtaataaagaatggatggaattcgctatatctcaagggtttactaatgatgaggttagagctaatagtcaaagggagtacggtgctcagcagaaaaaaatacagtcaatattgagagcgaatgtcgatgcaaatatcggtgatttggtttgtaagtatgatgagaactatgatgctcatattatagaggggagcgttaaaggtgtcttatacaaagggtatgtggaaggaaagaataatgataaatacaaaatacgcttagtgtggcatggggaaggtaattcatcgtttgatttaccaaatgataaagttatttggtcctctcaagtgggatggttccactgccaataa

SEQ ID NO: 446086 - DNA, 285 bp, Serratia marcescens
atggattctttaacgaaatttgcgatggatattttacgtgacagaaatttttccagactggatgaggacgtcagggacgaagtgctgtccttgtttattgatgatcatcacaaaccttcaaaagaagggaggaggacgctggcactcaataccgctctgctggcaaaacagctgggtgagccccgactggaggtgctttcaatggatgtactcatggcctgtgataaagctgaagtccgggaggttctggcaaaaattactgacattcttcaggggcgtgcttaa

SEQ ID NO: 446087 - DNA, 294 bp, Serratia marcescens
atgaaaaagtcactgcttattctgagcgcgctgtcgctttccatcagcggaatttctcaggctgcaggtcagattgatgaacaggtcctgcgggaaaaggccgcttttgcgctgggggtgacccaggagcgggtcacgcttgaacagtctgatcgtacccctgaacctaacagctatttttttaacgcccgttaccaggggaagctgtatcagtgttatgtggccaccatgcaggagcggatcatgtctgacgctgtttgtcgtccaactgatggctctgatttaccccgttaa

SEQ ID NO: 446088 - DNA, 597 bp, Serratia marcescens
atggcgccatcgccaatacagcaaaaattacgattgcctccgaacgttcaggttaggaggcggggaaacgcgtacgtcatttattatggtgatgatgaggtgggtggtgtggttgtcgctgaaaccctatccgacgatacacagctgcgcccgtatgttaaagctcctgtggagctgaacagggatattgtcgctctggttgctcaacagatggccgatgcgctgattgagcatgtcgccaggcagcctgatgatgccagacatcccctctcatctccggcccccattcccggcacgacgctcctcgaaaacaccatgttcccctgttcccgctgcgggcgaataactgcccggctggtttttgccccggagtgtgtgtctgaggctgatatggtgtccttgggcgcccgtctcgtgcgcgacgtcaggtatgccccctacccggtctggctgattggtgcgccggacagtgaggacgatagtgttgccctgcatctgacgctgcagctggcaccggtcatgggcgaggtataccgggaacatcccgaccagatgaacagccgactgatggaattggatgataaacatcagtgctga

SEQ ID NO: 446089 - DNA, 336 bp, Serratia marcescens
atgagtcgtgttgatccgttagagaatttgaagaactttgaacctaaagctgccgtcgaaaaaaaatcaaagcagagcgatgcagaaattgaggagctggcaaaccaacacggttttgttggaaggcaaacaacagcgctatctcagcccgttgaacgctcaagacgacgtttcaagacagggcggaatatacaaatcaatattaaaggggaacttgaaaccaagaatgagttataccgcatcgccgatctaatcgaccagccattaggtgagactctcaagcgtgcattggcggctttacagcgagaactggatcaagcagaaggctctgcgtaa

SEQ ID NO: 446090 - DNA, 837 bp, Serratia marcescens
atggacgtgaggtttattttggttgacatagcaaacaacaagatatcttataaaataagagatggtggcgctgtattctctgataaagtagatacgatactacataaaaatctagtggatttctttagtgaagatgataagagtaaaatcttagcatcatatggtgtttcagatgccccagtatttctcaccaagggtgagtcagtgttaactatactattaacacttttcataacctgcctgttcgtagcaatacctttatctcaaacaaaggttacaattctatcatacgtacaaccaggtgggatattaatttttcccattacttttgtttttctcgactcaataaatgagatatttggaaggaagaaaggaaaattagcagtttcgacagcgtcattgtcattagctattggctcagccttcatctcgattagtttaagattgagtggtgtcgaatctacaagccatgcaaatttcattgcagtatatagcaaccttccctatttattactaattaacgcagtatgcgtactcttagcggataattttaataatgttatttacaacaaccttaaagcacatttaagaggcggctatttgttatttagatgttttatatcaactgtaattggacaactagtttattctgtggtgtggattttagcatttttccataacaagttagagtggcatgaaaaactgatttatatactaaataattacgaattcaaagtcttatatagcttagttatctgcgcaccacttaccttacttacagtttggttggcgaaaaaatacatatatgacacacatgttaaaaatttagctcactag

SEQ ID NO: 446091 - DNA, 588 bp, Serratia marcescens
atggccaattccatacaggacagactgaatgaggcactggtagcaaggggaatgactccggccgagctggctcgagctgtcggggtaagcaatggctacatatcaaaactactttctggttatatttctcaacctaaaaagaacttaactgccatatgcactgcactgagaattaaagagagatggctattaaccggaaaaggtgaggttgaaatcgaagatactgatgatatcatcacatatcctctcatacctgtttacgaagtttttgactcagaagaagtcgatgagttatatagcattccatgcttaattgaaaacaaaagaaacaatcttaaagcatacagaattagagagtcagatttattcaacacagagctaaatgttgttgtagacaaaaatggtaatggatcaggtttgtttttgaccgtctataatggcaatgctttactttccacacgatttgattacgttgttaaagtcgaatggatacataacaccaataaagcagtagataattttaacttcacagtactagggaaagtagttcaattaacatcaatagacgaggatgaaatatggacgtga

SEQ ID NO: 446092 - DNA, 1209 bp, Serratia marcescens; identical to SEQ ID NO: 446083

SEQ ID NO: 446093 - DNA, 1110 bp, Serratia marcescens
  misc_feature (843)..(851): n is a, c, g, or t
atgggtgacctggtcagcaaaaataacattgaccgtttagagcgatttcattctttgctggcgggtcagtactggacgtccactgacagcatccctgaagagggtattgtggcaggggatacgctgctcattacgtctttgcgttacgttgaagataagctgcacacagtgattctacgcgcccatccccgcgtttacggtcagactgtagctattgtcactgaagacagcagcggcaaccgtagggaacgtggcaaagaaatgcgagagcatcgcttcctggttaaggattttctgtccagttttgtatttgaacccgaccataaggtaatccgggatgctgaactcagacaagctcaggaagaagtgaatagcctacaggcatcgcttacagccctcgtgagcgatgctcaggggctccgtgaccttgcgattgagcaattaggtacagatgaccgtgaaaaccctgtgacgggccttagcgttgcgttagtgcccccacaagagcagcaggcggtaacctcactggcgattggatcagttcaaaatgctctgtcctctggtatttcagatacccgcattgaacaaatcagagaagcggccttaaaagaagggcagatcagcacagccatcagcaaaatcatcacacaacgaacgcaggcaatcgctaatgccagcaaaagaatgctgccctatttcgaggaagttgcagcggcaagtctggccactacagaagaagccatggaatatgtgaagaaaatccacgatggcgttggcagtctggaactgtataccggcaaagacgttgaggtagtgaatatcgtgaagggtgaatccgctccnnnnnnnnngagctggccgtatggtgcgatctcgatagctggttcgacttctctgatatggaaaaatttcatgaaactttacgaaccagccccgggctggtggagcagatttttccgtccgaacgttccatcgtatgtatggccacaacacgacgttatatcgattaccgcgatccctgggaaaatcatgtccgcaatgacaggaaccgggttgtattccttctggtccgggacggtcaaaatattcatcaggtttactcttcggtag

SEQ ID NO: 446094 - DNA, 255 bp, Serratia marcescens
atggctgacacctacctccccccgggctttaaaaaatgcaaatcatgtcagcaagttaaaccctttgaacagtttggaaaagagctcaagggcaagtttggcctcaagagtaaatgccgagcgtgtattagcgagaaaaacaaaacgtacgcagcaggcccaggggccgaagtaaagacgcaaaataataggacctaccaggcagaaaacaattcctacctcgcttctttagagtccatgaaaaaactcaaataa

SEQ ID NO: 446095 - DNA, 546 bp, Serratia marcescens
atggatatcaactactacgatgaacatcaggaagaatttgaagcggttaaactggcgctgaagggtgaaatggagagaatctgggggtccatgctgaaagaacgtggggaaaacctggatgatgaagccacgtacctgagcctgtttgaagaactgcagttcaacttctctccgtccagcttcagtaagctcaccccgtcacaggagctggatgaagataaaattgccgccttcgtggccagaacccgcggctataaatacggcatcacgatcaattgccagccggcccgcccgcagaagtggctgaaaggccgaatccagccacttgaggatgcggcaggcacaaacctgtgctggatcgacataaccaccatcgagcatatcggtgccggtcagcagtttgacgatcagtttttcctcaccgtgagcacgcaaaccgggcagagttaccgcgtgaatgatctccgtctgcctgggcgccttctgaatgccgctcatgaagccctgttcagggcgctggactcaagcactggcggtaatttctga

SEQ ID NO: 446096 - DNA, 219 bp, Serratia marcescens
atgttcagcttcatttttcacgccggcgcggccgtcttttttctggtcatgagcctggcggccggcgccggcctcctgcttcatggccatgaatatacgacaggtcatttctggaacatgacggggctgtgcattgtgtcctgtatcgtctggatctgggctgttactcaggcaaaagaagcctggtacatatcacgaaacgacaaaaaaggattctga

SEQ ID NO: 446097 - DNA, 510 bp, Serratia marcescens
atggctgataaagaagaattatcggaaaaaattcaatgcctggagtgtggaaaatacttctcgttcctggctccgcacctgaacaaaacccatcagatgaacgccagggaataccgcgaacgctggtctattccgttacacaccccccttgccagcgtcagccattcccgtcagtgcagagagaatgtattgaaccgcatacggcgaggcgaaattaatcccgatgaacagctcgcgctcatggctgaaggaaggaagcacgccccggaacgtgcaaccagcaccaggctgcataaagtgtctgcgcgaaacgtagcgcagacacatcagatctggaagcactcgccagtggtgaaagtggtaccagaagcgctcagggctgaagccgtgaaaaggatggaggccagaaaagtaacgggggaaaaagttaaagcaattgctgctgatctgaacctgtcggttgggtgtctgtataagtgggtgtcggccgctaaacagactgtaaagtga

SEQ ID NO: 446098 - DNA, 801 bp, Serratia marcescens
atgtcggttaacaaccctgtcgcccgcctgctggccgaacaccccacgctgatcctggacggcgcgctggccaccgagctggaagcgcgcggctgcgatctgaccgatccgctgtggtcggccaaggtgctgattgaaaatcccgagcttatctatcagatacacctcgattatttcaacgccggcgcccagtgcgccatcaccgccagctatcaggccacgccgcagggcttcttgcgccgcggcctggatcaggatcaatcgctggcgttgatcgccaaaagcgtgcagctggcgcaacgcgcgcgccgcgattatctggccgcgcacccgcaggcggcgccgctgctgatcgccggttcggtgggcccgtacggcgcctatctggccgacggctcggaataccgcggcgactaccggctggcgcaggatgacatgattgccttcaccctgcgcgacagccaacatctcagcgacggcacgccgctgacggaagtcctgtccgagctgcgcggcaatccgcaggtgctggcgatcggcatcaactgcatcgcgctggacaaggtcgctccggcgctgcgccaactgggcgcgctggccgacaaaccgctgctggtctaccccaactccggggagcactacgatgcgatcagcaaaacctggcacgcctgcggcggcgagcacggcagcctggtcgatcaggcgacagagtggcgcgcgctcggcgcacaattgatcggcggctgttgtcgcactacgccgcaggatatccgcgccatcgccgcgcgctgtaagaaatga

SEQ ID NO: 446099 - DNA, 1047 bp, Serratia marcescens
atgagtctccaaaacaaatttaagaattttcatgattctattaagttaggtaggaaggacgtagagtacacaacggcccgcctcaaggatgacagcattacatctgatatcgttgaccgattcaaagaggatggatacccggtcattgaggatttcattcaagggtctttggcaaccttcactggtatcagggaaaaagggcaggatttcgatattgaccgtgccattgttattgaagcggggttagctcctgaaaacccaataacacccaagcttgcagttctggaagtgctggaagaacggggttttaaaaatgccaaaatcaaaaaaccttgtgtaactgctgattacaaggctgatgaccttcatatcgatatcccaatttaccgcaagtacgataatggacagtacgaattagccgttggcaagagacattcagatgaggagaatcgtgagtgggctagagcctcaccgcgtgagctcattgattgggtcaatgattatgattctgatgaaacatatggttcgaataagcatgaccagtaccggcgtattgtcagatatctcaagcgctggagaaacttcacttttggcgatgatgtacgtcgcaaaatttactccatcggcattgcggttatggttaaggagtccttcaactcttcgattaacgatgagggttttcctgatgatctcactgcgctgagagagaccattaatcacattctcaactatcgtagttatttcactctcgttgagttggacaaatacagggtcaacgttgcgcttccagtaagccctaacagggacattttccacagcagtagtgttgcgacaggtacccagtttcgtaacaagcttagcgctcttttgaaaaccttgaataaggttgctgatgaagagcaagagtctaagcagtgtgagttgctgcgaagtgtatttggtgaagactttcctgaatgcgcagcgacgacttcatctgcttcgtcaaatgctgtcaaaaccgtttttgcttcttccggagtagtggggacatcgcaaggcgcatga

SEQ ID NO: 446100 - DNA, 309 bp, Serratia marcescens; identical to SEQ ID NO: 105553

SEQ ID NO: 446101 - DNA, 2040 bp, Serratia marcescens; identical to SEQ ID NO: 105542

SEQ ID NO: 446102 - DNA, 564 bp, Serratia marcescens
atgaaaagcattgcattgattctactgtcgctattacccaccgtaatgtcagcaaaaaccctcgttataggtgacagccttgcttatacgttaacgaagagcgcacagaagattacaccaacggacggttattaccttgtagggtctggtttaatagccggggaactagactggccgggatttattagagggttggatattagccccttcgataaggttgttatatccattggtgctaatgatggcgtaacttttcagcaggttaattcatacgaaaagaaagcatctgatttaatatccataattaaaaacaaaaatgaaagcatccctatcatctgggtgttgccaccagcaatgaaaaatgaaaacacggaacagggtttaattaatacacgaagggcgatctctcaagcggcagagtcatccgggataggtgtatttaaccccggcacgattataggtgataaatttacaatgacggtaaataacattcaaataagaactaaggacggcattcattacacagaaaaaggtggcgatatgcttatccagaagttgttatga

SEQ ID NO: 446103 - DNA, 354 bp, Serratia marcescens
atgaacatcaaaaagttatttgcccttaaaagcccttgcaagaactgtccgttcctgaaagaaaacggtatagatttagttgaggggcgtttggacgaaatcaaagaagatttgctggcaaatgatgaaaaaccatttttttgccacaaaacaacgtactccactggcgggcattatgatgatgaaacagagagttacgttaactcatggcaggagtcatactgcatgggtgcaatggcatatctctatgcaaagaagcgcctgaacgtgccaacaagaataggaattgtcatggggatgtgtgacgttgaagacatcaaaaacaccatcccgttaatcgaaatagatgagtga

SEQ ID NO: 446104 - DNA, 534 bp, Serratia marcescens
atggatattttaggcggcttactgtctaacccagctatctatctgggcgttgttgttcttgttgttgcagtcgccattaagtcatttgttgaaaagtctgtaaaagggaaagggtgtaaccattcgctcagtaattactctcttgtctcttcggtcatgactaaggctgaaatggcattttaccagtcattaataacggctgtaggtggtgaatacacggtaatggtcaaggtcaggctggctgacattatcactgttaagaaaaacagcagtaattacatggctcacttcgggaagataaaagcgaaacacgttgattatctcctgtgtgataaagctgatttaaaacctgtattagtcatcgaacttgatgataaaagccaccagcgtactgaccgtgttgctcgtgataaattggttgatgggatattcaagtcagttggtttgcctgttatccaccatgctgttaaaagagcatacaatcagagtgatttaatcctgatgatttcagatgcgctgagtaataatcgctga

SEQ ID NO: 446105 - DNA, 408 bp, Serratia marcescens
atgcaaatgaaaactatcatcatggcgggtttactggtttcgatgtcctctcatgcaaccatcgattccggcccctcactactagggcagaagaagactaatatcatcaaggccaatgtctctgctgtcgtggcttcatatgcttgccgtactacgcttgatggcgggaatggcctgtaccatcagacgctgaaaacagccgaagaagccttcattcgtgctaccgataataaagaaaagtcgaaagaaatgatccgggtactggaaaagaacatcgaaaatactgaccccggcgcacaactgcttcgtcagtttgatgaagtaaacgtacccccagaaatgcgaaaacgctcctgtgaacagatggtggaaggaagcgcacaaagggccaagcaggcagaacagtag

SEQ ID NO: 446106 - DNA, 810 bp, Serratia marcescens
atgcaaaattacccacgtaaactggctttgtctgactggaatatgatgatgaagcatagtctaaaacttatgctatccatgtccgggctcgccatgtgcgctatttttgtcatcatcggtggcggagctatatacctgattatgggaaaaatctcgatgatagggttgggctactttattctccagccagccgtcattacgatctaccttgcctgccttctggcccgttatcgttcaggtaataacgcattacccgttggtaaagagctcaggaacattatactcaccttactgattggcaccgtagccactgccctgctaatttcgttactatggctacttcacatctacatgcctgtagctggtgctgctgagacgcaccccgtcatatcagcttcgacggacaacgtaatcacgcctcagagcctcaaaccgcagtctgttgcgtttgtgtcggtcttcccggtgatgttcaacatctacagcattgccacactctctatgatgggggtattaccgtgcattggcatcattatcggcgtactggttaactgcaatgcaccccttcacaaaaatctgggcatattgtgtcgcggcttattccgcaacattggcacgatgatcatcttctcgttgttcaccttctgtctcctgtcattctggtcagtgatggccctgaaaggggatatgtacgtgttcctgtcgctcatcccactgacgttcctgagcgttatggcctatgtaatcgctgagcaaatctacatgccagaaaaacggttaacgccaaaaaatgccactacgggtaaataa

SEQ ID NO: 446107 - DNA, 666 bp, Serratia marcescens
atggacaatgtgagccctgttcagggtctgacatacgtaatggttgactatgaaaatgttcagccgtcagtcatacgttttgcaaagcagccggaaacacattttatcgtgtttgtaggccaccagcaggacagagtgaattttggcctcgcttctgtgttgcagccccttggcgagcgggcacaatacgtgaaaattcacggcatcggggccaacgcgttagattttcatatcgcgttatttatcgggaaaatttctgcgcgtgaaccgaacgcaggctttgtcgtcatttccaacgacaaaggctatgaccccatcatccaatacttaaaagccaacggcaccaaaattgagcgacatgccatgcctgttcagctcaaaccttccagacaaccaaaacaccaagtccagacaaaaaaccgccatcgcaggcgggaagggcatattaaacgcataacccgtgcgctggtggctatgtatcccaacgttcctaaagataaaaaaggtctggagggtgtcattcgctctacaggcgggcatgaaccgctaagcaacaaagaaatgaaaggcatcgttttccagcttaatcatcgtgggctggtgaatacctatgggaaacatgttgtttacaacgttattgataccaaactgaaaaaatcagcataa

SEQ ID NO: 446108 - DNA, 312 bp, Serratia marcescens
atgggaaagtttcggttgtggctcaaccggctcatctaccgttttacggtaagtagcgaagagctagagatgtgccgcagtgacagaaaattaatgaacaacctccgtcgcacgtttaacgaggttgaaaccaaaatgtctgtgtttgaaaaaaatggagggagttgctcagaaatcggtggtagtggtgtatcgctgaatttaatgggctttagggtttacgtttaccgtcctgtgaagaagacggaaaagggcgcggatcactctggggagagtaccgtcgtccagttagacaagtatcgcacacgatag

SEQ ID NO: 446109 - DNA, 681 bp, Serratia marcescens
atggcagacgatgacagcctgatagagaaaatgccttttctctttcaaataaaaagtggtgttcatgggaaagagattacgtctctttttcttatttatgcgtatcgcccagaactcactgctttactcgacgagtacaccaaaaccctgtacggaaaaaagactgggtgggataaaacgctcggggcgcatgtttttgaagatgggcttgtcagctgccgggttggtcgtgtcagtgccactacggatgccacggccaccacactgaaagaaaaagggcttgtggttgatatcaccggctttaaccagcaaaaaacatacgatgaactaagtcgggaaacccccgaatactttaaaaaacaagactctggagatttaaaaatgtctggtcgtttacacatcaaaaacttttctacctgcaaactttgcagttcatccattatctcaggcaagcccagcgcagttgacccggcgtggaactcggcgcacctgtatgacgcgatgaagtcggaagagcaaagctttcgcaatatccatagcgtttccttgcgcgataagctcaacatctcatgggcagtacctgtggtagatgagatcatacggggtgaagggcgctgtgagttttgtcagaactactgcgaaaaaagccgcactatcgtctcaatggtcgtcgttctctga

SEQ ID NO: 446110 - DNA, 351 bp, Serratia marcescens
atgactaataaacagattaaatttgggggtaagcgattgcaatttaccccggaagcacaggcgattattcctgaaaaatcatctggtttgatatatcctgtcgagcagggatttgccatcacggataaatcaggggtgcctcgccttctcgttattagtgacgaggggagtgagttttgttggtttgtctccggccagaaaaaggccgggaagtatcgactttcaatcaccactgacgaagatgagaaagagtttggcattgacggtatggtatatgaggacgtcatttcactggctacccgtatataccgaaagtgtcagaaatacctcgcagaatatagtgctctttaa

SEQ ID NO: 446111 - DNA, 741 bp, Serratia marcescens
atgaatcacgacatttactgcatggggaagaagggccataagccttttgtggtggcttacggcaagaaatacctttttattgcaacaacagacagcgagctgactgacggatacgacgggtatattttcccttacctgtgtacctacatcgtcgctgacagccatttaaaacctatcgccatcattatgacaggtaagcgcatcatgcctgaattaatggatgcagattggaacggaaagaaccaactgccaactatcaagccgcagtttacccgtgagtcgattctgaatgtgccgcatggcgtctcgatgaatgacctcactctcacgctcttaaaagcgtgcagacaggctcacctgcaatggtctgataactatgcggagcaacaaccttacgttgaccctatgcgccgtacagtcacgctgttcaacgaaacctatgtggtcagtaaagacatcagcgccaccaaaaagggacacggcgttatctatcacgatcccgaagagggttttatattcatcaatgagcaggagcaggccgtcttctcgctcgtggatgtcgctggcattacaagtttttcatctgtagcctctgtggctggccgtgtcacttctatgctcgtaattgacgatagcgaccttggaaaactgggcggtgagatactgagacaccagcatcgtttagccatcgcggaacggttgcacgacgttttaacgttacagtttggaattcagggatga

SEQ ID NO: 446112 - DNA, 1677 bp, Serratia marcescens
atgaccgcattaatgctgatcgacgactacaaaactggctgtacccactacgaaggctttggttgcattaatgatgttcacgccctcattgaagaacacgccacatcaaaaaaacagataatcgaactgcatagcaaagtgatgggtagccgcttaggtgatgtcttttcatactttgtcagtgcagccgggcaaaacagcctacatgaaacattacgcgttgagcgcttctttgatcctgaacgtgctatgtgcgctctggatcaggattactggaaccgcctgatagacgttatcaacgtgaaaaacttcatgcctgccgaaaaacgtaacgaatggtttgacagtctgaatgaatggcgaaaggctgaccgttactctcttgcctcagtgaagcctgtaccctttaatagagaaactgccctgagcacggccaaatccctgttggatgagcgaaaagactttttcagtgaaatggtagatggtgtattcaaaaacttgtcacctcaccactatacgaataaatccgaagggttttcggtgcgcatgatcgtcgataaggccatgccctcagttaacagtaactatgacaagcaggagtacatcaacgacctgcgtaaaatcatcggccttctgttcaaccgtgaaggtgcagagaatgtcaccagccaccagctatttaacgacctacaaaagtattatggcgagtgggtgtctatcgacggtgattctatcgcattgaagccgcataaaagcgggacagtccatgttcaggtaagccaagagatcgcagacgctcttaacgtcgtcctcgcgtatcgctaccccaacgtcatcccgatgaaaaaagctcgtgggaatggccgtcagaaaaatactttttccagcgaccgtacctattcgcttctttcggagcctctgccgttcacagtcagtgactattttggcgaaatggctcgtaagggagtaaagccaaaaacgcacgacggaatgcccccgcgctatgaatattctcttccgggcacctatttgcattcgcaatccactaacgatgacgttgcccgtatttatacgatggtcggcggggtgtcgaaagaagacaacgctatgacgtacctctttgactatgatcccgcgccggtattcgagcacctctttatcaacgggacattaccagaccagaaatcacaccagttttacccgaccaaaaatgacattcgtaaaactgccctcgatatggctgaggtgcaggggcaccatacagttattgacccgtctgctggattcggggatctgattgacagcctgccacgcaatgcggccacaaccgccattgaaattcactcattagccgcagctgttctccgggccaagggattcaatactatacacggggattttctcacgcagcatcctgcctctgtggggctctttgaccgcgttatcatgaacccgccatattcagaggggcgctgggtaaaacacgtcactcatgcgctcaacttcattaaaccgggggggaagctggtggccgtgcttccagcatcagccccccaaagcaccagcatgaccaatatagggggaggctatgatgtgtctttctctaaagagtaccctcaagcctttgaaggtacgttcgtaaacgtggtgatcatggttgtagatcgccacgaataa

SEQ ID NO: 446113 - DNA, 429 bp, Serratia marcescens
atgaaaacgaccgttcgttatgtatcaaaaaagaaacctgaacctccggggaataaaaggccggttccgcgtgcagcccgcaaacccctaaagtatttcagcaaatctgaatacctttatgccgtgctgttcttcggattcatcatttttgcaaccatgcgcttttataacaaacaggcagaagttgaaaccacagagcctcttggccgggtagtctccattgattctaacagtcgtgatttcagcacaatggtaattaccactaataccacgcacttccttgtgcctcgtccgacagtgttctctattgggagtgatcttagcctgcaaaagctggtggccggggattatcaggtctgtgtagacggaaaagaaatttgtacaaaagttgaaaaaagagagtatctggctattcgacctctaccatga

SEQ ID NO: 446114 - DNA, 477 bp, Serratia marcescens
atgacgacaagtgaaaaaacaatgatggtcatccggccatctcaggtactcaacttcccccacttcttcgtctggattgttatcgggcttttcctgttcgtaactaatgatgagctttacggcataccggtctatatcgttcctatcttcctcataggctggcgctaccttgttatccactctatccgctatgagattacgactgaacgcatccggttccatcgaggggtgctcaaccgcaagatggacgagactgagctgtaccgcgtcagagactacagtattcgccgtccgttccacctccttatttttcatctggcaacgctccacatcgacacaaaagatgttcgccatagcacgatagatatgatcgggatacgcaacgcagagcaggtgttaacgatgctcagaaaacaggtggaagccagcagaacacgcaaaggggttcgcgacatcgacattggtggataccagtaa

SEQ ID NO: 446115 - DNA, 648 bp, Serratia marcescens
atgtctttaaaactgttagcactgataattttggttgtggggggtatccttttcgtttcttttttactgtatgagaagaggaagcgagataaggagcaaggtggtgaattggccgtgaatcacatcaaaagagataacccggtgtcttctccagccaaccggggcaattccgttcacgatctctttattgatgaggatgatgagccgggcatggtcaacgacccctatagcggttacgtggctcgtaagtaccttatcaatcgccaacaaactgaactttatgatcgccttgaaaatctattatccggcgattttcgtatttctccaagaatacgcatgactgacgttatccggcctgaaaaagagattatggaatacgaaagtgaacgttcacggataatgaacagtcgctttcaaaatgcacgttttgacttcgttgttaccgaccttgaaaacggcgaaattcgcggtgttgtcatgtcagaaaattcgcttaccttccttaatgatagtgcttttgtcattgagatcctgaaccggctaaatatcccgctgtaccgttatgatgaaagttacacgtactctgacgatcagctatctaatttactctacgaaacctttgacggggccagccatgacgacaagtga

SEQ ID NO: 446116 - DNA, 381 bp, Serratia marcescens
atgacgaacaaagtgggtgggacaatgcttgatgcagtaataaactctttctttaccaagtggtttgaagataaagaaaaggagctctccggggatgaaaactggcatccaccagcaaaagggcaggccgggtatcaggagtttgaggggcgcaggaatatcgcttgggccgcgtgggtagctcgcaatgactatccactgattactaagacggctctggcgcttcccgaagatatgtatgtattccttactaaagttcgtgaagcaagacagacagaaatagacaacatgcgatcaccggctatccagcgcgacatgacctctaccgctatgcgaagtctgggtgactatcttatccgtcataacatcgctgggaaataa

SEQ ID NO: 446117 - DNA, 516 bp, Serratia marcescens
atggtgggggccattcaaatgctcagatggacgcctgaacaggcagaagcgcaccaaaagaagaacggcaagaaaacgggcacagcactatcctcgcccaaagaaaacaaaactgttttgcaccaatcacaagagctcgttatcccagaaaaactaacgccaaaacagcgcactcaggctcttggccgcttaaaagaaggggagatgaataagacggaggatgcttataacaagtacctcaaactgcggtattccgctggtgaagtcttatggtatgggtttgaaaagataaaactcaaactggctgaccggacgttttacacgtctgatttttctgttttgctcagtaatggtcagttcgagctgcatgaagtgaaagggcattgggaagaggatgcacgcgtaaaaataaaagtagctgctgagcagtttcctttccggtttatcggggtgaaaaaggatggggataattggatttttgaagatttttccccgtggtacggaacattattatga

SEQ ID NO: 446118 - DNA, 963 bp, Serratia marcescens
atgcacacaccattttccgttaaaaacttagccatttaccgcatttcgcgtgatatcgatttttccaaattggctgagctggccgtgaactacaagttcacaccttgcggttctcaggacatggctaaaacgggctggatttctccgctgggtgatgagtttgaaaacctgacgcatgaagcgtccggcgtgatcctgctttgccagaagagcgagaagaagaacattcccgcctctgttatcaaagaaaagctggatgagaaagtcactaagatgcaggcagaacagggccgtaagctaaaacgcactgaaatagcatctctcaaagacgagatcctgcatactctgctgcctgtcacactgccaaaaacgactcggacatatatctggatcgacaagcaggctggcctgctgattgtagacgcctcaagcgcacgacgtgccgaagacgttaacgcattgctgcgcaaaaccctcggctcattgcctgtcgtgccattaacgatggaaaaaccggttgagctgaccttgaccgaatgggtgcgctctggtgaattgcctgcgggcatggtgttaggctcagatataacgctcaaagccattcttgaggatggcggtatcgtgaccgcacgcaatcaggatctgatctgtgatgaaattgccaaccatatagaatcaggcaaagtcgtcaccaaagtgtcttttgactggcaggagcgtatcagtttcgttctgaaagatgactgcacgattggccgtattcgtttttctgatgtgctgaaagaacagaatgacgatattgaccgtgaagatgtggccgcaaggtttgacgctgattttgtgctgtacaccggggaagtgatggccctcattaacacgttgatctcaagccttggcggggaggcggatagaacggcgcatgaggatgttaatcaggataaaaaagagggggtggccgcataa

SEQ ID NO: 446119 - DNA, 213 bp, Serratia marcescens
atgcaaataaaattcgctgatgtccctgcgttaaagaacgaagaaaccgaaaaattctgccatcaagtggctgctgaatacattcagaacaaagagatcggggcgaaaatgtataccgacttttgtgttaataacaaacttttctactgggaaactcttgccatcaaacagcgcatagcctgtctcgttggcaagctaacacctgcaacttaa

SEQ ID NO: 446120 - DNA, 828 bp, Serratia marcescens
atgagatcggttctaaagtgggtcggcgggaaaagcacgctgatggggagcattaaccgtattttaccggaaggtaatcgtctgatagagccctttaccggctcttgtgcggtaacaatgaacacgtcttacgacagctacattgtggctgacattaatcaggatctgattggtatgtaccgtatggtgcgtgatgcgccggatactctggttgccatcgtccgtgattttttttcgcacgccaattcagccgatgaatattatcgtctgcgtgacatcttcaatcagcgcaccagcgacaaaccgactcaggccgctctgttcctctacctgaaccgtcacggttatcgtggcctgtgtcgctacagcaaaaagaaagggacattcaacgtgccatacgggcactacaaagcccctttattccccgaaaaagaaatctatcacctcagtgagaaactccagaaggcgacacttctgtgtgccagttttcaggaaacactcttgctggcccagccgggtgatgtggtgtattgcgatcccccgtatgtcgagaaagggcgcttcactgactatcactccagtggtttcaatatgtctcacctgcgtgagctggtgggcatccttgagtcgatgttggaaaaaggcgttagtgtagtggcctcatcgcataacgagaaagccatacgcgatatttacgccagattcagccaaaccgaactgaccgcctatcgaagcattggcgttaagggtggaaagggcaagcgtgctgatgagctgctgctgtcacggatcgcatttcctctggcgttaccgttccgggaagcgtga

SEQ ID NO: 446121 - DNA, 312 bp, Serratia marcescens
atgaaacagatacctaatgtctggaaagcgcgtgaagctatcagaaaggttgggctgatttcatccccggccaccagcgaagcagccgcagaagccttgattgagctggttcgcagtggtgagctcctgatattggcagatttcgctgatgcggtattgaagcgtgagccggacgcatatatcaaccgcagttttttaggctcaacccatcccgagacaccgattcctattgagcggcctcatggtggtaaagagtttgcttttgctaactatcatcctgtatttattgggtctatgacagacatagactaa

SEQ ID NO: 446122 - DNA, 495 bp, Serratia marcescens
atgataattgattatttgaaacgccaagacatcctgctaaagaaacaccaaaaactgactaacgtatacattccgttagccatctttatcgtggtgagtgtttcatgttttacaactatggaatctaaaggtgtagcgttcgtattatcttgtcttttttcaatcatgatgaatatagttgttaagttggtttcagctttaagcgccccttcatcgtccgctgaaatttcaggtctgctacatcactttagcagtgattcagaagtcattgagtattgcaatgccgttattgaatctggtgccgtgtttaaaagtaaacaaatgaatcgcgcggtatctattggtcagaaaaatatagataacgttcagatgcaagaagaactggaagaaatagacattcagtatcgtaaagttgaagcgatgttagctaacggcaaaataaataactcaactcaaacccgcagtcttttcctcactcaacaggacgaaaaatga

SEQ ID NO: 446123 - DNA, 2067 bp, Serratia marcescens
atgagcaagccaaaaccagccaccagcgaaatcatcgcgaaagcctatcagtcattcctcgataagaagggtgtgaccgctcgtatgggccagaaacgcatgatgaacctctgctatggactggttaacagcatcaaggttgatgatagcggcaatcgcaccagcgcaccggctgtgtgtgtcattgaagcaggcaccggcacaggtaaaacgctgggctactccattcctcttatcccactggcgcaggccaaagagaaaacgcttatcctctccacggctaccgtggcattgcaggagcaggtcgttcacaaagatctgcctgatattcgggctagtgccggactggactttacctttgcgatggcaaaaggccgtggccggtatttctgcaaacttcgtgctgctcgtgaagcggaaaaagagatggagttattcggatttcaggatgaaaccatcaagatactgaccgatgagtttgatgatgatttatggaacggtgatcgtgatacctacccagtagaaattaccgataaaatctggcagaaggccaacgcggttgcaggacaatgcccggctcaccactgcccgcacttcaaaagctgcccgttctacaaggcccgtgacgagatggatagcgtggacgtaatcattgccaaccatgatatcgtgatggccgacctttcgcttggtggtggtgtggttctgcctgagccaaaaaattgtatttatgtgttcgatgaaggacaccacttaaccagtaaggctatcagccatttttcatcgacctgctcactcgacgctgcaatcaaatggagtgatgaaattttcgatatggttatcccgctggtggatagctatgacgacaacatggaacgttacgcgaccacgttgaattctctcgcctcagaattgaaaaaagagttagtcctgacaaaagagtttttgctgagaaaccttccgttcaagggcgaatatgacaatcgtcagacctgcattttcccccgtggtgaaacgccacacgaggtcattcactacgcaaaaacagtcggtaaagttctggaagagttaaaaaataccaatggaaaaatgaccgccattattgaggataaagccaaggggccagaaggtggggagcacaaaatgattgtcggtgagctggacaataaactgagcactctggttactgcatgggcccagtttgtcaacgtaaataagcgtgacaagcagggtattcctttcgctcgctgggtcgatgttaaccgtgacaaaaagaacgagatagtgattaacagcagccctgtacatgcaggtgaaatgctgaaatcaatcgtctggaaagatgcccatgcggccattattacctctgcaaccatccgttcactgggtaaatttgatgcctatcttgatcaggccgggcttccagctgataccccgacattactcgctcagagcccgtttgattatgaaaataatggtgtgctgttcatccccaaaatgaagttttctccgaaagactctgccgcacatacgactgaggtgggttctcttctgcccactctggttctgcgcaaaagggggtgccttgttctgtttgcctccaaaaagcaaatgaccgaagtgttcgaaatgatgccagatgatattcaggacaaaatcttgatgcagggctctatccctaaaagcgagattgtttcccgccataagctgcgcattgatcgcggtgatgacagcataattttcggtatgtccagcttctcagaaggtgtcgatttaccgggcgattactgcaacaacgtcatcattgcaaagctgcctttcatggttccgaccgatcccgtaagcctcacgctggcggagtggatggagtcagtgggacgcaatacatttgaagagatatctgtacctgatgcctgtattaagctgattcagtcagtagggcgtctgataaggacagagcaggataccggagccgtcaccattctggataaccgccttgtgactaagcgttatggtgcggggattctggactcattacctccttttaaacgtgttatcagaagataa

SEQ ID NO: 446124 - DNA, 261 bp, Serratia marcescens
atgagcaataatgaccataatcagggtgacttccttgatttcatcgcgggcttgctacagctttacgctggagatgccacagaagaggtaaagggaaaaatcattcagcgtatgcagcatctgtctggtggcgagtcagtcactctaacgacaatttaccatgatttttctggcagtgaagacccggatttactgcgtttagctcatggcattaagccgttactgaatgaaggccagtacgctacgctatttcattcataa

SEQ ID NO: 446125 - DNA, 363 bp, Serratia marcescens
atgacaatgaaaaatgagctttcagcaatcgtcactgaacaagcccggagtgaagggataaccgaaacgatgctgatcgaacgctgggttatgctcggcaaactggctgaagagaacccggacatgctggcgggcgatctgatatcatacctcagtaccggcacatacccatctacagcggttgaagatgcgccgctgccagctggtggcgaaattgaatacgagtctcagaacgtgcgtatgatgatgaaagtgctcatctataagctgaacaggctcgcgccaaataacgacaagtccgtgcaggctatgggcctgatgaagcggcttggcatgtactcaattaccgatgtgttgcgctaa

SEQ ID NO: 446126 - DNA, 654 bp, Serratia marcescens
atggcctcagaagcattgaagaagccggaggggttcaacgacaccaagcttcttattgccaatagcactatagctgccagacaagcatcacttacccgtgttcgcagtgatatacgcctccttctggagaaagaggcgcagattgaagccgcaatttatgcagcgaaagagcaacgtgacaagctggtgattgaagggtggggcgagggtgaaccggaatggcgatacattctggaagcgccggaggttaatagccacatcctcgctgaacgagccgagatagagataacaaagctcgggctgttcacggctggtttcttcaaaaaaaaccgacagagagcgctgggcgtggcattgaatgggctatcaagcgatagtgagttagagcaccttgccacttcacttgaaaccatcttccctcatatctatgcgcttactgatggggagcgatctgtctgtgtgaaccatagtgccccggaaagtttcgatttacagatcagacaagtgatttcaaatgggcttatcagtgtggctcagttagtttacgggagaaaaaaatctacgtatcacgattccttttatgacgctttggttttcatccgaaacaacatgacaggaaatacattcaactatgaattgagtgaagacctttaa

SEQ ID NO: 446127 - DNA, 420 bp, Serratia marcescens
atgatcaatttgaaggcgctttttgaaaaggatgcagctgagcgttataaggtgcctctatggatggtcgaagagcgccgtgaccgagatggctataacattgacagcagttctatcctgtcaatgcttcactgggagtggctggcatggcagcgatgccgagacagtctggcccgtgagtcaatggcatccagcccgataaatgagtctgataaaaagacaatcgctgatatgcgagatttggcaatcagcattgaagagtgtttgtctgaaccagtcgaaagccggggggatgaaatcattcatctgtatgacaggtcagatactgtcttttctgcaaaaaacgtaaatgttttgctgggcattatagataatttcgctctgcaacataccatgccagttatcaagactgccgattaa

SEQ ID NO: 446128 - DNA, 249 bp, Serratia marcescens
atgagacagcagtattgtgcagacaatcaatccaacgtggatagcgtcattgccggtgatccggtgtatgcctatctgaatggtgtccgtatcgttctgacgccccaaggtggatactccagccctatgtacacctcagcccgtcagatagttgaggcaaatgtggactgcgttaactcgcaagactggattgaccgtagccagcacgtcctgacccaaacgtttaataacgggaagcctttaggctga

SEQ ID NO: 446129 - DNA, 327 bp, Serratia marcescens
atgtccgggaatggaacgaagcatcgtatgtctgctgttcaacgaaccatcttactgtctatgtatcttctggaaaaaaaacttaaagagcccatagccataagcgatttgaggcggatcatcaacacaaacagagcctcacttgaagagccattgctggagcgcggaaacttcgctgtgtcctgcaaaacactcaacgagcggggctatctgacgaagtaccgggataagaggacgttgaaggtagcatatcgcttaaccgaagcgggaaaagttgatggaaaagtgctatctgatatatatctcaagtcccttgaagaagaataa

SEQ ID NO: 446130 - DNA, 597 bp, Serratia marcescens
atgcgggtgatcctgtcatccgtgaaacagctaagtgcgcaatcagacggcgtgatgatagatggtaaagtggtgccttgggatgaggctcttccgcttatgagtgcctacccggactttaacgcaactgagcagaaaaaggctgagtggatggggctcgctgccgtcgcgtggcaggaggactatcatgcgaaggttacagagatcacttctcgggctatctctgaaaacagcacccttgaaaatgacaatctctacttctggagccttctaaacgtcacgactcacaccttgagtaaactgcttcgttttgtgaacaggaaggcaatcgaagaaaaagcacctaacatcctgagcgtgtcaaatgatttactggttgcattgaacagtgtcaccaaagggacacaatccaccagccggatccgcgatgaaatattcttgtccgggatggaaaatgtctggatggaatttcatatgctctatttgaaagctaaagaggaagggcgtgaggaagattccgccatatacgtcgatacgctatcaattatcaaacaggtaaaatctgacttcattaatcaaccgaagagtcatagctaa

SEQ ID NO: 446131 - DNA, 588 bp, Serratia marcescens
atggcttctcgtggtgtcaataaagttattttagtgggtaatgttgggcaagacccagaggttcgttacatgccgaatggcggggccgttgctaacctgacgctggctacatcagagacatggcgcgacaagcagactggcgagtctaaagagaaaactgaatggcaccgtgtagttctctttggaaaacttgctgaaatcacgggtgagttcgtgaaaaaaggttcacaaatttatattgaaggtgctttgcaaacccgtaaatggacagaccaggccggggtggaaaagtacaccacagaggtagtggtcaatgtgggtggcaccatgcaaatgctgggtggccgtcaaggcggaaatgacaatcagaacaataatgccggttctaatcagggctggggtcagccgcaacaaccgcagccgaataataaccaaacgccagcccagcaactgaatcaacggtcacagggtcagaatcaacctcaagggcacggcaattcatcgcaacctattgattttaatgatgatattccttttgctggtttgggtgcgtcatttgggaagcatactattcacgccatttgttaa

SEQ ID NO: 446132 - DNA, 549 bp, Serratia marcescens
atgattggtcaaaagtgcccttcttcacttgctgtcggtacggtgctttacagtgcgtattttaatgtcgattatccgtccggcaaagtgtccggggatatttatgaagaggttgtacgtagtattaagcgttcacccaacaccgggaatgactcaaaaaagtacgttcatgttgtgagaaaaatcgacggcgtgacgtgggtcgatacgactaagccaccagccacgcgatacggtaagaagactgaaaaaacggaaggctgggcatcaagcattccgtcttactatcgcacaaagtttgtactcagtgacaaccttccgatggggttttgcactacaaggctgttagccattaaatccgctatcagtgggattaaaaggagcttgctttggtatgacgctgagttagccatttaccgtaaggatggcacggatcagaagcatattgatgagcttatcaaggaaaagcagggggtcgagcgctcgttaacccttgctaaatcgttccttaccaaagaaaagaataaacgggaaaaggcaactaaatag

SEQ ID NO: 446133 - DNA, 297 bp, Serratia marcescens
atgtcagttgcgctaaaatgtacattcagcattcctgttaacaatgatgaatttgtcgttctcatcgataaagatcagggggcttctgtaaccaacgatgccaataacgtgatcagctggcttgttgagaaccttgataacggcttgggtgagcgtaaggtctattaccgtgacacgaccggctcatatgatgagatggagcatgagaagggcgtcttcgtttcattcagtgcgtgcccgtcgcatgtcaaagaagcactggctgcgatggtggcgaaagtatccccggagagctga

SEQ ID NO: 446134 - DNA, 441 bp, Serratia marcescens
atggaaaaaaatcaagaaaacacttttttcgtgggcgcgttgtgggctgcgtccgttgtctggcgctgtcacactgaccgcatcatcgtgggtgatttgttgaaagagatcccggacatcgacgatgtagccaaaatcagcaaagaatacgacattcagccattgcggcggaacgtgatgcagactctccctctcgctcaggatgccacgtatgaaagcattagctatggcccgctggacagaatgggacggctgatttgcgaccacaccgacgtgacagggaaggacgagggtgattttgattcattctgcgtgtatgccgttgaaggcaataacgactgtcaggtgctggtggatgacctgtattctaaagaagaggcagaagaccgggcgcggattttttccgaacagttaacgcagattctggccgctaaacagtaa

SEQ ID NO: 446135 - DNA, 273 bp, Serratia marcescens
atgaaagcactgattattgtgccactggtatttgttctggcgggttgttcttctatgagccttgatgaacagtacgagcaggcatacgcagacgtagtgcgcgagcctaatgctgaaaacgtggctcgttacatgcagctgagtaagaatgttgctgatcgcgatatggagagagctaatcgtgcagcagaggccgctaccatcgaaagtgacaaaggtttcactgaatatttcaaaagatatggcagtgatgagttcaaaaaaagtcgctag

SEQ ID NO: 446136 - DNA, 924 bp, Serratia marcescens
atgtctattggattaattgctatcgtcatcatcctcgccgtcgtactgctgactctgttcaaatgcgtgcgcattgttcctcaagggcagctgtggctggtggagcgacttggccgctaccataagcagttaaacgcgggccttaacatcgttattcctttcgtggacagtgtggcctatcgtctctcgacgaaagaccagatcatgaaaatcccttctcaggaagttatctcaaaagataacgccgtgctgtctgtaaatgctatcacttacgtaaaagtagtcgatgctcagaaggccgcgtatggtgtggaaaattatcagttagccacagttaaccttgctatgacttcacttcgtgcggcaattggtaagcttgagctggatgagagcctgtcacaacgagatgagatccgagccgcattactaaactcaatggctgaccagatgactgactgggggcttgagctccgttctattgagattcaagatattaacccgtctgagtctatgcaggaatcgatggaagagcaggcagctgctgagcgtaaacgcaaagcaacagaaactatggccgctggtaacaagcgagctgcaattctggaagctgagggcgtgaaagagtcaacagtcctacgtgctcaggccgataaagaagctgccgtattacacgcggaagcccacgtatccgaagccgagggtattaagaaagcaaacgaactgctggctgaattaatgaataacgctggtggtgagaaagcgatgcaattccagttagcgacccggtacatcagtgcgctgtcttctctaggtgagagcgaaaatgcgaaaatcattgcgatgcctgctgatttaaatgctgcggttagcggccttgtgggatccggtgttgctctgggtgcgggcagcgagctcgctaaataa

SEQ ID NO: 446137 - DNA, 459 bp, Serratia marcescens
gtggattcatattatgtggtttggggatgggctatcgtttgtgcggtatttattttggtcgagcttttcacttcaaccttcttcgggttgtggatggcaatcgcggcaattgtgcctgcgtttatcgcgttcttcctcccggacgtctcactggtgtggcagatagggatatggatagtgtccatgattgtctgttccttcgtttgggtgaaggtcagcaaaaaaacctatccagaccagaccatagaagacagcattgtcgggcaaattggcattttgtctcgtggatgttcgcgggaaacctgcggcgttcttattctgcaaaaacccgtggaaggtttaacggaatggaaatgtttttctgatgaagaattgaagaccagtacccgtgttgtcgtttcccaaaaagtcaatcccggtgtagtgcatgttacaccatccaaaacatcttttttgtaa

SEQ ID NO: 446138 - DNA, 198 bp, Serratia marcescens
atgttctatccatttgttggttcactgagttttatgctgttcctgacctttatgggcgcaagcagcatcattgtgcttatccataaagaggatggcgtgaaatatacagttcggcatttatctttcctcgttgcaagctgtgtgatagccgctctgtttctgctattaacgatatatttcgtttaccaatcgatctga

SEQ ID NO: 446139 - DNA, 891 bp, Serratia marcescens
atgcaacgaatgtataacgagtcacctttctctgtacgtcattaccttgacggctacgaaggtagttttctctgcaagatggcccaccagcctgagttcgctgatccgtgctctgccgatatgacagaggcggaaatagctgcctgtgtcgatgtctggttatctgtccaccactgggaaacattcccagaagtggcattaaaaaaccgtgcaaaacgcccggatctcattgcccgaaaagcacagtggcttcacgtcattgagtgcaaaaaaacctttggtctgcccgtgatggaacaggcattcagctggctgaatagccaccataaccctagagccggattgccccacctgattagcattgcagtgaagcgcaatgccaccagcaggcggagcgatttcggtgttgagctggtgaaaaaaagcggtatagggctcatagaaattgagaagcgggcgggtagcaagctgggttctggtgacgatctggagattatccctcctacatacgccctgatagttattgttgagccccggattattccgggctcacgacgcttaggccgtgttttgtcagaacagttgaatgcagatacccgaatcgcgacagcgggcacaccgggcaatacaggcatgtatatgaccgactggaaacgcaccatgctacgcgtggagcagtacctccataacggcgagcctcgcagtagcagcgaattagtgacctatctggatagcacgggcgggcaccactggtgcaacaaaagcagtgccattagcgggattaatgccagtctgtcacggctgggttacgtccgttgcggccacgcaccggggaagaccaacttatggggttgggtagagggtaaaacaaaaaaaatcattaagcgctaa

SEQ ID NO: 446140 - DNA, 1431 bp, Serratia marcescens
atgaaaaagataattatggatgagtgtcacaacctcatagacacagcatcctccagactgaccgaagaacttcgtcgtattgagggagtcccggacgtagcataccgtgttgaaggcgagagcgtttttgtttttgatatcctcctttccattgtgaaaaacatcaagttgccttctgacccgactgagcgcgaagacgtgttacgtgtcatcgttcctgatttactgcccactgcctatgtctcagcgatagatgctgtcacttcatatggcataacacctgaacgctataccattgtcgaacgagacaccggcttttacgttaaaaataccgcgctgaaatcagtcatcccggtagccgtcgcatccgtagaagaggcccaagttttacttgccgatgtgctggtgggcaaaagaatccccactgatcacgatgaccttattgcaagtggtgaagtgcgccctgtcaaaaacaatttcgttctcgcagtgagtgacagaacaggtcaacatgcaatgggtacaactaagcccactcttttttatgcctttggtgatcaagtctttgagaatacccctaacggggtagatgagtttgattttacgctccctgatacgtgctctttcttcctgttcgatacaaccagtgttgctaactcaggaaagattggaggtgtgcctcctgcttcattccgtgagggttgtttgctgttgtctcgtgaacgctacgcaatgatggtcgaacaagcggtacagtggtttttagcctctgatactgcggttggtattgccaaatcgatttatgctgataagcaggcttgccagtcgcttttcaccgcaatcatttctgagacagcagggcaagtatccggcgttgtattcaatgaagatgaaacggctgtggtcggggctatccgccgtgagtttcctgagctgtccggtatccacgatgccgatatttatgagcactattgcgagttccgtcgtgtagaacattacttgagaagtgtcgatgcctctgatgtttttcgtgatacagaatatctgttttattttctcggtgatttctgccagtccgacctgagcgacgagcaaaaacttcaaaacaacgtggctgtaggtgccatagcggcttacttttttagtcttggccgtaatgtaaatgatgtgaaattgctggcaaaaatgtacgcgggtctgactaagacagttcatcgagtgatgtgggactgtagatgcttgttcgactatctttttaaagtcagtaatcaaggcgggaaaataacatctggtagccgggtgaaaacgctaaacgatatgttcagatcagcgagaacaactaacagctcagccgtatacctcgagcaatccctgtcagattttatggatagcagtgcaatgccagatatgtctaaaatcactaagcattaa

SEQ ID NO: 446141 - DNA, 558 bp, Serratia marcescens
atgcgtcgtagctttcatgataaaagcgcagttgtatcgaccatcgcagatgctgacctttccccggtaaaagagtggttcccgaccacgcctaccggaaatggcctgccgaaagagccgggcgtgtatcgtttcagaataccaatggaacatacccctgatgaaagcattgagtttcttgccctgttgcgctggcgcaggcatggggtgaagaacatcctttttccgacgtttgaatactttgttgatgacgagtttattaccattcccgaaggtactgaatggtcacaccgggagccgggcgatcctgattttttacttcctgacgcttttcctattgcgcagcccgttaacgatattgttcacgcttgcccgttctgcaaacaaaagcctcaaatcaaggggcgtaaaatagaccttactaccggtgacaaattctctaccgatttgccgtaccggtttaatcaattctggttcgtttgctgtgaatggatcggccctgcaaacagaaaaacaattactgagctgattagcgactgggataggacgctaggttag

SEQ ID NO: 446142 - DNA, 750 bp, Serratia marcescens
atgagaagagaatggatcttgacgtttccagaagtgaaggcgtgtctcgccgcgtcgtgcaggtatgtcgcactatcgaaaaacacttttgtggtatcgctaatttgcgtggccgggttcctcgcctgttggctaactctcgccggagtgagcagggcattgcagcaggaagccacgctatcgctatttgtctcgtacttcgtctttatgattgcggcagtgagctggtcgctgagggtggagggtacgcataagggcatgataatggtgatcgggggtattttcatttcgatactttcgttctggaattatcaggggctggggatgatgtccgtattggaacattcaggcgaatcattcccgctttccgggctcaatgcctttatctctatggatgatctgatagccactagcgccttgtcttctttatggaatgggttctactggataccactttgttttatccttctgcccaagttccgggctgataaaacagtgatgatgcacatggcctaccggcttctgattaatttcccggtatgggtcatacaagtgtttgtcttttcttcgctgtctctagctcttttactggcctcatctctcactaatttgcctgtgatcgtagttcctctgttaatggtatggaactgcgtttttgtctttctcgtgctggtgagaattgagaacggtacgccaccagccgtgataatggctcagatagcccgcataaaattaactttgaggacatga

SEQ ID NO: 446143 - DNA, 627 bp, Serratia marcescens
ttgacgggcgtgcttttacgccctttattgcgccatgaaagaattaaaataaaagcgagaatagacatgtttagtggtaagtacggtttgcaaacgggttctgagtatcatgaatgccttatttctttcgtgaaaagcgaaaagatgaatggtaatctgtctcttcgcaaatataactttattgcgtgcttaaaatgggttctgcccatcctgattatttttactggcatatactttcttggcgcgatctacctttttattgttgaatcttctcttttgtcgctggttatcgctattgcgttgggggcggctcttatcattgtgttatccatattaagcattttccctttcgacctgcaaagtcagttcgatgcgattgatggccgttttgatgatgaaagccttttacgcctgtgtaagcacaatgccccagatgacgtgatagaccagattatccgggcgttaaagaacggtaatacgctgagcttctctgagctgtatgatattttctggctatgtagtcggacaagtgctggcgttgatggggggagactgttggctgaacgttatgctcaaatcaaatgtcgtgtccggctccgccctttcaccaaaggtcatacagaatga

SEQ ID NO: 446144 - DNA, 438 bp, Serratia marcescens
atgaaaaccttctctgacattgttaaccatatgaatctgaataatcacaatattactatcgcgcaagtacgtaaaaccgttactagctggggcaagcgtaatacgctggttcgtagtgttgtaaaatatcaagtctggctggatagcaatgataataacgaccgtgttgttatctcaggtgaggttattcttaataacaaaaaaactggcccggagaagggcgtagacatgccgatggaaattcatcattactctgactttgatacggtgaagcgtacttttactaaaagccatcctgagcagtatttccgtatcgacggtctggaaaatccggcagacgttaaatccatgtatcagtcacttggtaaggttattgaaggcatggttatcaatgaaagttttcgcgttcccggcatgacagaatatctgcctgcctaa

SEQ ID NO: 446145 - DNA, 390 bp, Serratia marcescens
atgaaagagatttccaaagatgttgctatcgtatcgttgatccaccgcgactggtcgtgcgaggcgatttactaccgggtaaaaacaatccctatgccgggttctcctgctggtggtaatcatcttttcgtcatcattgaagacaagtgcgagttgatggataacgaaaaaagtcgtgagagtttttcacgaattatcttatcccgttatcccggcatccctgcgaagcgtttgcatctcatcttctttgtttcctgtgtcgaaaaaccgaacggaatgactgtcaaaatgtataattttgacagaaatgataataggcagtccgtgattaaacccgatcctgttgacttctctgagaatacagctgtgtgcgcaatggtaatgttttaa

SEQ ID NO: 446146 - DNA, 195 bp, Serratia marcescens
atgaaaatatctctggtcaacggtgttgttctcaatgtcagccgctttaatgccgatttctcattgaagtcacaagcagacgtgatgaaagagtctgctgagcgttgctcaagtttatttactgctggtgcgctggtggatgaacgctatcgcatcgtggcgcaatttgatgctttcggtactgtactcgcttaa

SEQ ID NO: 446147 - DNA, 336 bp, Serratia marcescens
atgtcaccgataaaactgtttttggtctgcctgcttgcttttagctctgcggctatcgcgtcagataacgccggtgggaaaccagaaaaaaaagcaggaattccgctcgatgtaaaacagtacagtgaagtgggtaaattcgacgtggctaaccccacatcactgagcgtggtcaagttcaatggtaagacgtatgtcttgtctaaaatgcctgatcgtcgcttgtacggcttggagttaaatgtggataagcaaggtagggaagttctctgcggtaagttgggggccagcctgaaaatgacgaactgctattacatttattttcgcgaaaaataa

SEQ ID NO: 446148 - DNA, 186 bp, Serratia marcescens
atgatgaaaagcattatgccctctcgctcggtaacgtcattgttggctcgtgaagtatctcttctcggggagaaaatgggtgaggcgatgacgcaatgtcggaacagcaaagaagaggctgctcttgaagatgcgctgcaaaatttggcccgtgttaaatccactctggacaaagccgttaattaa

SEQ ID NO: 446149 - DNA, 324 bp, Serratia marcescens; identical to SEQ ID NO: 308279

SEQ ID NO: 446150 - DNA, 279 bp, Serratia marcescens; identical to SEQ ID NO: 308280

SEQ ID NO: 446151 - DNA, 315 bp, Serratia marcescens; identical to SEQ ID NO: 308281

SEQ ID NO: 446152 - DNA, 921 bp, Serratia marcescens; identical to SEQ ID NO: 308283

SEQ ID NO: 446153 - DNA, 177 bp, Serratia marcescens; identical to SEQ ID NO: 308284

SEQ ID NO: 446154 - DNA, 438 bp, Serratia marcescens; identical to SEQ ID NO: 308285

SEQ ID NO: 446155 - DNA, 723 bp, Serratia marcescens
atgactgaacaaaaaattgagtctgtggctggtgctgtttttcaggtgcgccttcttgatggctctaaagaacaggctgaatgggtcgaggtgagcgaggcggagtttcatactcccctgcatgacccggagaagtgggaaaagcgcattctggtaaagacagcttatgcccctccaccagcccttgatttggcgtgtctgaatgaagcccgacaatgcctgtttgttttggaacagataggcagtctcgatcatggtgacattgactgtgacacaatcgacctgcgttttgagctcgatggcatggacaccggtactgatgtctcggtttctgaatatgcggcccgttcttctgcggttatctcgcgtttgctaacgattatctcgaattcaaaaagtgacacagtaacttctgatggtgttactcgccgggtacagcatagcgatgatatctgttttgatgcgtttgctatggcatgtaaggcgaagctggcaaagtcacgggctaaggggcgcggtggctgggagtcccggacgcattgcagtgatacgctgctggcagagcagctggtggctcatttgctgaaaggtaacgcgggtacgtttgaagacattgccgtttttgccatgatgctccaccagcgcggtgcagacccacgggtactggctgatgccgttctgggacttaatcagaaggtgactgatgaaactgatcaaggctga

SEQ ID NO: 446156 - DNA, 516 bp, Serratia marcescens; identical to SEQ ID NO: 308286

SEQ ID NO: 446157 - DNA, 315 bp, Serratia marcescens; identical to SEQ ID NO: 308287

SEQ ID NO: 446158 - DNA, 291 bp, Serratia marcescens
atgttcactatcagcaaaacgactcacaatatggcaaaaagccggggtatcgatctgaccttttccgaaggcatcgggcatgatgatgggacattgctgtgcttctgggaacttgaagaggaaagcgagtggctattcagctatcaggtgtcaggccaccagcttgagtggcacggcaacatctacgcctctgacagtattgtggctggccttcccccggtgatcgctgatgatgcggccctgcgtgctgtagtgcgacaacttgccgttatgatgcagaaagaaaagtaa

SEQ ID NO: 446159 - DNA, 1068 bp, Serratia marcescens; identical to SEQ ID NO: 308289

SEQ ID NO: 446160 - DNA, 330 bp, Serratia marcescens; identical to SEQ ID NO: 308290

SEQ ID NO: 446161 - DNA, 390 bp, Serratia marcescens
atgctcttctgcgtgatcccttcggtacttctgacgttaagacagatattgaatgcagacagtcacgcgctcagcgcgtcggtcagtgagcctgcggtggtactgtactctgctggagtgacgaacctaaaactgtttttcgtctatgcggtggtgtgccctgtgtacccggaactttcgggccttgtgctagtggtcgtatcagggatggccatcattaccaacgcgatacattctgtatggaaatgccgcctcatcatccggctcattgagagcgggcttatccagcaaagcgctccccaccatcgtcgttacgccaagaagctgacaaggcaacacgacaaccttcgttgcctcgcggccctgttctggcgaatgaaaaataaatga

SEQ ID NO: 446162 - DNA, 519 bp, Serratia marcescens; identical to SEQ ID NO: 308292

SEQ ID NO: 446163 - DNA, 423 bp, Serratia marcescens; identical to SEQ ID NO: 308293

SEQ ID NO: 446164 - DNA, 744 bp, Serratia marcescens; identical to SEQ ID NO: 308294

SEQ ID NO: 446165 - DNA, 294 bp, Serratia marcescens; identical to SEQ ID NO: 308297

SEQ ID NO: 446166 - DNA, 366 bp, Serratia marcescens; identical to SEQ ID NO: 308298

SEQ ID NO: 446167 - DNA, 660 bp, Serratia marcescens; identical to SEQ ID NO: 308299

SEQ ID NO: 446168 - DNA, 330 bp, Serratia marcescens
atgcgcggtcgtgtaatgattctggtatgtgccgaagcaatggacgtgatccccgactttaaattttgtttctgtccctgctggtgggaattgagcaagcacaagattattagcgggataccactcatcatcacagtcagcccgcgtcacccggtacatatcaagcccattttcctgaactatctctacaactgttttcaggccatagcaacggccaacataacgctctctcaggtaacaaaagaccagactgcctatctctattttctcgttcattcacccttccttctctgcttgttctgttacaacagattatctcatccaaagtaa

SEQ ID NO: 446169 - DNA, 276 bp, Serratia marcescens; identical to SEQ ID NO: 308301

SEQ ID NO: 446170 - DNA, 516 bp, Serratia marcescens; identical to SEQ ID NO: 308302

SEQ ID NO: 446171 - DNA, 723 bp, Serratia marcescens; identical to SEQ ID NO: 308303

SEQ ID NO: 446172 - DNA, 324 bp, Serratia marcescens; identical to SEQ ID NO: 308305

SEQ ID NO: 446173 - DNA, 1206 bp, Serratia marcescens
atgtcagataattttgacagattgttggacacgggtaagcgtgccagcatcatgcttaactggctcaccgaccagatccaatctaaaagggatgagcttgaccagacggagttctataaaacgtattcaaaagccgccgtcgtaaaaatgccgcacctgaccaaacgcgctgtagataatgccgttgaggaaatggaggcaaatggttatcagttcggaaaacgtcatgggggcgttgccactcagtatgctatgaccattcagaacatcagcgatatctatgcgcaccggggtataaaaacctaccgggaaaagcgcggaaaagcgttcgttatttttgttgttaacctgaaaggcggggtttcaaaaaccgtatccaccgtgacgatggcgcatggtatgcgtacccatcccaccttgctgcatgaaaacttgcgcatccttgttattgacctcgaccctcaatcgtcctcaaccatgttcctgaaccatcaccatagtatcggtactgtcgataattccagtgctcaggccatgctcaataaagacctgacccgtgaagaaattctgaatgagttcgttaagccttctatcgtgccgggcgttgatatcatccctgcatcaatagaagatgcgtttatcgcctctcgctggtcatctctatgcagccagtaccttccgggcatgaacgagcacaacgttctaaatgagaatatcatcgacaaaatcagcgacgactacgatttcatttttgtggataccggccctcatttagatccgttcctgattaatactttagcggcaagtcacatgctgatgacccctgtaccgcctccgcaagtggatttccactcaacactgaaatacctcactcgactgcctgagctgattcagatgctggaggactccggtttaccaagcaaaattatcgccaatgtcggctatatgtcgaaagtctcaaataaagatgaccacaaaaagacacatagttttgcgagagatgtttttggcgcggatatgctcgatgccacactccctcgtctggaggggtttgaacgctgcggagaatcatttgacaccgtaatcagcgcgaaccctcaaacgtatgcaggcagtcaggatgcactaagagccgcccgtgttgcagctgaggacttttcccgtgccgtgtttgaccgtattgagctattgaggggtgccgcatga

SEQ ID NO: 446174 - DNA, 987 bp, Serratia marcescens; identical to SEQ ID NO: 308307

SEQ ID NO: 446175 - DNA, 651 bp, Serratia marcescens; identical to SEQ ID NO: 308308

SEQ ID NO: 446176 - DNA, 513 bp, Serratia marcescens; identical to SEQ ID NO: 308309

SEQ ID NO: 446177 - DNA, 258 bp, Serratia marcescens; identical to SEQ ID NO: 308310

SEQ ID NO: 446178 - DNA, 363 bp, Serratia marcescens; identical to SEQ ID NO: 308311

SEQ ID NO: 446179 - DNA, 657 bp, Serratia marcescens; identical to SEQ ID NO: 308312

SEQ ID NO: 446180 - DNA, 1002 bp, Serratia marcescens; identical to SEQ ID NO: 308314

SEQ ID NO: 446181 - DNA, 486 bp, Serratia marcescens; identical to SEQ ID NO: 308315

SEQ ID NO: 446182 - DNA, 639 bp, Serratia marcescens
atgtccttatctgcaaaatatatttacgccactgccaaagtttctatgtctcacgtactggatcagaacgcattcttcgacatcgcgtttaacgaaaacacggagtacgtctactcgggcatcaacaaaagcatcatcgtgaatctggacgctgccgggaaagactgggaaagcattgaggccagactgcttaatgacggatggagcactgagcgttttccggggctgctcggcatctttcaatcgctcgttgcccagcggatcgcctgcgtggagttccatgaacatcaccctaaaatgcagtggcataactggttcaccccggagacattcatggaagtaaaacccatcggttacgataagcctctctttgcctataaagaactgccggacgaacagcagaagcaggccaacaaattaatggtagtcgtttcccctgaaacgctaaccgacaaggtttttgcggtcgtaggcaacggtcgagtcgtgaaggtagatggcttgtacgagatggtgcgggagccggatgaaattaaacccgactatgaccgactgatttttaccccaaccaaagagcggctggtgctgaaagtgaataaagataaagacacagttaacatcgcaatgattatgagctga

SEQ ID NO: 446183 - DNA, 1425 bp, Serratia marcescens
  misc_feature (1391)..(1400): n is a, c, g, or t
atgagtgagtggaaatacaacatgccttggcgtcctaactacgaggcatttgaagtcgccggttggtctgctggtatagcaagttccttggcggtaaatgccttttttgatatgccatctctcccctgctatatggccgttgcagtccaagccgcttatggtattcgtgctttgccggatgcctattacgtgtataagcacaaacgtcgcttagcgaagaagccagatgtattaatcatgagaattgagcaaatcattgatgcaatgattaagtatccagattgctatattttcggtaagggttttcagtgggggcagaatgaagggcaatctgcatttgaactattaaagcgtgatatcaagaaactgacagccaagaccgatgatgactttatgggcctgggctggattcatcaagtcggctctgacaatgattatgtccgtaccgttgaaaacttattatcactgcacacactgataaccggaacaacgggttcaggtaaaacaacgtattataaactcatcattctccaagctgcattgaagagacagccactcgttatggttgacccaaaaaatgatgaagccttagctcaatggatggaaatgtgtttgtcgttcgttaaccgtgcggaaaagctaaactatttttcactggcccatcctgagaaatcagtgcgcatctcacctatcaccaacttcactcgatccggcgaggtcgcgaaccgtatcatctccgttattcaacgcggtgactcgaccagtgacccatttatttcattcgccaccatgtctttaaccagcattctcgaaatgatgaagatgtgcgaaatcaagccaacgctaaaaagcctcaaaacacaattaggctcaaacattacggcgctggcggagctcgttactcaggccatcacaaaggtaggccgcgaagttcttcctcatggcatgtttgatagcgtgctggccggaaagaaaagccgtatgagcgggaaggttgttgactccgtttctattgcaaaactgtgtgctgaaatctacatggatgatatccggcacaacaaagcgttcccggacattgaagcgggtattgataccctgagtcataaccgcgaacacttccagaagatgatcctgaacgtcatgcccatcctgtcccagttaacaactggttttatgggcgatttactgtctcctgataccttcgaccctgatcagatggaagatgaccgacctatcgccaatgtgcgcgaaattatcagcaccaacggcatgttatatcttggccttgacgccctttctgacggtgacactgctgcggcggtgggctcaattttcctgtcagatatcaccagcgtggcatccgaaatatataactttatgcagccacgagnnnnnnnnnnagccacgaggcgaagatattgctaa

SEQ ID NO: 446184 - DNA, 2679 bp, Serratia marcescens
atgttcaatagattaaagacgttgttttcaggtaagagaacaccgaaaccaactgttaaccagattatcatgcccgcagaggtggtcgaagcgcttaccggaagtggtgacatccttcgctacccaccagctgaattgggttttccggctcaagttccgggctttgcattgctgtctttgcaggaagaaatcatttccaaaataaaacgtgaattgatgatccgtgacgcagaatatgatgaatacattcagccgatgctgacgaacttcgccaactttgttcacctgttacctgcgtctgaatttcaccatcatcgtgctcaaggcgggctactacgtcatacgcttgaggtggtgctttattcaataaaaatcgcgaaaagcttcgagtttgatgcaaacgagtcacctgttatcaaatctgacagggctttagcatggcgtattgctgttgtcgtgggcgcggtcatgcacgacatcggcaaacctatctctgatgtcgatgtatgggataaatccggggaaaaacactggatgcctgcggttcattgcctccatgaatgggccgaaactgaaaagattgagcggtactttattttctggagatcggataggcatgagcgtcatcacaataccagcctaaccaaaatgactgacattgtacctaaatcgcttttggcgttcttaatgcaggaagggaacgacatttataacgagctcaccgaagcactcgcaggcagtaactcgtttcgcgccgtaacttctcgcaatgaaactgggacagtcttcaaaaataaaatccataaaattgttgctcacgcagacagccgctcggttaagcaagacctccagcgttattccggggatgccgtgcgtgcgtctcaaactggtgtgccggtcattgcccgtattgtcgatgccatgcgtcttctgatcaaaaaggaagagtggaaacccaatcaggcaggatcacctctctgggtgactacggaaggggtatttatcgtctggggaactgctgttactcctatcatcagtatagtgaaagagtctggtattaacgtaccacactcagccgatagccttgccgatatcatgctgaactatggcctctgcgtgctcaattccaatgactctgtttactggcgtttagcgccccatatccttaacgataagatatctcgccaaaacaaagaaccgaaaaacgccctcagctgcataaagctggttgacccggttgtactctttactgatgacgttatgcctaacccgacatcctgccggataaaacttgcggatggttggaaagaatttaccggtgcgggcttaaccaaacaaaagtcacagccaagtcgcccttatgttggcgaaaagcctcctgagcgcgtgctgaatgttgaccctgacatattgaagggtggttccctgccccctactgatgacctacctcctgatggaaccgttgttaaacgcggtacagtgattgagcaaaaaaatatcgtcgatcatatgctgcgtatgaacctcctttcgccagaaaatgcagctgcaatcaagtcccggaatgaaaacgaggcaaaggctaaggccgagtctcaggacgttgaggcaagcccaaaaccagcagaaacatcggttccggctccagccaaaggaaaagcagaagcagaactttcagataaaaagtctcgctctcaaaataaaaagtctgaaaaagcagcctctcccgtcgctgaaaaagctgttcctgaacaaactgaggatcagggtgaactcttcggaattgacaacagatacaacgactaccctcacgtcgatactgatgaagagaatgatacctatgaccttatggaacagtacaacaaccagactcaggaagaaccacctctgaccctgcaagagagaatggcgcgtgcggccatccagaaacaatacgagcaggatgaaaggaacattaatcaggatggtgccccaaaagaaagtagctgggaaaaagcacgcgccaaaatccggcaagctcaggacattacagacggtcatgcagttacgtcagacacgtatccacatacagaatcagccgatgtttcagcctttattgacgatgaccatcacttctctgccatgtttaacgatggcccagatgaagcaaaacagatcctcaaaaggctggtgaaagagcgagcgggtgaactctttgctgataattatcatttatttgttcacaaacaaaatgaacaagacgagcacgattataccgttttggttaatgctggttgggtatggaaaccgtttcttgagccaatggataatttccaactctataaatcaaagccggggtttctactgagacgcggactaaatgaggacattgattatttatcaggcggtacatacctgaaaagtatctaccctgtagatccaaataaaagttattgcactgatagcgccttatatcgcgccatcgcttcctacggtctgcttaaacaaacctttgataataaagatgtgattgcaattagcggttcagctatcagaaacatggcaaagtccctgcggatagacacagtaactgttcgcttcctgatttgttacaactttgattcagtgagcaagcgtggatcagagcatgtattagtggatgaaaatattaaaccttacatggtggattctcatgagtga

SEQ ID NO: 446185 - DNA, 582 bp, Serratia marcescens
atgaaaaattgtcatcggctaaagctgtcgatagtgactatcgtagcggctggagtctttctgtcgggttgttcggacagtaaagagaaagaaaggcagcaatatgagtacgtgaattacacgcagatcatcccgccgaaaatgtacattcccggtggctatacgtacacagaaacatggcatggaactatccgtggtggagcagcactgacaccaccagcgtatgaacatgcgttagttagtccatatgcgatttatgatccgacaggcaagcgctatggtgacgaacgtgataaatacaccgatttacttctgacaagtgtggctaactctgcttatgcaaaaggcccgcgtggcacctttactcagacaccgagtttttgtggtgaaaactcccggatgctgagtggcgcaagtcagaaagccacacgctctgagtatttgcagataaaacagcgttactgctctacgccgggctatcgcctcacgcaacatgaaattgatgttcttaatggtggagaacctcaagagttacgtgattaccgtatcaatatgtacatcgataaccagttaccgaagtaa

SEQ ID NO: 446186 - DNA, 909 bp, Serratia marcescens
atgagtcagttaaaaaaaccatccgtcgtggggccattggtgatcggatgtttagtgattgttgccgctggcgcgtcagtttatgcaggatatcaagcgcacgataacgaaaaaaacataaaccaagtcaaagggcttgttattgaaaacagcaatatgctgaaaagtattcaggccgacatcacttaccatacttcgcttctgaaaaagggaggtggagcggatttacagggctcagttgccgaagcactgaaaaatattgaaaatgataaagttgcagaagcacaggctaatctatacaaaaactgggatgcgtctggtgaaagtaaagacggccatcatatgtacggaaacccaagcgctcgctttaccctgattaactactccgatctcgaatgcccattctgcaaacgattccacgaaacgcctaagtatttggttgatagtgccaaaaacggcatggtgaactgggtatggcgtcatttccctctgtcattccatgagccgatggcctctaaagccgcaatgatgggggagtgtgtagctcagcagaagggtagcaaaggtttctgggccttcaccgaatactggttcactaactcggcaggtaacggccaaggctttgcagggtcagacaagatccctgaattgttcggactgaataaggaacaatacgaatcctgcctgaccgacccggtgattatcaaaaaaatcaaagatgatatgcaggccgggaacgttgcaggggtaacaggtacacctgctactatcgtcattgataatgagacgggtaaaactgagacaattgttggtgctcagcctttcgctaaattcgtgcaagtgattgagggtatggcacacccagagcgagctcaggctcaagaaaccgcgcctccggctcagaagtag

SEQ ID NO: 446187 - DNA, 363 bp, Serratia marcescens
atgaaaaaaatactgattttgttggtgttatctttaacttccgtttcggcatggtctgaggatgatttcgtactagatgagcctgtagcggaaaacgtggccccggtagaagggagtgaggtcgatgagtacctgagctcaattgccaatgaaaatgccgcgctaagcgtcgtgatgagcgatgttgtggatattaagcgtgaacgttgcgatctggctctggggtttaaggatatcaaactaatatcctcaaaagacgccgtattcaaagagctggaggataaagtggagtcagatcctacttacccgaaaagctttgaatataagaataagataaaaacttattttgggaaatgcagctga

SEQ ID NO: 446188 - DNA, 636 bp, Serratia marcescens
atgttcaagaaaaaaacagttttatgggttgccctttttgcaaccttgagcgtctcatcagcacatgctttcagtctcggggatattgttgattctgcacgtcaggccattggcaatgatagcgactcaacagaaacgagcgtcacgcagtctaacccggcaaaagctggggaaagcagaatagcaattggattttcaccggaagggtcagctcaggccgcgatcctagagttcattaactcggcgcaaaaagaaatattggtgtctgcatactcctttacttcacctgaaattgtccgggccttaactcaggccaagcgtcgtggcgtggatgtgaaaatcgttgtggactataaagggaacactgcaaagagctctgttgcagcgatgaatctggttgtcaatgcaggcatacagataagaactattcagaagtacgctattcaccacgataaattcattatcgttgaccgggaaagtgtggaaaccggctcattcaactattcaaaatcagccaatacacgcaacagcgaaaacgtgataattctctacaacatgccgcaggtagccacgcagtattactcgcactggctgtcacgatggaacgatgcccaaccgtggagttcaagctactaa

SEQ ID NO: 446189 - DNA, 339 bp, Serratia marcescens
atgaaaactctgaatcgttctaacttaaaatctgttctggccgcttctgctgttattgctctgggcgtaactgctgcatatgcaaacggcaccgaacaaactggtttcagcgacgtgtggaaaaccatcactgactacatgcagggttctctgggccgcgtgttggttggcctgatcgttatcgttggtgttgcggcagcggttgttcgtcagtcactgatggtgttcgcagtggcagttggcgcagcaatcggtctgtactactctccagacatcatcgatggcatgatggcttctaccgaaggcgtgaccactgtactgcctgcggctggtatctaa

SEQ ID NO: 446190 - DNA, 381 bp, Serratia marcescens
atgagcgaaaatgtattgaagccgtatgcagagatgaccgatgaggaaaagcttgagcgctacaatgcgctttcaaaagcagcatctaaagcggtcaaaagttcaatcaatctcgatgacgatgaaagaaagataaaaacagaagtaaaagaagccagtgaaaaggttaacgagctttcaaaaaaactgggctccggtgagagtcatgatcgtgaagcctacgatgtagctatgaaagaactgaactccgccaacaaaaggctgggtaaattcctcgacaattacgaagataagcgcgatggaaccggtgctcacctcaaggcgttgcaagattttattggcgagatgattggtgagatctacgatgagcagccgctttaa

SEQ ID NO: 446191 - DNA, 1467 bp, Serratia marcescens
gtggcattaactgatgagcaggaaaaactggcaagttttacgggccagttactttgtggcaaagcctacgctggtacgggtaagacgtttaccctcattcagttctctatcaggaacgcagacaaaagaattttgtacattgtttttaacaaagctatccgtgaagaagcagaaacaaaattccctaaaaatgtgcattgtgccacgtctcacgcgatggccttttcccgattcaaagagtatgccgataaaacacgcatgaatatcagcgtcaaagagtaccgggatattctgggggaagataactggcaggtggtcaagttggcggtggggggcgtgaataacttcatgaactcagctgatcgagttatcactatggagcacatcaaaaaggatgttcaggacgaggataaaatttcgtccacacgttttgataccgcgttacgggcagcaaaacggctatgggagggtatgatcgatataaattcagacgtaccatgcaccggcaatacgctgctaaagttgttccagctatccaatccttcgctgcatactctctatgacatcatcctctttgatgaggggcaggatgccaaccctgtcacactcgatattgttctgaataataactgccgcaaagtcgttgttggggatgatcaccaaatgataaaccgctggcgtggggcagagaacgccttagcagtggtcgaagagcagggcgcggtaattctccgcctaacgaagtctttccgtttcgggcctatgattgccgggcttgctaacctcatcctgagcatgaaaggtgaaacacacccgcttatagggctgggtcagctggattatattagttccccacaggaagtgatggcgcagggcttccatgcgatcatcagccgcacgtttatgggcgttgtgcagtcggctcatgaagcgataatgatgggtaaacgcgtgatgtggaatggcgggatagcaaagtataaccttgatgaacttctggatattcactcactaaaactgatgaaatatgaccagataaaaaacaagaaaatattgaaagactatggcagctgggccaactacgaagacattgcggaaaagaccaaagacaccaacatgaaccgcgccattcggatcatggacgagtacattgacataccgggcatgatttctaccatgcgtaacaatgaggctaaaagtgaagctgaggcagatctgattgtcaccacggcccataccagtaaagggcttgaatggaacaatgtggtactgaatgacgactttggttccgtccttgaagccatagacatgaaaaaaccgaaagcctccatcattgatgaaatgaacctgatttatgttgctattacgcgggctaaagactatctcagtattaactctacgatcatcgaattgatgagagagttcagtgtgcggcaggagaacgggaaaagtatagtgattatctga

SEQ ID NO: 446192 - DNA, 666 bp, Serratia marcescens
atgaacccggaaattgtagatggtatacgcgccgactcagttgcaaattacatcgacatcccgctttccagctggacacctaagcagtcttaccttgtgtgtcgcgggctggtggataatggtattgtgcccggaaaagttgtgatcggtgctttcagagagagagtttttgaatcattttatgaggatcatgatgatggctatgcagttgtgcattttaactacgcatggatagatgccggggaaaatggtgtgattgacccctgccgctctgacctgaatcacgcggatcaacggctttttcattctccactgacgcaggaataccacgcaccaattgacccgctggagatgaagagtgcagaccttccgccgcattacgccatagatgagctattcccactgaaaagaggcttgcacaaagaagtcgtgaatcggctattaggttataaggttgaagtggccgggttaacaatgattgaagctgcatacctagctacgcttccggtgttgacccttggggataatgctaaaatgatttatctgtttttgatgcagaacaacctcaataagctgataccgatagataacgtggaaaaatttttcccacgattggcaagagtttcacctcagctttttcagccaccagcctttgtaaccctgtaa

SEQ ID NO: 446193 - DNA, 1233 bp, Serratia marcescens
atgactgagaagcgcggaaccggaacagagtatggtcaggataagctgaaagaaagagcagaagcctctgaggtgactgaggaaaaaaagcctaagtcaaagctcaaaattattagcatcgtggtcatagccgctattggggtgggggcattgtatccggtagtcttcgacagtaaaaaaacaccggctgaaaaaaacgaagaggttgtggctcttaattcagacggtactgcgataggcccagtggtcactaatgctgatgataaagagagcctgagtgactcaaataagtccgtcaccaccgacacggccattgcagataaacctgctgcctctgaacacagcgatgctgataaacctgctgaccctgaaaatagcgatgctgataaggctgctactgataaggccgatgcaggcaacgctgaacagcccgttgatcataccgaccctgagcagatgctgatggatatggccgcacctaccaatccgtcagttgaaattgtccctgccgagaagatagtttcggatgcccacaaaggcagtcccgtaccgcaacctatcgctcagaatgtcagtgacggatcagctggtatctctgacaaactggccccggaagacgttcagggcattaagaatgccgttaaccatgacccgaccgtaaacaacgccaatcagcctgcaaatgaggctaatgctgctgaggccaatgctgcgcctaagttcagaacctttgagccgtctaaatttggtattgataacgtcgctgcaccgcaacacgtcattgctcaaccttcagcgcaacctgctactcttccgcagtatgcagctaccaacaacgcgccatctgatagccagaacagtgacgacgtaatcaaaaactatactgggcaatcagaagaagttacctatcaggttcagtcccagaataccgtttatgtgtacggttcatttgctgcaaaagtttatctgttacccgttggcaaaaatgaaaaggtcaacgcatatctttctgactctaaagggtggcaaatcagccagctgccgggcgatattcttcgtattcaacgttcagcaaacaagtcggattggagtgacgctactgaccttttccttgtggccgggaagcgcacttacaccttaatcctgcaagcagttgatcagccgaaattgcgtactgacagcctccgttatatggagcctaaaacgcaaccagcacataccggaaaaaaataa

SEQ ID NO: 446194 - DNA, 975 bp, Serratia marcescens
atgattgaatacgaatttcatgaaacagcaaatgcgttcccgtatatcagtggtgattctttcgagtccctgaaagaagacattcgcatcaacgggattcttgaaccaattttcctgtatgaagggaaaattatcgacggaagaaaccggtatcgtattgcgaaagaattgaaccttgaagatgtccctttccagaactatgaaggtgataaccctgtaggcttcgttcagagcatgaacctccatcgtcgtcagttgagtcccagtcagaaggctgctgctgccgctttcctcgctgatttccgccaaggtaagcacgatgatgaagaagagtaccagactcaagacgctatagcgaaaatgcttggcatttctaagcggatggttgttgaggccaccagccttaaaaagaatggtgataccgacttgattgaacgtgtacgcacgggagagataagcctacataacgccactgctatcgcccggctcaacccggaagaccaaaaatctattgtgggtgaaggaagccagcgggctaaagaagtcgctaaaaaaattaaagcgatgacgaaaggaaaaggccggaagaaaaaagacgacccggaacggattattgatatcgctgatgtcgatgccttctccttaccggaaaaaaacatatcaacgagtgcattcgagccggaatctatcgaaatggaaatagacgatcccgcgcctgaatctgcccctgtaaaagtgaggaagcctagaggaaagaaaattgccatagaagaggccagcgatttcggccactcgttgatagacgctataatcgtgctcggggcaaccgctgaggatgccgatggggggaacaacgtaatacaggccgcattatctgatgagcaactttcattgtttgctgattcttataatgctgttgagttacgggcattgctaactgccgggctccgagagttagaaaagctagttaagtaa

SEQ ID NO: 446195 - DNA, 687 bp, Serratia marcescens
atgctgacaaaactaaacagcaaaatggacgccgccctacccaatgtcatagcttccctagccttgtacttcgcttacctctttggtgtcggctctgttgtgaaaaacatgcaaataggcatgtcgggcaagatgattaagcgaatcaaaaacagtgcagatgccaaacgagttttagagcaaatgacgtgggatcagtttgaaaaaattctccgaaaattttttgagactaaaggttacgttgcgactttaactaacactggtgcagatggtggcgttgatattgctctgagcaaaaatggtcgccgcgaaatggtgcaggcgaagcactggaaagtgaaccgtgtgggtgttgccgtggttcgtgaaatttacggtgtggtgcaggccgaaggtatgcacaaaggttttatcgttacatctggattgttctctgaggatgctcgcgagttcgctgacaaagtgggaggcaaaattgtcctgatagacggaaacctactgatagaaattattaagggtgactccaattttgagaaacagaccagtgacggcattagcagtgcagtccctctcgatagtaacagttgttcgatttgtggtggaaccatgttgctgagaactggaaataaaaaaaccttctggggctgttctaacttccctgagtgcaggaatacccgtgaagtttga

SEQ ID NO: 446196 - DNA, 438 bp, Serratia marcescens; identical to SEQ ID NO: 308318

SEQ ID NO: 446197 - DNA, 1038 bp, Serratia marcescens
atgtatggcctgatcgacattaattcctgctactgtgcctgcgagcaagcattcaggcccgatcttgctggtaaacccgtagtagttttgtcaaacaatgatgccagctgcatagcccgtaacaagcaggcgaaagcccttggtataaaaatgggcgagccattctttaaaatcaaagatctcatagaacggaacaatgtcgctgttttcagttcaaactatgccctttattccgcatttagttcccggtttgcatctgttatagagtcactgactccgcgtagctcagtgtattcaatcgatgaactttggtttgatgccacgaatatcactggtttaatgactcttgatgcctatggccgcatgttgcgagaagaggtacagcgtcagacaacgcttacttgtggtgttgggatagcaccgacaaaaacactcgcgaaattgtgttctcatgcttcaaaaacctatccggcaactggcggagttgtcgcgcttgatgatgttacccgtttagaaaagctgatgcggcttgtgcccgttgaagacgtgtggggtgttggcccacggctgggtaaaaggcttcggtttatgggagtggaaaccgcgtttcaactatcctgccttgatcctgttcgggtacgaaagcagttcaatgttgtccttgagcgtaccgtcagggaactccggggggagccttgcatggcgcttgacgaaaatgatgtgatgaaacagcaaatagtcgtttcccgctccttcggtgagcgagtcaccaaccttcatgaaatgcagcaagccataaccgattatgcggctcgcgctgccgaaaaactccggcaagaaaaagggtatgtctctgtaattggtgtttttatacgcaccagcccctacgcagtaaatgatgtaccttattccaatcaggctactgaaatgctggtgactccctccaacgacagcagggatattattaatgctgcacaacgcgcattaaggggtcagtttggatatcgaaaattattgtacgttaggctcattttttga

SEQ ID NO: 446198 - DNA, 885 bp, Serratia marcescens; identical to SEQ ID NO: 308320

SEQ ID NO: 446199 - DNA, 324 bp, Serratia marcescens; identical to SEQ ID NO: 308321

SEQ ID NO: 446200 - DNA, 879 bp, Serratia marcescens; identical to SEQ ID NO: 308322

SEQ ID NO: 446201 - DNA, 549 bp, Serratia marcescens; identical to SEQ ID NO: 308323

SEQ ID NO: 446202 - DNA, 666 bp, Serratia marcescens; identical to SEQ ID NO: 308324

SEQ ID NO: 446203 - DNA, 351 bp, Serratia marcescens
atgtgggaaatattaacgagagacctcttcgattcatggttcgaagaacagaatgaggaaactcaaattgaagtgttggcggtgctcatgattttacgtgaagatggcccaaaccttggtcggccccaggtcgatacactgaaaggttcgcagtttcccaatatgaaggaactgcgaattcaggttggtggtcatccgattagagcgtgttttgcatttgaccctatccgccgtggcattgtgttatgtgctggtgataagaaaggaaaagacgaaacgcgtttctataagaagttaatcaagatggccgacgctgaatactcagcgcatctattagagcaggagaaataa

SEQ ID NO: 446204 - DNA, 300 bp, Serratia marcescens; identical to SEQ ID NO: 308337

SEQ ID NO: 446205 - DNA, 837 bp, Serratia marcescens; identical to SEQ ID NO: 308336

SEQ ID NO: 446206 - DNA, 402 bp, Serratia marcescens; identical to SEQ ID NO: 308335

SEQ ID NO: 446207 - DNA, 291 bp, Serratia marcescens
atgcgtaatggtgggctctactttcgctttttccactatgctctgctgatctgtctgttgattggatgcattctttttggcagggcgctcatctctatctactggccggggtattgggttccagctgatgcctggtatgccttcgggatagtgccgggtgtttggctcgcgcctctgattgggctgattatcttcatattcctttcttcgctttatcgctatttcggggtattggtgatgacaacctgcatcgcctgcgccggggtggcttttttcgtcctcaaatcgtag

SEQ ID NO: 446208 - DNA, 525 bp, Serratia marcescens; identical to SEQ ID NO: 308333

SEQ ID NO: 446209 - DNA, 219 bp, Serratia marcescens; identical to SEQ ID NO: 308332

SEQ ID NO: 446210 - DNA, 315 bp, Serratia marcescens; identical to SEQ ID NO: 308331

SEQ ID NO: 446211 - DNA, 210 bp, Serratia marcescens; identical to SEQ ID NO: 308330

SEQ ID NO: 446212 - DNA, 549 bp, Serratia marcescens; identical to SEQ ID NO: 308329

SEQ ID NO: 446213 - DNA, 297 bp, Serratia marcescens
atggcaaaacgtataagacggcttttcagcgcagaattcaaacttgaagcggctcaactggtgcttgaccaaaactattccgtgctcgaggccgccaacgcgatgggtgttggtaaatcaaccatggacaaatgggtccggcaactcaagctagaacgcaagggtatttcaccgaaagcgtcacccatgacgcctgagcagattgaaattcgtgaattaaaaaagaaaatcgcgcaacttgaagagcataatgagatcttaaaaaactgcctacatttcgcgatatcccccatctga

SEQ ID NO: 446214 - DNA, 1353 bp, Serratia marcescens
atgtcaaaattaaaaccaaaatcccaatcacttcctgtcatcaatcctaatgctgcgggtatagatataggtggccgttttcatgttgtcgccgttcctcctgatcgcagtgacaaatccgttcaaacgtttaaagcttttactggcgatatccataacatggcacgttggttaactaaatgtagaataacgaccgtcgctatggagtcgaccggcgtatactgggtacctgtgtatgaaattttggatgaacatggttttgaggttgtcctttccaacgcacgtgatacccgagcagtaccaggtaggaaaactgatgtgggagatgcacaatggatccagcggcttcatgcatgtggtttgctaaaagccagttttagacccgatgctacaatagctgaacttcggacatatatgcgagtcagagaacgtatgttggattatgcagcagcacatattcaacatatgcaaaaagcactcacattcatgaacgttcaattgcatatagtcgtttctgatatcacaggtgtaacggggatgaagattgtaagagccatcgttgcgggcgagcacgacccagctatattagcaaaattcagagatccacgttgtaaagcggatgaacaaacaatttgtgcggccctaaaaggtaactatcagccagaacatctatttgctctacgtcaagctattattttgtatgatgtgtaccagcgacaagtaaatgaatgtgatgtacaaattgaagctgtactcgataggctttgcataaattcgagcgaacccgatgagcctatccccaaaccaaagcacagagcaaagcaggcaaacgcaatgacatttgatgtgcgagaaaagctttatcgtttaataggggctgatttcacgcaaattcacggcataggcccttttcttgcgttacgactgatatctgagtgtggtacagatatgaataaatggccgactgaaaagcattttacatcgtggttaacattatgcccaggctcaaaaattagtggtggtaaagtcatgtcttctcactccctaaagagtaataatcgagttgtcgctcatctcaggctagcagcaacgaccgttggtcgttcagatacagcccttggtgcattttatcgaaggctctcatctaggattggtaaagcaaaagcggtaactgccactgcaagaaagatagctatactgttttacaatgcaatgaaatatggcacaaagtataaagatcctggcgctgaatattacgaagagcggtacaaagaaagggtactaaaaaatctcaaacgccaagccgagagaatgggtatgactttacaggcaaaagaagaatgtgtttcttag

SEQ ID NO: 446215 - DNA, 429 bp, Serratia marcescens; identical to SEQ ID NO: 31755

SEQ ID NO: 446216 - DNA, 381 bp, Serratia marcescens
atggctaagtacatcaacctaacaacctatcgcgcaagcccttctcagcgtgaattaggtgttattgatatcaatgggaatattgcatctgctctgtcagagttgctttcttttcattttgcgccacaaaaaggtgaaatgttggtaaaggcaaattctattgctgatatcgcttataacctgagtgtcgaaaacgaaacgcctaacgttttaattaacgctaaagcctttttcattcccactctcgttgcagccttgcagtcccgaggtcttgtacctttttatacatttgctcaacgttccacaaccgtcaaagacggcactgttttagaaaagacgtatattcacaagaatattgttgaatgttcgcctgaaatttaa

SEQ ID NO: 446217 - DNA, 1032 bp, Serratia marcescens
atgacaaacgtaaatactatcgctgctgatgctctggttcgtaacgctgttgtttcacctgcattgtttggaatcactatcccagccaacacaaaagtcaacgggttccctagcttccctgtcggtcatgtttttcaggattatgtccctaatcatgatgctgactatgtttttgaagctgaggttcgtcaggcgactcttatgtggttcaactatccattggatactgctctttggttatctggccctactggttgtggtaaaagtagcatcgtcgaacagattgctaaccgtttcaactggcccgtgatgaaagtcactgccttccctgaaatggacatcagcactcagatcggcagtcttcggattacttctgatccattgaccggtgatacaaaaacggtattcgttcatggccctctggctttggcgtataaatatggcatggtttacctgctggacgaatatgaccagcttgaaagttcatgtgctaatgcttttaacactgtccttgaaggcggtaatttaattatcgctgaaactggtgaagttattaaaaagcatgaaaatttccgttttgttgcaactgccaactcgattggtcagggtgatatgactggaatgtatggtggcgttaaaatgcagaacacggccaaccttgaccgttatatgtttgttaacactacttacatggctccagatgttgaaaagaatatcgtgatgaaatatatccctgatgaaaccattgccagcaagtttgtttcgattgctaatcagattcgtaaactgcatgttggtactgaattatcatctgatgatgtgttatcgcaaaattcacctcgactatctgtaacgtgctccacccgttcgctcaaacgttgggtttctcgtttcgctatgatgaaacaaaacaaaatgcccggtgccctgatgaaatcttttgatcttcatattggaaatcgcgcaccaactgatgagaaaaaggctctccatgcaattattgagtctacgttcggtagtttagcttcttaa

SEQ ID NO: 446218 - DNA, 1434 bp, Serratia marcescens
atgactaactcaactacaaatgtaaacaacgttcttgaatcccttatccttgtgtctttatctgaaatccacggtattagtggacgtaagaaattaacgcgctctgattttggggtcggtgtcgatttgccaccagatgttattgtgtcactcggctctaaaaagataattgatcctcaactcctgaatccgttcaaccaatataagtcaagagctcacgctctttgttctgctgttggtgtccggttccttggcggttatgctgttcctgctgatcgagttaatgatttaatttccgaactgaacgatgttaaaacagagttctacatctataagaatacattcctgcaatccaatttcactcgctggatagataactgcgatgagaaatatcgggatattattcgtgatggtgccaaacttgacataaagtacatggacgagcaaatccagtttggattcactgctatccatattacaccgtatggcaactctgtaattcaagacggtattgctgcacaggttaaaagtcttagcgatgaagtttttgaagatgtatctcgtatgattgaaaagttcttgggcaacttaaacaaagaagctttcactcaacatacgattaagcctctccgcagaacagcggaaaagcttgcatctttgggctttatttcagacagcgttaataatctttcagtctatatgaatgaagtgcttagcgacgttcctgtttctggcaaagtaactggccgtaaatattcagatatcttgtctctgttaaacaatcttcgtgatccagaacgagctcaatcatttattgatttgctcaataaggattcaacggctaatccagctgacgataattcttttatcgatttgtctggtacttctgtaactgctcctgatcctgttgttcctgctcatcagaatgaacctgttgttacccctgtcccgtcaccagctcctgtagctgttgataaaaacttggttgataccagctcatatgttcctgatgacttctatgcagatagcgtttctgttgtagaagagtttgcgactcctgtagttgcgcctgtagttgctccagaaaaatcagttgtagttcaaccttctgagtctgtttctcgtgctgatgacggttttgccactgacttaccttttggtgatgaagtgactgttgaaactgttttagagacgtcacctgctccagtcgcttctgcttctgctgctgttgatgtcccggttgtttcagcccctgcggttgagactccggctccggttgctcctgctgccgtagtatctgacgcgcctgctgctgttgaaggttttgtcgatgttgtcgttgttgatgccgatctcgaagccagcattaaccctgtcgctcatgcgccagacgttaatctgactgttgaagatgatgggcttttcctgttctaa

SEQ ID NO: 446219 - DNA, 1827 bp, Serratia marcescens
atgggtatatacaattcactcccgattgtggcgcgtgctcttggtgatcaacttaacattgatgttactgttggtggctctgatgcgtatgcttctgtttcaaatggtaaggctcttatcaacattccgtattataagaatgctgatgatttgtctgatgctttactgggttttactgtgcatgaagccgctcacattcgatttactgagtttgatttgttccagcctgctcttaatgggttagctggtcagtcagtcgaagttaaggatgagtttggctctctggtcgcttctggtcgctataacaagaaggtgctccactctctctggaatatcgctgaggatttacgcattgaacgttcaatggtgcgtatttatcccggcactatccgttttcttcaagctgtacgcagttttgtttttgacggtaagtatgacgcgagtgatgtacctgctgtgatttatctggatactatgcttctttgtggtcgccagcgttatcacggctttgatactcacgctgatgtacgtcgcaatgagttcatatctgtgtttggtcaggaattactggaaaagtctcttgatattctgggtttagctgtcttcgcggatactactctcggatgtcttgatgtcgcccggcagttatatgacctcgctatagatgcttttgaaaagaaagatgatgatgaggataataccccgtccccgtccaattctgatcaaaacgataactcatctggtgattctgatagttctaacgattctgctgatggttctgatgattctaatagccctaatggctctgacgattctgatagttctaatgctggttctgatgactctgctgatgatgctgataatgatgcctccggttcatctggaagctctgacggtaaacctgatagcacagattcaccatcatcctgttcaataaactctgacccgttcgctgatgctgacgatgctgatatagatcgcgccgcaaaagatatttcggacaagtttaatgacatgatgaaagacaaattaacgccttcgcaacgtaaggatcgtgttgaacctttctctgtaactcccggcaagactttctccactggaaatgccagtgtcactcgtggcatagctggttccgctggtttacgtcagtctcttaatggattgttacaagggatgcaacacactcgtcgaacgcataaagagtacggtcataaaattgatgggcgattactgggtactgtcttaactggcaataccaagattttcaaacacaagtctaaaactgttgctctgaactctgcatttaccatcctgctagattccagtagctctatgagtggaagcattactgaggccgaagctgcggttgtttcattgctatatgcacttgataacctgcccggcgtaacaacctctgcttatcactttcctcataccactagaaactcagttggtaaattaaaagaccgcaagcaaactctgcgtcaagccattgctgctaaccatttcggtatccacacgacaggctctacgcctctcagtggtgctttatggcccgcaatagttgacttggccgtagagaaagctgaccaacgtatcttgattgtttgtactgatggcgaacctgattctaaggaagacgttattcaaatgattaatgatgcaaaatctgacggtatggttgttataggtattggtttcggttctgtgagccaatcctcaatgacccgcattttcggtagtacaggcatttgcattggcagtcttgttcatttacgtacaaaactgtttgatgtgacccgcgccatattaacgaatcgcaaataa

SEQ ID NO: 446220 - DNA, 480 bp, Serratia marcescens
atggctcctaaaactaagcatgttgataaatcgcagttgtcctttatgcacattcttgaagctgacgaaataacgtatgttgctcaatacgaagagtcttatgactttagatatagcagcaaagtggcttacgaaatgatccgtgactcactatatttaatgacgtttttccgaagtaatttacagcaacgtattgatgaaatctcatggttattctctgatgttaatcaggatgacatttgctctttccatacgtgctgcaaaatgaatggcttagaccctcatgaggtacacatgagtgtattgcatggctggaaaagggatcttgacgaaaagcaatccgtcctcaagtgccctaatcaccctcgttataatgttgtaaaaaactatatcgattgtgagctgactggttatgaaaagtatgtgaaggctttctacatcacatatccctatgagtctgcgaaacgtaaaaccaaataa

SEQ ID NO: 446221 - DNA, 180 bp, Serratia marcescens
atgactactaacaaccttcgttttgcctccctgctgttcatcttcatcattgcgatgattgtgattttccgtggtgagtctatcgggataaagattactgaggaattgctgtttaaattcctattctttatctccctacctctttcctttgtgaaagcaaagaaaaagaagaaaaaatga

SEQ ID NO: 446222 - DNA, 393 bp, Serratia marcescens
  misc_feature (296)..(305): n is a, c, g, or t
gtgaaaccatacttaacggaacccccctgcgcattgatgatgcctgcatacaaaataccccctctgttaaatgacggctctctgaaagctacagtgcgaattgagctagaacgtaagtatggcactcgtatgtcgcttgatgctgtctgtgcagaattgggcatgatgaaaaacgccatcgtccacaagatcgggaatagcaaatttcagcaccatttaattttccgtaacttgctggacgctcgtgtgtttccctctatcaaaatcgcggaaattttctctgtccaaaaagcggnnnnnnnnnncgctcgtgtgtttcccggtaaaaacaccgctttttggacagagaaaatttccgcgattttgatagagggaaacaccaatggcctatag

SEQ ID NO: 446223 - DNA, 585 bp, Serratia marcescens
  misc_feature (513)..(522): n is a, c, g, or t
atggcctatagacgttttattaaaacatccctcgccgttcttgttggatgtaccgtttattctcactccttcctcgctgtggccgcttatggacaagaacaggagataaagaccagtggtgatgtttacgctggtggtaaagagtttcagaaagaaaaggatcagggctggttttggaagaaagacccgccaatgccggttaaagaagagcctgttccagcaccggaaccagagaaaaagccggatgacgaaaaagagcaagacaagcaaatgccagttgctccaccatctccaccatctgctcaggaagagaagaaaggcccagcccccttctcagtagtctggttcagagagaacatccaagacattcgtgatagagcgattgacgacccgacacctgagaacgtcagagcatatttactggcccagagaattatgttggataaagccagtcggtacaaagatatggctcagctgatatcgattactgaccccattattgacgaaacaggnnnnnnnnnnagggcgacgctccacttcctcatttggctcgctgtctcaatcagtttcagcagaagaaaatga

SEQ ID NO: 446224 - DNA, 426 bp, Serratia marcescens
atgcagacgttcagctaccttaccaatatccctgtcatccccatatcgattgacgggcataaccttccgggtaatccattcccgaatgttcgtgttgatgatgggcaggcaaaaaaattacagatacgaaatgtgcccgccattgcacttgctatcccaccagatcaaacccgaattgtatcgtttggccctatcagtgccgaccaactggtgaaacgaacagtgctaattgcgcatgatgcgggccttgtctctgatgacagttacaaaagtacgcttccgtttaatgacaacgggtacatcgactcagacatcctgaaagacatgccggaagagtacatgcagaacccagaccagtttattaagtatatccagacgaaagccggatatacccctaccgatcagagcccaccgactaaaaaataa

SEQ ID NO: 446225 - DNA, 450 bp, Serratia marcescens; identical to SEQ ID NO: 283173

SEQ ID NO: 446226 - DNA, 1020 bp, Serratia marcescens
atgaatcaaagcgagcgtttcatagttggtttggatattggctacagtaatgtgaaagttgcttgcgggggcacgcagcttttagacccaaaagtaactatcttcccggcgtatgcaacaccggaacctgaaagtgatttggcgctggcaaagaaaagcccagatgaagttaaggtatatccaaacggtacagaatggcgtgtttttaccaatcgcgtagggcatcgtgagctacacgaaagctatcattcgactgaaatgtacaaggctctgttctatggagcgttaatcaaagccacagagggccgtagtgatgtgattgatattttggtcactggcctgccggttcgcatcgctaactcagaagctgatcgtagtcagctgtgtgaatctttcacgggtaaacacgaggttactccgggccgcttcattctggtgaaagaggttgttgtcttgtctcagggcgtcggtattatgaacgacatcctcaacacagaagggttgatctctgatgaggatttggagttttctaacatcctcgttatcgaccccggctactactcaatggattatgtgaccttccatcgaggtgacaaaaagaacgagttcagtggttcttctctgaatgccaccagcgtaatcattgaagaaatcgtgcgtgttcttgaaagggattacccgaaagaaggcgctcaggaaactgaacgaattgaaacagcgttgcgtctgggcaataaaacgttcaataatggattccgcagtgtagaaatcgaacctttgattgaagaagtctcgcatcgaattgtatcgtcagtcgttgccgagttgcttaaaaggactcgttctattgggcccgttcatatcatcatctcagcaggcggtggcgcacgtttctatgatcactttatcaaagaagctttcccacaagctcgtatccttcaaagcgttaaccctgtagcgagcaactcaattggctactggcattacggtgtgaataagctcagcagccagtcagattaa

SEQ ID NO: 446227 - DNA, 582 bp, Serratia marcescens
atgaaagtgcatgttaacgtagacgaaaccatttatcctgagctacacaaattgctggaagctacgccagtaagtaaaagggctcgtgtccttgcgaaccttgcgttcaaagcgtgcctgctcagcaatgttgcacttgctaattcagaacaaactgcgccctctaaggggcgcaattcttctgataaaaagaaaaagagcacagaggccaatgttccggccagcaacaaaaataacgccgatacatctgaggttcatccaaagagcggtatcgaaaacagcacaaatgaaacggctccaaaaacagtttccgaggtcgttacacatgcagctcagtcagcaacacctccttccgttcagacggtagaaggctcagttgtttctgagatggggcgtgatagcggaaacgaacagactgttaacttagcagcaaaaacggtcacttctgatggcatggggatgcctgaaaaaagtgattccgagttatcaacctctggtcagcaaaacaatgctgacggggacagaggtttaaacgttgtggcgcaacaaatgcctgtaaggaaacgccgcgtaatagattaa

SEQ ID NO: 446228 - DNA, 561 bp, Serratia marcescens
atgaaaaagttgctgatagccctgtgtgtggtaacaggggttacggcaatagaacgtccagctgaggcggctattgtcgatctgcgaaatactgcatgggaaaaatttgggcggggcgaatgcggccttgacccttacctgatgtatgctattgcgttatgggaaagtaagcaaagggctggcgggggcggttgggttgccccgagcccgtgggcgcttaacaattccgtttacggtgcatactacccaacaagctatgaagatgctaaaaagaacctcgctaaatacatgcaggctaccactgtaactgatattggcatcacgcaagttaattacagatggaacggtcactatgtttcaaaaccagaagatcttctggatgttgaaaccaatattaaagtacaagcaaaaatcctttgccaagccatcaaaaataaccctgatgatattgaactggctatcgggagttatcacacacctaatccaaagctacgggataaagcacttaactatgcccgaaatgttctgcgaatctggaagaggttaattgaaaatgattaa

SEQ ID NO: 446229 - DNA, 525 bp, Serratia marcescens
atgattaaagaaaacctgtcatttttatcgtgtgccggaagcattgagacgcgtgacagtcgtttctatgttagcccgttcaatttctctgatgaagacaaggctatcctgagaaatagcgaacagagagcgcttctttttgatgcaattgaaaccttaacgttgccgatgtttattattgagcacgatccttacaagtcttcaaatcaagtttctaactttgttcgtatggatccttatattttaaaactcgcacttcttatctatagtgtaagaattaaaatacatgagaaaggggattctgagcggttcatgtggactggttccgaagagtcgtcttcatttttagccaatatagatcatgacatagttatagattgtttgcttaaaagagagatatccattcgcccagtttttgagctggcagatattttaaacggcgactggaagatctgtcgtaataatgcacaccttgcgatgagccagtatttacagcttcgctataagcattggagagtgtcatga

SEQ ID NO: 446230 - DNA, 492 bp, Serratia marcescens
atgaatccaatacctaaagatgaagttgattatttactgaaacgtatggtggctttagggttcagaaaagcgatcattactacgtcactaaacgcggcggagagactcgttgacactctgaaacggaactgcaatcaagaagacaatggccgtggtaggctcaaagttgccacgtcgttcttgagcatgaagcaggatacgattgaatcaacaaacttcatgaccatttacctgcggatagcgaaagacccggaaaaggtttctgatatcagagacataattactgcctttgaaatctttcaaaacctccaccaaaaatttcgacctagaaattcctctgatatgatcatagatgcgaacgcggcatggatactggctcgcgactataggacagaggaaataaagatggtgacgtgtactcactgtaacaatcactacatttcaccatatgatgaaaaacctaaacataaatgcccgttctgcgataactaa

SEQ ID NO: 446231 - DNA, 780 bp, Serratia marcescens
atgacgatgaaaaaactgacggttctagcaatggctgtaatcttgagtggttgtgccgggggtaacaaaaacgagatcacccctatgccaatcgatagcaatccttctatcgcattgcagtatgctcgtgcgatgaacctacgtttgatcactgactatgaaaaaggtcagtacgtcattttcaatgagaacaccggcaaatcaatcaggccattgaaggagccggttgtagttggtcaaaaaggagagatgaaacaatcgggtaacgcatctgctgatgtgctggcgggccttatcactcacaccgccttcatacctgcacttagcgttttgacgcagagagcgcccatcccgtactctgatgggacagcaagggtagccacttggggcggtggaaatacagaggataatgctaataagtttcgtcttgttatcaaccagaaactacctctctttaatggtttttcagagaactatttctgtaaaagtgggatcagttacaccgtaccgatagttggaaatgttaatgcgaatgggacactaagcccaattgatttggcaactttacctaagccaccatataacgcaccggcaatcatccagccatttgtggtaagtgaatgctttaatacattatctcagcgcaaggataatgagcagaatgttgttgctttcagtgaggcattgggtgagcaatgggccattttcgttccgggtagcccgcaacgtcagcctgctgtgtatagaaatggcgaatcattctatttcgaaaaaaaatga

SEQ ID NO: 446232 - DNA, 1884 bp, Serratia marcescens
atgcaggtctatgtcggtggtacgtctaaaagcgatatagtgtgggctggcccggatggcattaacgtgttccctcctgaaacgcccggaagatgtgaaagaaacaccagctgggacagaaatcctaacgtcgatataactgaaaagttcaagcaatcaaatgatgatggtgtggttcacttcaaaaccagaacgtctgtaacaggagcaggcgaaggctacgcaaaaatagagattcgttttgacgtaaataaaatcgtcacaaatgatatttgggaacacccggatcagggttatgacaagttcgtgaaagccgtcgaacagggttactgccaatcgtattctgctacctgtaatgacagtatcgtacctgactcaaatggctgcgcaaccattgacggtgtgctggtgtgcgccgatgactttgatgccgttcctccattcggtctttctccgttttgtcgaaatgcccttgttactgcaaactgtggtgcagatgccggaaccaataacacatgtaaagaatttgagaaagccagctgtgatttcatccgtagttcatgcctcgatggcgcgagtggagacacaagcggatgctggcaggctagtgaggtatgggattgcggtatggacgttgttgtcccttccactggaagccatgaagaatatcaatgtcccggtggtgttcagtgcataaacggaacctgtctcgctcctacatctgagcctagcggtgactttgctacagcagctgcaatgctgcaagcggccacctatgcccagaacgacctttcttgtgataccagcactgaaacaaacaacgatgccgcagcctgtgaagtcttcaagggcgaagcaatggaatgtaaatcggcaatgggcggttgggttgattgctgtaatcagcctgttgatgtgagctggcttcaatacctgcaattaacctattacacgctgaaagttactgatgcagtgtctgtacaggccggggtttttgagcaagggaaaggtattttcgatatggggtcagagcttgcaagtaatgcttttgatgccatcgctaagcctgctatctctgcatttgactcccttacgggtaatgctggttcagctgtagctgaaaaagtgtcagatatgggaatatcatctgctatcaatgaaggcatcggcgcattgactaaacaagttgcacagtggactcttgataccttcggatcaggtgtcaccaacatgttgtttgaagctggtgctagtggtgctgggtctgccgctggtggtgcggctgtggattcaacaggacaaatggcagcaaatgttcagttatcttccaccgttatgtctgctgtttccgttgttggttatgcctacatggcctaccaaatggcaaacatactggtcaacatcatatgggcctgtaccgaaaatgagttcaaacttgctgtgaagaaagagacaaaactcgccattcatatagacagctggtgtcagactaaagtgcttggacagtgtatagagaaacgttcaagctattgtgctttcaattcccagatagggcgaattatccaagagcaaggccgtagacaacttggtcttaactggggtaataactctaaaaaccctgactgtagggggctgactctcgacgagtttggtaaaatcgacttcaataaaatcgacctgtcagagtggatcggttcactttatgaagctgacctgttacctacaccagacgatatcagtcttgatagtatcactggtaagggtagcgttttgaacattgatggtacacgcaaaaactcgttagagcgttttgaaagtggtattgatggtgtggatgtgcaaggcacaaaggaaacgcttaaagaaaaaatgagagtaaaataa

SEQ ID NO: 446233 - DNA, 654 bp, Serratia marcescens
  misc_feature (624)..(633): n is a, c, g, or t
atgaatacactttttcgcaaacgatggttctccgttcccatctgtgcgttatcaatcatctcacatgtcggattacttagcttcaccccgtatgctctggccgcagagagcacggcaggagctgtgagctcaaacaagaaggctcaggacgcagtaaacttctataacaccctacccggaatttcggccagcgggcaaggaaccgtcacttatggcaatgggcagtcggtagatctcaattccatttaccctgaccagcaaggttcatcaacatcccttgatgatctgaaaaaagtatatggcgaagactcagacacaaataagctgggtacatcaaccggcactacgctatcgacagaaaactcattgcgtggcgaagcctaccgcaccgtgcaatcatcatccagaacaactacccaactcaaagatacggactctatctttaataagcacaaagacttcctcgaaaatcagaaggagtacatgacgctattgggagattgttcaactcaaacgatactggataaaaaagatactgttaaccacattcctgactacagagaatgtacccgcaccttagatgtgtcaggccagtatcacctttatcatccttatgtggcgggnnnnnnnnnnggttggtactgttggcgatga

SEQ ID NO: 446234 - DNA, 678 bp, Serratia marcescens
atgttcactgaaacaatggccctgatctctattgctatgtttgcaatgctgttatatcgcgttgagtacatccggtttttagctccactctggattgttctgtttgtcgtgctcagtggcagagctgtcaccacatatggtttctttactattgtggtgtttgcgctgctgttaatagtatttgtcctcgacgctattcgagtaagccgtaaaaaagctgaaaaaaatcgcggaaaaaatgaagatgatgattctgtctccatttttgacgaagacgaagatgaaaatgaggatgaaaacttatcctccctgcctcgcttatctgcctctgacgatgaagaaacacctaagcaaaaaactaagccaaaaagaacccgaatcactgagtatcaaggtactctgctgagtcatggttttgctccgtacaacaacatcatcggtaatgacaagtcttactttgttaattgcgatggtaaaactgtttggggtatcggcttaaaagatgcgattaagaactgtggcgctgaaaatggtgacactattcgcttttataaagaaggtgaagttcgcaccaaaaaagccaccatttatgatgataagggaaacaaaaccggcacacgcaatttgtctcaggacaaacgtcgtggtgtatggattatggaagttgtttcagactaa

SEQ ID NO: 446235 - DNA, 816 bp, Serratia marcescens
atggctgatgttagcaaccaaggcaacgcaaccccaaagcagagatcaaacagaaggggtaattcccgttctaacacaaggccaaacggcggagctaatgacaaccgtattgaccgaccaccagtcagtcgagggcggaggcgtgaggaaaaaaccccgttctctaacccggaaattgatttaaagataaccttagagacacaagaaggcatccggctgtttacccggcattttaatcccgtgtctcaagccctttttaatatcatgatcaacaccacacgcattgagcgtatgggtatccgtggtgcggctgctgaggcaaaaaaagcgatagataaggtaattgatgtcccggtgagagagatcaatatctgtattgaaatgctcactaaaatgttggaagaagaaaatgagattgaggttgccgaggttaaatatacgaacccgcgtgaatttgaaacaaaaacacgcacgccagaagcgactaaagtcctacgcatgttcagtagttatgacaaagccattacactgctggataaaggctatttgaatgcgatggcaccagcggatgaggttgaagacactaagttccgtctgactagcagcatccaaaatctgagcgcgaccatccaacaactttccaaaaatgctatagcccagcttgaggaaaaaggtctttctatttcccgagaaggaagcggtattcctgctgtagttcaaaccgttagcgatgccgaaactacggatgtggaattagaaattcagtctaatccgacagtcgttttagaagctgaacagcaagacaagccagaataa

SEQ ID NO: 446236 - DNA, 1077 bp, Serratia marcescens
atgagagcaaaagtatcgattttaaaatcaacattagtctctgctattgctgctgcctgcctcactttttcagctggcatcatggctgctgacagccctactgaaacacaagcagagaatgagtcatgcagggataacaaagtcctgtctgcaaaactgttcactgatgtgtgctggtcttgcatcttccccataaaagtcgctggcgcaacaataggcccgtctgggagtgtaccgaacgatgcagctaccggatcagtatgcgcttgtgctgatgggcttggcgtttatcatcccggaattatgtcagcactgtgggagcctcggcgcttcattgagctgaccagaacgcccggctgtatgtcctctctcggtggcgcaaaactgaatctgggcagcgaactgcaatacggaacacaaacggacagtgcgaaggatgagcgccagcgtgcggctatcagcttctataatgcgcatatgtacgccatgcctttactgagaatgctggatttgtaccttccgggcagctgtaatgctgatccatactccgatttcgatatcattagtttcacggaaatagatccgacttggaataactctgccttagcatttttccaaaaccctgaatctgccgctgtggctaacattgttgctcagcaagcctgtaccgttgaagccgctgcacaatttgccggggcacagccccagtctgccctttggtggtgtgccgggtcatggggaggtcaataccctctaacgggctcagtcaggactatggatactccacgaaccactagcctcgcggcgactcgacaactggccgtggagcatcgccgtgggcttgcctatcgctctgtggggaacgatgtagcttgccgtgcaaagatatacccaaccattccaaagcaacaatacaaaatgaatatgttttaccctacaccagagacaaaaaagggccacaatatcggtgagtcaccatataaatggcaagggggatcattccgctatccgaccggtatgggacaggattctgtgtatatgattttccagtggacagattgctgccgaactctttaa

SEQ ID NO: 446237 - DNA, 1251 bp, Serratia marcescens
atggtgacaaaacagtttttcaaagtaagtgttattgctgccgtggtgctatcaagcgccacggctttttcaactgaaaccacattgccatcccggccagatattccagctacagccgttcctgagcgtcctgtctcgctgtctgagaaagaccagtcagacctcaatgaactgctaaaaatagccaaacagaagcaggcagagtacgaaaagctatcccgtgataccgtagcctccagtcacaaaagactcggagaaatgccggtgcctaaaactgaacatgacatcattactgatgcagtaacaggcgctattgctgattctgatatggccgatggaaaacagaataaagtaactggtgatttctattatgtcctcctgtcatcttcactttccgatgatgagatacgtaacatcttttcgcagtacaaggacagaacggacgttgcttttgttattcgtggcgttaacgataaagacaaaatcctgcaagaactcacgcactggcagcagttggtgctcgatgctggtggtggtgctaccgtaaacctcgatccaaccatatttaaaagttacaacgtcacgtctattccaaccattatccatgaaaaagacggtgagctggtggcccgtgtctcaggcatttcaaataccggatacctgaaagataaaaaaggtgatttgggtgtggctggcccgacaaaagatatcagcgaaattagtctgttagatatcattgagcagaaaattaaaacgctcgactttgataaaatgaaaaccgatgctctggataactactggaagaaacaggaatttactgacttccctcctgcattgaagcacaaccagaagtttatcaatccttccgtggtcatcccgcaagacatcctagcaccagatgggcaagtggtggcgaagcaaggccggatcaatccgctcgatgtcatccctttccggctaaaactcattttctttgatgcgcgtattgactggcagagaaaaatcgcccgccgtgaataccagaacgccgagcccggcattgaaccaatcctgataacaactaacgtttacggggatggctggaaaacgtttcaggacgcgcacgaaatgtatggcgagaaaagccgcctctacatgattcaacccggcatggctgaccgcttcggtatcacctcagtgcccagcattgtgacggctaccgataagcaatatgtgatcaatgaataccccgaagatgaggctaataaataa

SEQ ID NO: 446238 - DNA, 1350 bp, Serratia marcescens
atggttcctgatacaaactttgttgccccgattttcctttctgccctcccgatgtttaatgaggcaagtgcagaaaaagtcattggccgttatcgcacccttgccctgagtgaagcccttgttctcacacctctatatgctgactggcagggtacaaaaaacccggcgttaatgttgacatcgcgctctggtcagatacagatgattgacttgttcgactcagacaccaactacaacgcctgtattgctgcggaatccggttctggtaaatccttcctgacgaactacatcattaccgcttacagaagccttggtgcaaaagtttggtgtatcgatgtcggtgattcgtacaaaaatatctgcgagacatatgggggggattacctcgatttccacccggataaaaagccatgtcttaacttctttgaactgattgaagactactttggtgaagatccaacaaacacagatggtaacggtgaagaagacctgattatcggccttctgacggttatggccgcaccacaaaaagggctggatgatttccagactgcacgccttaaagaacatgttgcgctacttatccgtgaacacgggaaacaaacaacagtcgatatggtggcggaatcctgtttaaaagatgctgatcggcgtgtaagcgacattggctctcagctttatcctttcacaagcaggggccagtacggcagatactttgttggtaaaaataatatcgactttagaaatccgtttaccgtccttgaactttcacgtcttgaaagctctgagcacttgaaacaagtcgttctcttgcagctgatttaccagattcagcaagacatgttcttgggtgatcgttcacaaatgaaaatcgttgttatcgatgaagcgtgggcgcttctcaaaggcaatattggtgacttcattgagaaaggctatcgtcgcttccgtaagtacaaaggtgcggccattaccattacccagtctatcaacgacatctacaaggacagtgtgggtaaagccattgctgataactccgcgtttatgcttctgctcggacagggtgagtctgcaattaacgaggctcaggccagtaagcgccttgctcttgatgatgccggttatcgcttcctcaaaacagtcagatcaagtagcggcgtttactctgaggtattcgttatctctaaagccgggcaaggtattagtcgtctgattgtcgatccattctccctactgctctactccacacatcctgatgacgtatccgaaatcaggcgtaagaaggatggcgggttaacgacagagcaagctatctatgaaattcttagggatagaggagttgccgcatga

SEQ ID NO: 446239 - DNA, 558 bp, Serratia marcescens; identical to SEQ ID NO: 25161

SEQ ID NO: 446240 - DNA, 1014 bp, Serratia marcescens; identical to SEQ ID NO: 49376

SEQ ID NO: 446241 - DNA, 303 bp, Serratia marcescens
atgaaccagtatattaaacgcacacaacgcgattactctctatcctttaaactggctgtcgtcgaacaggtcgaaaaaggcgagatgacataccgccaggcgcaagatcgctacggcatccagggcagccagactgtcatgaactggctgcgcaaatacggtcaacttgactggcgaacttctccttccaccagaacgtgcggagacaacatgcccaaactccccctgacgcccgaacagcgtattaaagaacttgagcagcaactggctgaatctgaagtcaaagcccagttcttcgtgtaa

SEQ ID NO: 446242 - DNA, 855 bp, Serratia marcescens
atgctgcttatcaaagcgttgccagcagagtttcctgcgtgggtttttcgggaaagcgataggttcggtgttgccgttgagtgctctgattcactcgatatatcagaagagtttgccggcgcgaggcttcgaacagtaggaagaattgtttcaggctggcataggcgttttttacgtctagagtcgtccatggaatggcttcgcaacgagttcgggctcatttgtgcgcacatggttagtgtcgaacccggcagcactgctcgcatgttgttactgtctgagccgctcatttggtgggagcgatggcgccacctgctggggaacgcgctgatcgacaagcatggttatgacgtgctcgcagagctgctggcgttagaagcgctggtcatcaaaggaaattctttcgagtggagtggcccttttggcggcgtggttgatatcaaaacccctgcaaccgattacgaggtcaagtcgacgatcagtcgttacggggccataatcaacatatctgggcagtttcagctagctgcttcatccggtaaaccgttggagctggttcactataggttcgagccagtcgatgatgggctgtcgatagaccttgtctgtgatcgtcttgttgctctcggcgtcgatgccgtcatgctggaagtcgccttgcagcggcttggtatggaggcaggatgttctgtgcgaaaagaggaatacaacctgctggaggcgaggtcttatagggttgatgacagttttccccgcataacgcctgaaagtttcaaaggtggagtaatgcctactggcgttgttcagttggagtatgggatagatctttctggtttaaagtaccagcagttttag

SEQ ID NO: 446243 - DNA, 696 bp, Serratia marcescens
atgttcccgacattgaatctgaaattatcgcagcgtcattttgacgaaatggtaaaaaacgattcgtttgtaccaggcaaactccatccggaactggagagaatacgccgccaactccttgctgctataccgttatatgatgtgaatgcgagaggtaacgccgcaggccctggcgcttatgatatgaaagtcggtttggttctgttccagatattgtcagaagctggtatggaccttcgttccgcggcggatgatggctggtggcgctttctttcagtacgtgtattgccggatcttgtgaaaagtcgctgggatagtgcccctcctgttcgtttctggaaagggcgaagccgtatttggttgcgagcagtttggtgggctgtgtacctcacatggcaaggctcggagcagaatactcgtaaggtattggagaacgtaaccacagatacggtcgtacaattggtcgagcgccctggcaggggaggattcagaattgaccttacacggcggatttttgaaatgcgtcggcagcgcaacccttcccaagatcagttcagagcaatcatgaagctcaatacggcacagatcttgttaaaggagccttcactatgcgaagggggcttattcggttacgttgacgcgcttttttcagatgtaggatgcgtttctaaggacttgggtagtacttatgattga

SEQ ID NO: 446244 - DNA, 960 bp, Serratia marcescens
atgagtacacggttgccgctctatcggatgctgaatgcaccgctctcccaagggaatgattcggtcgtaagtttcaactttagggccaatggctattttgatcctggtgtgaaggtgttgggtcaacatcaatatgctatcggtaaggacagtgattgggatcctgccgaaaatactctggtagttcaatgtgttatcgaacggattccactgttagaggctatctttggtcctgagggaatagtgactgcggaaactgaagttctgcttgcgttggagtgggcatctgcagactcatgctggagaacaattggaactgtctatggattacggcacgttaccaaagatgaaaatgtagtcctcgagatcaaactcaaacctggaactatcaggggttgcggtctgatatcagttcaaacgttcttaggacgacattcgtcagaatttgttcccggatatgcgtatcagcaaggggctcggttgggacttgtgacacagccgatcgaaatcattattgacggtgatggttctctcttccctgttttggaggagtccttgggggcagcggagcctctgtgggagttgaaagcttgctggagcgatccccaagatgagccgttttccagcgaatacgtcgctttggtacttaataactcccatcctcatttcgaccagttacgtgatggtcgggctttaaatatcgggcagtcgccattgatgcgtcaagtgtttgcagcttggcttgccttggtcattgctcaggtcaaggaagacatgggggcagagttcgatacacatttaggtgtgtccgatgctggtgaagggattgggagtattgcggatgcaatatgctcatttatcagactaggtgacttggacactggctcccttccagagctgttcaaatctactcaacgttggattgatagccgggtcatggaattggaggccgctaaatga

SEQ ID NO: 446245 - DNA, 1734 bp, Serratia marcescens
atgaccttcgatagcgtgaaaactaacggtcagcatggcaatttcctgaagcttgtatttgagattggtaggactcgcccagatgacggcgccggtggttcgtgggggttgggtaagacctgttattttcgcatgggagccggcttggttatttattatagtcggattaagatcgcggaaggctatgaggagcgcctggtagcctcgttggtcgaagatgagagccgtgaagaccgtttgcagcttaaaactcaaaccggcattgcatggtggggagcggaagaaggcctgcaagcaatcactgccccagatcatatcaatgatattctgaaggcacttggtgctcaaccatttactggcgaggaaaccggaacggcaatcgtaattccattgctcaaagaaaacctgctccccgtactcgatcaggaacgcgggtgggtgccgtggtggtatagaagttacgcagattatgtgaatgtcgcgatccagcgttggtttagtgctcgactggataaccctttcttcgccagcggtagacatttaggagcatcagttaacgggaagaaaatagtcagtgccgacatgttgccgatcttccgggtggctcagtgtttgtataatcctgcggttggggagacgcctgaggcgaatgattaccttacggcccgaggcatcaagaccaatgatatgctaatcagagctatttcattgcgtggcgagtttgtaggtagtggtcaggcaggaaaactgattgcagtggcgctaacttcgaaacagttgcaaatggatgcgccagataatagcccgagcccggaagcctgcatttactccaagatggacagtgttccaccccatcgaccgatcatgaccttcatgcgctcgctaggaatgaacatctgttgggatgatagtattgattcacgaggctggtccggtgggttctctggttttgcggatgggcggtatgtgatagggctctttctgccaaattcgaagcagaagctcattccatcagaggctaggggattgcgttcgacaacacaaaacctagaaggatatttgcgaagttgcgagcgtgcagatcatgctacttggatcgatgtatatggaggaagaattgttgaaaagattcgtacgcagtgtggtcgggcatggaaagacttctgtataccgtcgcagcctagtgcgaatgtaaaaccttcgatgcggatatcccgcaaactggctgagctggtgctgcccaatcgaggatttggcggtgatgggcgctttggtaaacctgcttcgcacgctgccttagggaacggttccaaaagagcaaaaatctcttccccagtgctggaaataatagagattaggcatacagcatactctatttccatgacctggcgcttgagatggggaagggcgcaaacgaataccccaagggaaattacagtttctgtagattctgagtccggaccgatcacctgcgagaagtggcttgaaagtgggcttagtacgtttccatttcgatttgaatcacctcgaatcacgagcgcaacctctgctataaagtgcttgcagagtgccgacggaacaggcttagaacttaccattgttgacgctgcgctcttccagtctgatctggtactggaaggggaggttctagtcagaatggatgagtccggaggcaagctcctacagcctgttgtaggtgttcggatcttgagttctaggggggaagcggaatga

SEQ ID NO: 446246 - DNA, 1134 bp, Serratia marcescens
  misc_feature (698)..(707): n is a, c, g, or t
atggttgtagttgattgtgaacaaggtactcccgaatggcttgaatggcgtaaaagtggtgttaccgcgacctgctcacctatcttgatgggatcagaaagcgcactaaaaacgccgtatcagttatacctacagtatgttggcctgcttgcaccagaagacctttccgctatcaaacaagttcgtgctgggaatcttaatgaaccccttgctcgcgcttgggccgaaagaaaatatgggcaaattagcctgcctctgtgtgttagtcatcgtgattatccctacatgatcgcctcactggacggtcagtttgatgacgggtatttactggagataaaaaatctttctgcacaaaagcatttggatattctgaaacttaaaaataattcgccagactttaaatactattactggcaagttcagcaccagctcttcgttactggagcgcccggtgcttatcttctgttttggtcagctaaagatgagccagtcgtgtttaagctccttccaaatcccaaggcccatgacgaattacttcgtcgtggaactgatttttggaacggtgttcaaaacaaggttgccccaccttttgacaagacaaaagatgttttgcttatttcagatgctgagatcgtaaaacaaactcccggctttactgttcccgatgacctcgctgttcgtgttgctaaccttagcannnnnnnnnnccttagcaatcactctaaggcattggaaaaagctaaagcagaagttgaacgtctcgacaagttaacaaaggcgcacgtttctggccttgctgacgcgttgggctttcttcctgatgaccttatccgtctcgacggtttcggtgtcaggtatgttgaaagtatctccaaaggtgcgaccaattggaaaagccttgcgtacaagcttgatcctaatcttgtccctgagcaacatcccgattgcgtcaataacgaaaaaagaacctctcggttgactaattacgagtacgtgcccacatcatcggacacaatacctgtgattgtccctgatagtgtacagaacgcttcttctgctgttattcaacaagcacaagacgcctctagtgatactgatagcctcagtgtctcaggcggtgtaacgctgttctaa

SEQ ID NO: 446247 - DNA, 534 bp, Serratia marcescens
atgtattacggaaccctcgtttcagaaggtgtcattgatctcgatggcttcaccatacacaacgctggcgaatgcccgtcctgtaatgttcttgtcgaccaccggctttatgaaagctgctcgtatggctgcttgaaccagtgtcgctctatcgattgtccggcttgtggttatcattcctgtgatgatgattgctgctcagcttgccatgctcgctcagtaaaagaagagtctgaggaattggctatttcttatggaataaccagtaactcacatgcgctcttgtttttagctgatattgaaactgaattaatgattttatttgcaaaggctagaattgattttccagacgcttctgctgctaacgctgcacccagaagttatatggaaccaataactgacgtagccatccgcttacacgatttccacaaaatgccctactcagcattaccttcttcaaaagaaattgtttccgtttcatccagcctcttgaatgacatttatattcatcttggctggcctgatggtttttaa

SEQ ID NO: 446248 - DNA, 828 bp, Serratia marcescens
atgttctctaaagccactttaattggtgttgtcggtcttgaaccaaaatacaaacgcgctgctaatggcaaaaaatctgtaattgcttttcgcatcggttgtgacgtattaacaacatccaaaaaaataactgaatggtattcagttaaggcttttggctctgttgctgatgatttaattaagcatataaaggaaggttcaaatgtgtacctcgaagcctccatacgttcaagacgttggatcgctggtggtgttgaacgacatggcatggaatttcatgcttttgtcgcacgcgttatgcctgagcctgttgtcactcatcattctcaagctgaaacgctctctgcacctcactctgatgcaagtcttaccttagccttacccttcccagaagatgaggctattgttaatgctcctgtaccagctcagtccatccagccagctcattctgaaaagcccaaacagccgtcttctccgaaaccaaaggagttaactgctgatgaagctcgtcaggctggttcacgttttcgtcaaatatttgaaagtcataaacaacgtatcgctgatttagctacagctgcgcctgcaacggatgatcctgcccctttaaatcaaagtaaggcaatcggtttatctgttcagcctccagctccagctaatacacgtaaactgctcattaaacattgtaaatctccatcctctacggaattcctcagcactggaaatccacacacggatgctctgttaaatgctcgtaacgcattaatcagaccagtagataacaatgtaaatgaaatggcaggttacgcgcatattcgcggagattag

SEQ ID NO: 446249 - DNA, 240 bp, Serratia marcescens
  misc_feature (151)..(160): n is a, c, g, or t
atggcttacaacaatcaaagtcgcagctcatacgataataaaagtaacagtaaaaaagacaccaaagctaacccgatggtattgcttgatactgctactcgacatctcgttacactcgaaaaagagtttactgttgcagcatcgtggaacnnnnnnnnnntcgtggaacccctctctttcctttgcgaaagaaagtgtttttgcgaaaaatgtaataaacaacaattcgtacctcactga

SEQ ID NO: 446250 - DNA, 489 bp, Serratia marcescens
atgtcagtaactgcgattgaaaaagactcagcccgtgccgtaaaaaaaatcatgacctcctttgccagtaccattgggaacagcaaaaaagaggcgctgtgttggggcgtgaagacctcgcctgaaatgcagttagagatcgctaccgtcctcgcaaaaaccgtcactgaaattggtggcgataaaatccgtggcgttatggttttagcccagcaagccaaaatggttggaaacagaactcctgagttgaaagccataccgaaaagccacgttgtatacatccctaatgctgaatcatggcgacaggattcccttctgcaagtaatcctccagtcatcacaagctggatgcaaagctatgattggattcagcaccccttcaaaactctctctgggcatctatcagtttttggtaactaagcaaattaccgacggtattgttaccgattgggctatcaacatggatatgccgatttgtgatatccagtaa

SEQ ID NO: 446251 - DNA, 489 bp, Serratia marcescens
  misc_feature (424)..(433): n is a, c, g, or t
ttgatacattgcaatggggatttgattatgagatacgatgaatacgttagtgggctccagaaggctgttgttgagttggataacgcagtgcaggttctgattcaggatgtggcaactttgattgatgaatactgggttgatgtgaaagcacatgatgcgtttctgccatttgcgtttaacgtccagcgtcagcaaaacggatatcgcattcgctggggggagctgtacaaatccaaaagcactagcggttcttcggcaggaaaagtcaggatgaaacacatcaataagggcaagggagatgcgtactttttgacgcaatttaagaatcacccggtgtggtttgaagtcatttttcacaagtacgaatcgcagctaactgagatacgaaaagctatccgttcaaatcgcaaagcgaggaaaagtnnnnnnnnnntatatcccagagtattgcgttctactccaaatagtacggaagtattgccaaactaa

SEQ ID NO: 446252 - DNA, 882 bp, Serratia marcescens
gtggcaggacatttactggttggctatatcgacccttacctgctgagtattctacgatggggatttacatcgctgttaatgttctctctgtattggagggtgatacgaaaagactggcacctacttacagagaacctagcaataaactctctgttttcattattaggccaagtaagcttcccactgacgctctatatcggcttgcagtacacaagttcacttaatgccgcaatatacatttccgccaccccctgcttggttctgatcattaacttcctattcttcaaagagcatatttcgaaacgaaacgtgattggggccgttgtcagcactattggagttatttatctagccctctctgatgtcaatggcgagtcacagtttgcatcgttcggagttggagatgtactgactatcatttccgcactcagctgggcattttattgcgccttgttacgcaagaaagataaacgcattacgcatacctccttcgtcagtttctgctcgctgataggaactgttatgctgataccgatctacctagcctttttgttcttctcgagggattcgctcaccctatcaatgccagaggatgcatctatttaccctgctcttggtgttgcctatcttgttatcttcccgtcatggctttcttacgtattctggaataaaggtgttgctatgatcggtacaaccaggagtgagatcttcacgcacattatcccggtctcaggtggcttactgagtatcgtactattagatgagcaaattcatctgtatcatgtaatagcactggttatgattatctttggtatcgtttgctgctcaggtaaaaataaagagaaatcctcaatcacagcgacaccaagtaagtctgtataa

SEQ ID NO: 446253 - DNA, 303 bp, Serratia marcescens
atgaaatgggcacacaaccccagtaagaaggggatgtcgcagaaggatgcagggggctttagcttagctctggtgggttacattaaaaatacaggttcatatcgacagtggatcacttacgcatcagcagatgagcgcatgcacgttgtaataaacctttacgaacaaaaaaacggtttaattatgcttcggccattcattctgagttacgatgagttgatgttgactccggccgatgtaacgcagtacaccgaccaagttaattcgatggataaaaaacaacatcctgaatggtttaagtga

SEQ ID NO: 446254 - DNA, 1257 bp, Serratia marcescens
atggactatgttcatcaaaaaacgggttacttagatgcatttaaaaatatcgcatcaaaaaagaaaaacactaaggccaaagagggcgatttactcgcttgcatatttggaaatggctcaaactatggtgttcatcatatgtcatcaatatcagatagagccatcggtgtgcttagagccgtcaatgatggttatattaggcctgaaacaacgagtgaagctaatgatatgatagctgatgctttagcaaaactccccattttcaaatattatacgattaacgaaagtgccccatttggtagtattgatggccaaaaacatggttgccgaatcaatacatttaaagcccgtttttctgctaaatatttccgaaaagggaaaggcgtatcagcactcacattagtttcaaatcatgtaccaataaatacgaaagtgatttcagccaatgaatatgaggctcaccacgcattcgatttactctataataataccagccatattcagcccaaaacattagcaacagacacgcatggcgttaacaatgtaaactttgctatccttgatctctttgggtatcagtttgccccgcgatatgcaaaatttaaacacgtttttaatgaattgtttgagatcgagtatgatgaaatcctttccctgaaacttaaaaaatcgctcaacttatcactcattcaagaagagtgggaaaatattcaatggataatttgttcattaagccgtaaaacgacgacacaaagcacggtgattactaagctttctaacagtaagaaaaacaatcgcaccttagcggctcttcgtgaatatgaccgaataattaagtgtttatacgttctcgattatgttgatgacaaaatgctcaggcagtttgtccaacaagcacttaatcggggtgaggcttaccatcaattacggcgtgcaattgcgtcaattaatggtaatcaattcagaggtggcgatgattaccagatagaacaatggaatgattgtgctcgtatcattgctaactgcattatttattataattctgcattattatccagtttgattgaaaaatttgcgcgtgaaaataatcaagaagcggtgaatatgatagctgagttatcacctgtcgcatggcagcatatacagctggccggtaattacacctttggccttaaaaaagataatattgtactggaaagattactggagaatttagatcctcttatttcagaagagtcgttaagcttagcggcatag

SEQ ID NO: 446255 - DNA, 750 bp, Serratia marcescens
  misc_feature (330)..(339): n is a, c, g, or t
gtgaatacgttaatccctatctcaatgggtcaaattaaccgtatcgttactccgtttgagcgccctaccatccagcggttgcagctcgatgatgtgaaggtcaatgtcgaaggcaacgcggtttatgtttatacgccaaactctcgtccagtcgcgctgtacatcagtgagaaaggcgatgaaagcgtgtctatctctgtctctcttgtgcctcagcgtatcgccccggtgcaagccacgctgatgctctctcgcaaattaaacaatgcggctgtagctggtggcggagtgtcacccataatgtatggcggaagcgaagcgaaagctaannnnnnnnnntgggaacagaaggatagctatgtagagacggtcagaaacattctccgtaccgtggcgttaggtgacatcccccccggttatgcactggggaatctcacctcttccgtaagtatccctaactgtaatttcaataccggcactgtgcaggactacatccgctacaactttaacggcgggcagtacattaatggcagtcagttcagtgtcattgttggtattgcacaaaacacgggcccaacgactgttaccgttgatgaatcactctgtactcacccacaaatggccgctcgtgcattgtggagccgtaatacgcttgctccgggtcaaaagacagaagcctattttgtcctgcgaaatggtcaacaacaagtacgtgttgatgacggtgctcgtcctaagttagcggagtga

SEQ ID NO: 446256 - DNA, 1302 bp, Serratia marcescens
  misc_feature (1278)..(1287): n is a, c, g, or t
atggaaaaattaaaagatctttgggctaatctcgacgctaaaaagaaacgctatgcgctttgggctggacttgcaatcgtaattatcccgcttctacttgtcatcatgcctgagaacagctcacctcgttccaaggcaacaaaggaaaaggttattcagaacgttttgactgactctgatactacaggggttagccagaacgcaattgcggcacgacttcgctctcttgatgagacaattaagagcacaaagacagccgtcgatacgctgaataaaacgcttgatcccgacgcactgaacaagcgccttaccaatattgagaacgtacaaaaaaatgaggcagcggcaagacaaaccctcaataatcgcattgatacgctgattaagaacccgcctgccagttcgactggtggcgcacttaatccaaaaaatgtttttgctgcacctcaagatgggcaatcaggcgaagcagctgaaaatcaacctcagaatgcaagggctacagcaagcggaacactgcaaagtgtttatgaaaacgatattgcgcctgatccgtctgattttgaccattcagctgatgcgtctaaatccaagaatgaagctcctgcgtctgtgccgaacattgtcaccgttcagcaagacatcaaagaagagcatgattcagatgaagatactggccctgaaacctatctccctgccaccagcataatctctggtgtatttatctcggggatggacgcaccaacagctcagaatgcacgtaatgacccgtaccctgccctgatccgtattaagaaagatgccatcctgccaaaccgtttccgtgtggatatcagagagtgcgggatgctggcagcaggttttggtgatctgtcctctgaacgagcttacttccgctcagaagtcattacttgtatccgtgaagacggtgccgtatttgaggcgtctattgatgcttacgcagtcggagaagatggtaaagctggtgtacgtggtcgtctggtgacgaaacaaggccagtatttagcaaaagctttaacagcaggattcctgcaagccgcctctcagttgtttagcgtgcagtctataccaacgattaacgtgaaccgtgacggtaattcgagaggtggtagtccttatgagcaagtaatgagcagtcaagccatgcagggtgcagccatttccggcgtaggtggtgcgctgaatcgtttagcagatttttatatgaaaatggctaccgatctgttccctgttattgaaatcgacccggcccgtagnnnnnnnnnnaacgtatcatgttag

SEQ ID NO: 446257 - DNA, 1224 bp, Serratia marcescens
  misc_feature (59)..(68): n is a, c, g, or t
atgagcttactttcaaagaggctgaaatatccaagctttatacgaaagagcacccagcnnnnnnnnnngctttatacgaaagagcatccagcatatcgagcgttgatggagaagcgctcgacattgcagcaagaaaaagataagttgaataaacgtgttagcaagatgcctcaaacccagcaggaaatacttcgtttaacacgagatgttgatgctgggaaagaaatctatatgcaattgctgaataaacagcaagagctctcgatcactaaagccagtaccgttggtaacgtccgcattattgactctgcggaggctgcccctaaaccggtaaaaccaagaaaagtgctaatcatcattattgctactttatttggcggtgtgctttcagttgttgtagtagtcttgaaaaatatgcttcacagagggatagaaagtcctgaggaacttgaacagcaaggcattaatgtgtacgcgagtattcctctttctgaatggcaacagaagaaagatagctctatcctcaataaaggacaaagaaagaatcaagctaatgttgactcgttgcttgctgtaggcaacccagcagaccttgcgattgaggctgtacgtagtctacgtactagcctgcattttgcgatgattgaagctaaaaataatgtgttgatgatatgtggtgctagcccgaatatcggtaagacgtttgtaagtttaaacttagctgctgttgtttcacaggctgggcaaaaagtcctccttatagatgctgatatgcgtaaaggttatgcacatagcctgttaggttgtgagttaggtatggggctctcagatttcttatcaggtcaaacgtctgtcgaaagcgtaattaaaaagacagagttatctagtctagactttatttctcggggtaaagtcccaccaaacccatctgagctattaatgcataaacggttaaccgaactcttaacatgggcaagcgaacactatgacatagtgcttgttgatacgccgcctatccttgcggttacggatgcagctattgttgggcgaaacataggcacaacattgcttgttgcgcgtcatggtataaattcactgaaagaaattgaagtgagtattcgtcgtttcgaacagaatggtaccgagattaaaggtgttattcttaatgccgttgaaaataaatccggtgacgcttacggctattacgcttacgagtataagtaa

SEQ ID NO: 446258 - DNA, 603 bp, Serratia marcescens
  misc_feature (587)..(596): n is a, c, g, or t
atgagcgaatggaatatttataccgttgggagcgttgattttctttacaacgttttaaacgcgatagccatgatgatgaacagtggtctattttctgacatctttcgtatagctgccctgctgggcgttatcggtatcgtcatcgcgtctgctatctctggggggaaaacattatcccttgggcaaatggctgtgtgtgttgttatgtatatgtgcttctttcaggtatctacaagggttaacctcgaagatgtgaccacgggtgagtttaaagcggtggataacgtgcctttcggccttgctgcacctgcctccctgatttcactgattggttattcaatcactgagaatatggaacaggctttctctacccctgccatgactcagtacggcgcattagacccattatttacgatggcatctctttacgacacgatgacgacgcctatgcgctggaggatgggatcaaccactgataaaaacctcacgaaatctatcgaaaactatgtcagagattgcgttatcagtgatattgcgagaggcgctaatacctattcaaatatctggagaaacagcagtggcataannnnnnnnnncttctag

SEQ ID NO: 446259 - DNA, 138 bp, Serratia marcescens
atgagcgtactgatgccatacatcggtacgctcatcatgataaatatcgtcagagatttactttactctgatgccttgtttatcaacaataatctcgccatcttctttgataaattcacgttgttgcgaatgaggtaa

SEQ ID NO: 446260 - DNA, 519 bp, Serratia marcescens
atgcgtggagatgttactcgtagaaaatcgtgtttatttactatcaggtcgtaccgggggggtactatgaatgatggaatgtttgggttgccaatcaaggcaccgggggcgctgtactggttcaatatctcgtttctgtttttggtcgtgacctcgttcatggcgcttgagtctgggagctttgcaattacgtttgtccttatcgcgctggtggttatgaccgttctgggtatgcggtatccattggtgagtgctcagggcgtcatcaggacaccaaagggatttctcgtatactccctattcattctgatcatgtgtgatactcaaacgtatgtctttgaaaagccaatttcgttctctggggtaatgagtgtcgttcttactggcatcgtgtcttttagtcttggccgttcgattgtgatcggtcgattgggtatcgaagagccaccagcagataaggcagaagaggactctatgtataaccccgaagatgttggcagctcgcctcatctgaaataa

SEQ ID NO: 446261 - DNA, 318 bp, Serratia marcescens
atggtattcagggacaccgaagagcgttctgggctggactatgagtttgtcattgataaaagtaccccgtacctgaaatcacgcgatgaatgggtcattcctgctgattactatttcatgatcggagataaccgcgatcactcatgggatggccgctactgggagaatcctcccggaacacccaagcacctgcgcgggttagtgaagaaagaccagattgattcccgctacgttaaaaccttatttaatttcaagctgttcgatagctatgatcccctagaagccgaattaaggattatcagaaacaatggtcattga

SEQ ID NO: 446262 - DNA, 285 bp, Serratia marcescens
atggaaccaatcaagatttcacattctgtagatgaccctcagaagatatttttctggactatcgacgaagctttgcctttcttctttttcctgatgcttgggatcttcactggccgaatcctgacgttcgtcattatcggcattgtgattacccggtactacggtagttttttgcagcgtgcatctgaaaattactttttacacctgtgctactggaacctcggcgtttctttcggaaaaagcacgattgtacctaactcttttgaacgggaatttgttgtatga

SEQ ID NO: 446263 - DNA, 582 bp, Serratia marcescens
atgaccgctgagatttcgaccctgaaatgggtcgtgttaggcttattgggtgtggtggtaattctttcggcaacgcttatgtcccgttctcaggtcgtcactatcgtacctccgaacctgacacaaactgcgtggctggatgaacatgctgcttccgcgccgtatatgagcgcgtgggcggtttatgttgctcagtctctaggtaatgcaaacccttcatcggtcaacatggtgaaagagtctattgggccgttccttgatgcgaagatttacaacgaaatgatgaagcgtattgatgaccagattgatcagattaaacgcgaccgtatcagtctgtattttacgcctaatcgtgtcatcaccgaccctgccgctcccggaaccttttttgtggaaggtaatcagggactggaaggtattacaggtcagcccgtagttaagctaatgacttttcagattaatgtggatattaaggggtatcgtccggtcatcacttacgtgaacatcaagcaaggaaaggctgttttgccttccgaagcggcgaaacgcggtggtaaaggcaatacctcgggggaaaaataa

SEQ ID NO: 446264 - DNA, 795 bp, Serratia marcescens
atgaacgaagtcttaaaagaaaacctgatgaaaaagcagctacccgccttcatcaatgacaccttgggtaacgtccctttcgggccaaccctaaaaacgcagtcgaacgatgttgtggtgattggtgataatgaatatcacgttgatgacctgatgcagcgttgcagtgaggataaaaacattaagggcatgattgctcagctggtggagtacatcggcaaagccagccctcataagttgtatcgctatcaaaacgctgggtttctggcgaaggtatggaatggcctgacaggcgcaggagagacacagaaaatagagtttaaactctactgccggaaggttgaggcgatagccgaatcagcccctgtcatattgaaacaggcggaaagtgtgatcccactgttagaggctcttttctcactttatcagcgagatatctctctgcttgagcagtacatagaaaccgctgaaatcttcattacgggctttgatggcgataagtcattaacgagtcagatctcttttggtctagatcgcttacggcgaaaaattgtgaatatgaaagtcactcaggccacgttagaaatgcacctctcgtcagtcgggttagttcttgacgcatcagtggggcatgtggacagggtgaaggaatgcctaaacgatgtgctgcctatgtggcgcacgcaggtacgaatgtttaatgccggtgtttatgacatcgagaacgacaccgaagcgcaaaagcgttttgaagcgctggtaaaacgaatgaacgtaacgaaaggaaagcactaa

SEQ ID NO: 446265 - DNA, 936 bp, Serratia marcescens
atgtatgaaatactcggtttttcgcggctattaaagcgagataaacaagctttgatagagcgcttaaatgatgttgcaacaatctgcacatatcccaaatatatttttgatgaatgcctcgcttttttaggtcaaaacagaataggactggttggctattccactttacaaaatataattaccacggttttagctaatgagaggcaacgcaccgaggtaatcctttcaaatagcatgcctccaataatacataaaaaattaaagaagatactgcatacaaaaggggtattaaatagtctatctggccaacaaggcgcagctaaagactttacaccgacagagctcgcaagtgaaattgaaacgcataataccataaaaagtgtttatcccgatgtaaaacgtctcgttggtgaattaggtttatcgttaggtaacttaagctattatgcatcgattattcggcatcaatcgatttataaaattcgccgattccccgaatggcaagggatgttatatttggtttgttatttattttttcgttaccaagaaaccaatgataaattggtaacggcttttttgtatgtgactcggaaacagagggaagcggcgagtacttccgctaaactacgtatagcggaagagttggaaattattcgagaaaagttaacgtatgcgggtaatgttttacaactctttgttgatgaaaccatcagtgacgatacccaatttggtgatattcgtcaaaatgcatttgcaatgatttctaaagatgaaatacagctaataagcaaacatcttaataaaaataactttgataaaacccattatgagtggctttacatcgatacacaatacagaaaaattgcgaatacaatgaggtcgctttttatattgagtgtgaacctgggttggaattgctgtcttctcaattgttaa

SEQ ID NO: 446266 - DNA, 300 bp, Serratia marcescens; identical to SEQ ID NO: 84330

SEQ ID NO: 446267 - DNA, 867 bp, Serratia marcescens; identical to SEQ ID NO: 11541

SEQ ID NO: 446268 - DNA, 591 bp, Serratia marcescens
  misc_feature (198)..(207): n is a, c, g, or t
ttgtctaaggtgcatctcgttacaagctgctctaaaagtaaaaatggcgcagtgttagatacggttttcccgtcctcatcggcctctttaaaagaggcttatgacgaatggactgagcttttaaaaaaacgattttcagaccaaaactctgtgactgaaacgaaaaaattgtaccgtggcgaacactggaaaacggcnnnnnnnnnngtgccatatgaggccacattctcaaacactgcttacgacagcaaaagcatttgggaaaagcttataaattcgcctccgtttccgggaaaagcatcttccctgaaagagttactttcccgaaactcagatgacatctttgtgattgccctgtctcctgtttacctcagagcgatagagaatgatctggccgctggggcttattatcttccctgccccgatagccagttaatcatcgtcacatccaaagcgtattcaggcccactcagtaaatatgcccgctacggcgataaaagcatgttaaaagagctcaacgccaacatgactactctgaacataaaacatgcagataagatcgcctcatccctcccgcctattttgcgttag

SEQ ID NO: 446269 - DNA, 234 bp, Serratia marcescens
atggaagaagaaagcgaaatgttccccgccccgcttttaggatggcttccaaacctcgagtttttcgctctcaatcaggcgaaagtgattattaagggaaaagtaccgattttaaccaagccaaaagatgagaacgaaataaaaagaataaaggctaaagcagcgaaatttcaggctgtttacgagaaaaaagtccgtggcgaaaaagttcgctcaaaattagcaaacgcgtaa

SEQ ID NO: 446270 - DNA, 318 bp, Serratia marcescens
  misc_feature (294)..(303): n is a, c, g, or t
atgaaacagcgagagttaataaataaatatagcaatacactctctgtgacctgcttcgtcaccgtatgtatgatgccaacattttatgcatggagtgctgaaggcacaacctacgaatttaatagtgggttcatagtaggcagcaaagataatgttgatttagaacgcttcaacacgactgcaatcagtgaaggtaagtactctgttgatgtatatactaacggtaattggaaaggtcgctatgatttaaatgttgttcagcaaaaagatggcaaattaggtgtctgttatacnnnnnnnnnnacgatatgcagctag

SEQ ID NO: 446271 - DNA, 354 bp, Serratia marcescens
  misc_feature (330)..(339): n is a, c, g, or t
atgataggcgtttggtctatctttgtcggagttattatcgcatccacgccaattatattgagtaccatgataggggatgattccagtcattgggaaacaaataaaaatgacaagattgattttgaagaatacataaaaaaaggcaactctaagggatatcttgaagcgttatctatttcaactcgtggtgaatttattatcaacagtgtattagagagcaacgtggctaatcaggacgatgccagcaatctgattgatgttttctcaaaggccgatgctcagcggataagcgttgggctgtcacaagcgatggctattgaaggtcagctnnnnnnnnnntgcttatgtgattga

SEQ ID NO: 446272 - DNA, 195 bp, Serratia marcescens; identical to SEQ ID NO: 403344

SEQ ID NO: 446273 - DNA, 129 bp, Serratia marcescens
atgttggacgagtcggaatcgcagaccgataccaggatcttgccatcctatggaactgcctcggtgagttttctccttcattacagaaacggctttttcaaaaatatggtattgataatcctgatatga

SEQ ID NO: 446274 - DNA, 360 bp, Serratia marcescens
atggcggtgaaggtttccgtgacacaaatgctactccactccagtctgtctcatctggaaatgtttacgagggacaagttgttacccctgaacctcagcagacacaaactgatgtacagcacaaacccgcgtcacaggcatcagaagaacctcagccaccccatgcagctcaaaattctgagtctacagatggtgctcaggcaatgtctgatattcccggtgtccgtgtttatgcacaaagacgcatcgcaaaaatcattaaacgcgccagcattcaaatggcttttgaaacgtcaatatctgttatcaaaactgaatttgaatttaatgaaactgaaattgcgtatggtcttcgcttaa

SEQ ID NO: 446275 - DNA, 234 bp, Serratia marcescens
atgggtatgccgtctgatgccattttcaacgcggtaaaccgtgtggcaaaagacgacagcaaatccgccaacattcatacattaaggcttgcactggaaaaacggatcattacccagtgggaatttgatttttactcagacacgatgaataaacgaaaattgacaccaaaacaggttgccacgcgcaagcgaatcaatcagaagctgggccagctgatgaaggaagtgaactga

SEQ ID NO: 446276 - DNA, 210 bp, Serratia marcescens
atgagcaagacacaaatgcagtatgccaaccgagcttggcgcaaggctaccgccaattggggcatgaccagaaaagaacatcgcgatttctgccgtgctcaggcggccattaccgtggcggtggatatcgcggaacatttcgacatgctccataaccaggctgacgcagactacgcggtgcgcgaagaactaacgtactggggtgattga

SEQ ID NO: 446277 - DNA, 165 bp, Serratia marcescens
atgagaagacatatttgctctgcgctgatggcgctcatcggcggcaccctggggctcggcatctacaacgtcgagtggttccggttcgtgatggccactgttggctcgattggtctgctggctttgctgacttacttcgctatggggaaaactaaatggcactaa

SEQ ID NO: 446278 - DNA, 630 bp, Serratia marcescens
atggcactaacgactgagaagttgaatagcagcgatgaacaaatctgcgacggagactctgccgaaactatcgagaaaaacccaaaatcgtgggctgcgtggaaacgcgaagctgaacggctgcaggccattatcgatgaggtggctaaccgggaggcgcagccggcggagattggaaggcgatccgttttcacttgttcatcatgcggagctcaaggtctggatgagccattagaatcaagatgccattgcatgggagacggtgcacattgggttgaatctgcgctctacaccgccccgccagcgccagcagtgccggaagccattatcacggcaccaattgaggctatgcgctgcggctcggctgcgagttatgttctgggctggaacgcctgccgcgccgcaatgctggctcaacctgtaagtggtggttacaaattagtgccggttgatccgaatgatgaacagctgcgcttggtgttagctgttcaatggcccgctctctatcgagagcatctgcgccatcctcttaatggccctaaatccagagaagagaatgaaaggcaaattgctatcgctaaacggcagtatgccgcaatgctggcagcagcgccggagggtgggaattga

SEQ ID NO: 446279 - DNA, 210 bp, Serratia marcescens
atggctgacatcatcgacaacgcacaagagcaagaagaactgattatcctcgccgcattatcaaaccgccctaaaacgtcaatggtatttaatggtcgctgttattggtgcggtgaaaccatcagcaaaggtaatttctgcctcggcgatagctgtgctgaagactacgaacgccggataaaagcagacaggcaacgaggtgtcgcatga

SEQ ID NO: 446280 - DNA, 1959 bp, Serratia marcescens
atgtccgactttgaaataaaaatagatctgaatgttttgaatcatcttggtatgagtttgtattccaatacaccagctgtattaacagaaataatttcaaatgcatgggatgctgatgcaaggaatgtagatataaccttggatgttgataatgaaactgtcataataaaagacaacggtcatggaatgtcaaaagacgatattatcaacaggtttttaaaggttgggtatgccagacgtgaaagcggaagattcaagagtgatggtttgcaacgacaagtgatgggaagaaaaggtattggaaagttagctatgttttcattagctaataaaatacaggtgttctctcacaaaaaaaatgaagatgcacagggatttgaggttgatgttgatgaattacaacgctgtattaaaagtagtgaaaattatgtagccaaagctatcgatgttccttttggttttgagtttggcactacaataatattaaaggaattaaagaaatccattgatagaacacagacttatctaaggaaaagattggcacgtagattcagtataattggcccagggcacgattttattgtcaaaataaatggaacagaaataacaccagaagatcgcgatttcctttccgatttggaatttttatgggagtttggtagctcagatagtacaagaattgacgcctgtaagaatttatcaaaaaagagtttactggaaaataaaatttcttttgatggtgttgattatcgaattactggatatataggtagtgtcgagaaaccatcccaacttaaaaaagacccagaaatatcaaataatacaataactgttatatccaatggccgtgtttttgaagaagacatattgcttgagtttggtagcgcaaaagtttttacaaattatctggtaggagagcttgtagccgatttccttgacgagaatgaaaaacctgatatggcaacatcttctcgtcagaaattacaacagaatgatccacgttatcctgttataaaaggatttttagagcgaaccttacagaaaattgataaagaatgggacgaatggagaagagccaaagggttgaatgaagttaaacaaacatcacctgcggttagcaaatggctagcatcaatgtcaagacatgaaagaaacagtgctgaaaagttacttggtaaaattaatacatttagattttctggagatgaagaaaaccaaaaatcagcgaaaaagacggtattaaaaaatactgttctcgcctttgaaaggttaagaataaaagataaccttgaagctttggataagattagcgatctgaattcagagcactttagagaggtatttgcttctgtaaatgatattgaagccagtctattctatgaaattacatctcagcgtttaaaagtaatcgaaaaattccaaaaaataacagatgacaatgagttggaaagagctgtacaaaaatatctatatgatcatttatggctgttagatccttcgtgggaaagagttacaggtagtacagttatggagcaaactctaacaagagaactcaaagaggttgaccctgaaactgaaagtggtgcaaggatagatatagcatttaaaacagtttcaggaaagcacgtcattattgaaatgaaaagacctaaagtgtaccctgatattcacgctcttgtaagccaaggcagaaaatatgttatagcaacggagcaatggtttaggaacaaccctaatagctgccctggaggaaaaatcccttcaatcgacgtcgtatttcttgtaggtaaaggatatgatggcgtcagtgataattttgtccgctcacaattgcaatcaataaacgctaaggttttaacatatagcgatttaattattcaatctaagcaagcttatgctgagtatcaaaataaaaaagatgatgcagctagaataatgcagatagttgatgggatttaa

SEQ ID NO: 446281 - DNA, 1056 bp, Serratia marcescens
ttgattagagttgttgatcttttttgtggagctggcggtttaacgcatggacttcaaaaggctggtttaaaagtagtcgctggctatgatattgatgccacatgtcgttatgcatatgagaaaaataatagtgctctgtttgtgcaaaaaagtgtaactgatctagatgatggtgagatagataaacattttcaaggagcaacaataaaaatattagcagggtgtgctccatgccagcctttttcaagttatacaaatacagaaaaatcggataaaaaaacaaaagaccaccgatggcctctactgtatagcttcgctaagcaaataaaaatatgttcacctgatattgttacgatggagaatgttcctagagttataaatcatgatgtattcaaagattttgttagctcattggaatccgaaggttatttcgtttggtatgatactgtttactgtcccgattatgggatggcccaaagtcgttcacggctcgtactattagcctccaaaatgggcgagataaaattaattccaccaactcatagcaaaggaaattacaataccgttaggagtgtaattggcaaactcccgccaataaaggctggtagtgctgataaaaaagataagttacattttgcctcttctctgtctccattaaatatggagcgaataaagcattctaagccaggtgggacatggcgagattggcctgaatcactacgagcttcatgccatataaaagaatcgggatcttcctatacggcagtatatggaaggatgagttgggataaactaggctcgacgatcacaacacagtgtattggttttggcaatggaaggtttgggcatcctgaacaaaatcgcgctattagtcttagagaagcagcattgcttcaatcttttccaatgaattacgagttttggccaaatgacataaaaatagaaataaggaacgttgctcgtttaattggaaatgcagtgccagtaagattaggtgaggttgttgggaaaagtatcttggagcatataaaagaaaagcgtaatgtttctgcatag

SEQ ID NO: 446282 - DNA, 723 bp, Serratia marcescens
atgaacagcaagattaaatttttcattgtgttaggaatgcttgttatatgcattccacttgtcgtgtatgtcgtgacatttcacggtggtttatcaaaaaactcgcaagactggggtgctttcggttcttatcttagcggtatatatagctcagcattcagtttcttgagcgctatcattttgatagccacattgaaagaaatgcaaaaggccaacaaacaagaaagagaaaatttcgtaactcaattagccaataacgagtctgataaaaaaatccatgacgttataatgctatcagaaatgataaataaactaatagataacaatcaaaccataggcgatagaaaggccttacatcacggccttgctagccagatgtatcagaaatgtagaaaattccaagtcactgaagagcatgagctatatgaagcagctattgatcttatgagagaccaaagagaacgatttgcctctgaggtccatgttcttggacaattagcgaaaaaagttgcctctattgaagatgaggaagttgcagacactgcaaaagcgattgtgaaaggattaattaatgattcatacagattctggctctattgctatgctcaagtctggaatcttgaagctaaatattacttaaaaaagtgggtcggtttttgcacaattccagatgaacttgagagatacttacctgatccccatgacctgccaacagatgaataa

SEQ ID NO: 446283 - DNA, 159 bp, Serratia marcescens
atggaactggagaaagctgctattgaagttagctatgccaccgggcgcatggtgaagtggactgacatggcattctatctaatggatgaatacctgaaagaagcagtcagggacttgaaatcgtctacaaaaacgtctcccggcgcgggaaaaaaatga

SEQ ID NO: 446284 - DNA, 159 bp, Serratia marcescens; identical to SEQ ID NO: 446283

SEQ ID NO: 446285 - DNA, 402 bp, Serratia marcescens
gtgccagcagagccagtgctttcccaatttcagcgggagcacgccgagaagctcgagttgtatgaggcatcgcaaaatctgccagtcgttgcgttcgccaagcttgcgggcaagtcccgagaccaggtcaatcgcgacatcaaggctgggcggctgctgacccttgcgatgggtaatcgtgggcagaggatccccgattggcagttggatccgttgtgccgagaactgacatcgctggtgctgtcgaaagctcgtagcgccgatccatggcgtgtctatcatgtattgaacacgccggtggatgaactgggagggaaatgtcccattgaggctgttcatgagtatggagtcgagaagttgctcagtgaagccggaaaggtgttggaagaactgacggcataa

SEQ ID NO: 446286 - DNA, 192 bp, Serratia marcescens
atgattgatttgaaagaacttaatgaccttctccctgatgatggccttgttttaattcgtagagaaaatggtaaaacggtaggtatgcgtttggtcaatagcgacgaacacatttcgacccttaacgcgatgttggaagtagcaaaatcggtgggttattcgattgtcgcccctgatggaaacaagctataa

SEQ ID NO: 446287 - DNA, 288 bp, Serratia marcescens
atgagcaaattaaccgaagaggcccgcggccgcgactgccaaatccggatccccggtatttgtaattttaatccagaaaccactgtgttggcgcattaccgcctggcgggcaccagcggaacggcaataaagccagatgatgcacagggcgcctgggcctgcagtaactgccacgatgcgatcgatactcgtacaaaaactgaatatgaccgtgaaaccctgcgcctttaccacgccgagggcgtattccgtacgcaggccattttgagaaaggaaggaaaattatga

SEQ ID NO: 446288 - DNA, 897 bp, Serratia marcescens
atgccttgtatgagccatgatacaattttcgtttttaaggggacaaggggggagcctgtggaatccgagcaagttattgaggctttaaaaaagtttaacgacagactggagaacgaggtggcttcagcctatgacgataaaggggcagaatttggagaacagcgttatgcagcattcaaacgctctttttcaaggtttataaaggaggaaataccttctgaaatatcaaactgtaataatgctttgacacagcagatttacagagtacgcatgaggtatgtgccagagagccaatacttttggagttgcaatggcgagagagttgcctcctacattgattctttgataattgatattgagaatggtgagtttgagctaagagctgaaccagcagagcatgaagaatttgaaagtaaaccagttgaatctaaatcatatgaatctaaactatatgataaagtgttcatagttcatggtcataatgaagagatcaagcttaggactgctaggtttgttgagaaactggggtttacagctgtcattcttcatgaacaagcaagtcgcggtaagactataattgaaaagatagaacgttatacagatgttaactttgctattgttctttatactcccgatgaccttggaaatacaactgaacaagctaaggccggagagctgaagtctagagcacggcagaatgttatttttgagcatgggtatctgatggctaagattggtagggaaaatgttgtcgcacttgttagtgacagtttggagctacctaacgatattagcggggtcgtctatgtttcggatgtgaactgggaaatggatattgcaaaagaaatgaagtcaacaggttatgatgtggattttaataaactattccacacttaa

SEQ ID NO: 446289 - DNA, 237 bp, Serratia marcescens
atgtttagtaagctgcagaccactcgctttatgaaaacagcaactaccacagacgagactacggtttactttgccgacagtggtatgagtattgccagcgtgcaccattacgggctacgcgacaaagtgagtaagcgcggccctgtagtgaaatacgatgcctgccaattatcttggctgaatggccctgccatcatcgccgtcggcgatatcctaataaatcatctaagtaattaa

SEQ ID NO: 446290 - DNA, 819 bp, Serratia marcescens
atgcgacacttatcattctacctcttatgcttaatctacccaatatgtgggtccgcgtatttgacatcgctgtcaccagggccgtatccgtgcgctacgtgtgaacaaactgttgttatggaaggtatcggtcggtcctccgtgttcatgaaccctcggcccgggccgtcgtgccatgtgacgctgtacatggggacgccaccagtgggaacagcgggtaaactggttacgaacgtttacgaatacgatggaatcgcagaaacagccggccgggacttattgtgtgatgggtttcaagtttggtctgggcccggcgcactagaaagtgtaaataaatggatgggacaaccaaggcgatttgcgtacagtcgcacctaccaaggagcagcctataacagactgatgtgtcaagtatacattgacctcgataatggaagtcgaaaacaaagttattggctatcgaaccatgcgtgtcctatacccacccctatgacccaatgtcaagttgtaccgatacgggaaatcgtacaccgagagggtaagatcggtcttgtcaattctagggccgatggcgaggttcgtgttgtatgcaaccagactgcatcggtgacggtctcagtggaaggaacgaccctagacttgaaaaatgaactcacacggattgagtcacgcctctacgtggggtccgagggcaatcaaatggtcattgctactgctagtccgggagtcaatgtgccgatcgtaagcgtagtgaatgctgtcgggactgccccaggggtataccgcggaacgaagatcgtcatagtatcgtgggactga

SEQ ID NO: 446291 - DNA, 516 bp, Serratia marcescens
atgggggcagataagtcatacagatcaaacccggcatgtgttgcggcgggtctggtgctcatgttctggggcggatgtttccctgtattggcgaaaacggccaccgcaacggtgacggttaaaattacgctgactgcgccgccatgcgaggtcaataacaataacctgatcgaagtgaatttcggcaatgacgtaatgaccacccgtgtggacggcgagtacaaaaaaatgccgatcaactacatgctgcaatgccaggggggagcgtccaatgcggtgcggatgcggattgacggccagggggcttcgtttgacggtggggttttgaaaaccgacaaagcggattttggcattgcgctgctgaataacggcaaacgctttcccatcaacggctggtcgaactttacttatcctaatcaacccatgcttgaggcggtaccggtgaagcgcagcggcaccaggctgagcggtggggcgttttccgccggggcgacgatgagggtggaatatcaatga

SEQ ID NO: 446292 - DNA, 876 bp, Serratia marcescens
atgataatcaataatatccatgaaaaagatttcaactctatagctagagaaataaacggcattataaaagatgggcttgatgattcaaaaaagataatatttctttgtggaaaagataaaagtgataaaaacagttatcggcacaaaatatcattattattagaaaaagaaaaaaactatcaattagcataccctgaagatcttttcgaagacctattagagggacaagcagggaatagcttattagccttagaagagcaactagcagaagcagtagatttaataattttaatacctgagagtcctggctcatttgcagagcttggagctttctctatgagaaaagagctcgctagtaaaatgctgatattacgacagggaaaatataaatctgataaaagctttataaatcatggccccatacgtttagttaaaacagcgaaggggcatgttcaggatataccaagtaattttgatgtttcatcaagcatttactcagcaccaataacaagacaaataaggaaaatgataccatcagggagaaaaaaaaggaacatagataacatactgatgtatcaaaatcatatattattattggtgtatttatttgatgacatgactcaatcgacattaaataagctgcttggcataatattaaatagaagactaaaatcccaagactatacagcgagcaaagcagcaatccactctttaatccgttcatcgctgatagagaaaaatcatgaaacacttcaaatcaaagataaaggatttcaagatattaacacgagatattatgcaataaatgaaataaatgcacttagaattaaaatcatgaacaaacaattaggtagacagttaaaaaaaagtgtgtaa

SEQ ID NO: 446293 - DNA, 780 bp, Serratia marcescens
atggaaacaaggggtaactaccagattaagcctattcgtgagttagggcacgggacatttggtcgggttgaattagttgaggtctacaacgctcacgggcatctgtgtggtaagtatgcgagaaaagtactttcggtagacggtgcactaattaatgatctttttaccgttgaagattggaaaaaaagatttgagcgtgaagtcaagtatcaggctaagtgcgtacatgataatatcgttccaatatgtatccatcatctaagggccgaaagcccatggtttgtcatgggtttggcaatatctgatttaaggggtgagcttaattcaaacactctttcagatgatgaaaaattgaacgtcctgagaatgatctttaatggcgttaagttcattcatgagaaaggcatgcttcacagagatttgaagcctgaaaatgtacttagatatagtgaaaaatgttacaaaatctctgatttcggcttgataaaaaagttagattcagaagcgcaatccaactttctatccgaggtgcttcaaaacagggaaattggtataggtacactaaagtacatgtctgacgaagctaaaagaggggtttatacggcaaaatcagatatttactctttgggggtgattgtgaacgatatgaacataacgcatatcgagggaatcaacgctttgatagataaatcagctgcattcacacctcgttctaggtatgattctgtatctgaaatgatagttgttcttgatggcataattgcaaggagagcgaaatga

SEQ ID NO: 446294 - DNA, 747 bp, Serratia marcescens
atgattgaactgttgaattgtggagcattctccttcgctaaagattctacgcgagaaaatgaggatgcatttttgctcccctcaccatatgaggacggttatatcttcgctgttgcagatggcgttggttcatatggtggcgccaaagaagctgcgaaaacagccataagaatcctatcagaattaggaaaaagtgaatttctgaagcctgagttagttctgaatttaattaagaatgaaataaaagagtcaatgcaaggagggctggataaagctaaggcggccacgacactctcatattgcttcataaataatgattacttacatgttatacatgtgggtgatactagggtttatgctaaaagcgggcttaagttgaaacttttgacaaaagatcatacacagcatcaagaattgcttgatgatggtctgtatacaaaaaaagaacttgtatccctccctggtaagaatatgctcacggctgctatatcaggtgcgttatcaatacgttatcaatatattaaaattccctttgatgatctggttagtgaagatcagactatcatgttggtcatcatgtcagatggtgcctatcatttctgggagcataggccacgattttcagcaaacacgatgagtaacgcgagtagcttcgcgacaaatatgcataagagaattcagcgtttgggacctaacgatgatcactctttaattgcggcaagttttaaacgagcatcgaataattga

SEQ ID NO: 446295 - DNA, 204 bp, Serratia marcescens
atgggtttcggtggcggtggcattcgcgccgagcaggaggccaagcacagcgtcaggagcacggccacgggcgcactcatcgtttttgatagcatcctgaaacttcctttgataaatttcggcctgctgacgcagctgctgttctcgttgttgttgtgctgcttccagagctctattcttccgctcttgttcttgcagtgttga

SEQ ID NO: 446296 - DNA, 387 bp, Serratia marcescens
atgggattcaacgaccagcccaaaaacctgaaaaaatccattaacgataaatataaccgaagggtaaggtcactttctcggcacctcgaggattttatttatcatgcggaaatgaaactggatgaatctatttcgggaaggatttatcgcaggagcgagattgagtcaattgttgagaaagtaaaagaattggtggctatccttccggtttcaaatgaacctccttcaattaattttgatattattgaagtccttgagaatgcaacagaagaaactcagcgcattttatcagaaggacaaaaattcctcaataacctctctcctgaagaatttgcagaaatgatatcaacattccaacaaaagaaaaacgatagtgaatctgagtga

SEQ ID NO: 446297 - DNA, 906 bp, Serratia marcescens
gtgcttactttgatagttatacaaagtttgccgagaagagataccaggtttttcattacatctttctcggtgattaaatgtatatcttccatattttcctctgacattggttttgatatgaaactaggaataaaaaaagaattacctgttcttgcgattgttaccgctctaggatatttgtcagcatacatgtttcaattcggaatgctaacttactatggaataccatttgaatttatatcagttgatatcaactctattctattttcaattataattatatcttttgtactcgtttttgtcttaattcctttttatttgctaactgcctcagccgcatctagtggtaataaaaaaatcataggattccttcctgttattggtatggaactttttcttattggtgttctctctgttttttcggctgaatatataatcaaagaaaaagaacctgtggttggttttttttctgtattttccataatttacatggcgtttttatttattgttgttgctattaatatcttggttttgtttgtgaaaatggtaggtgggtttatgcctgaaatatataaatatgttgctataatggcgtactcacctgcaacgatggcggttccttttgtatgcggaatgatgtatgctaatttgcattccgctgtgtcattttataaagacactgactattttttggttttggaaaatccaaagggaattatagttgctaaatgtgatgataaaaaagggatttcttacaaaagattaagttctgatgatgttgagtttgaagtgaactataacagacttataaacaaaagtgttgctaactgcataaagaaatggggcgtgggtagtaaaaacatgaactccttcaatgattacatctacggaaacagtgagcgctga

SEQ ID NO: 446298 - DNA, 1434 bp, Serratia marcescens
atgtcagccgcaacccataacgtcaaaaaagtcgctgaacaccgccagcgcattctcactctgttgttgaacaataaggaattggtcgacggcattctcggccggccaggggatgaacacgccctcagccaaagcgaactgctgaaccagacggcggaaatcaccggcctgcttgacgacatgcacgccgccgacctggcggacctgctggaagcgctgccgcaggatgaacgtatggcgctgtggcggctggtgggcaacagcaagcgcggccagacgctggtggaggtcgccgaaccggtctgggacagcctgatcgaagaaatgagcgataaagacctgctcaaagcgatcaaaacgctggacgtcgacgagcaggcctatctggcgcaatacctgccgcgtaacctgatgggccggttgctgacctcgctggagccggagcagcgtgcccaggtgcgcgagatgagccagtacgccaaagacagcgtcggctggatgatggatttcgaactggtgacggtgcggccggacgtcacgctcggcgcggtgcaccgttttttgcgcatgcgcaaaaccattcccgacgccaccgataaactgttcgtcaccgatcgcaaaaacaccctgctgggcgaactgccgctcaccgcagtgctgctgaacgacccggagatcccggtgcgcgaagtgatggacagcgatcccgccacctttcagcccgaagacaaggccgatgaagcggccggcgcgttcgaacgttacgacctgatcagcgccccggtggttgacgcaaaaggcaaactgatgggccgcctgactatcgaagagatcgtcgacgccgtcaacgaagagagcgacaccaatttgcgccgcatgggcggtttgagcccggaagaagacgtgttcgccccggtcagcaaggcggtcaagacccgctgggcctggctggcgatcaacctctgtaccgcgttcgtcgcctcgcgcgtgattggcctgttcgaacacaccatttcccagttggtggcgctggcggcgctgatgccgatcgtcgctggcatcggcggcaacaccggcaaccaaaccatcaccatgattgtgcgcgcgctggcgctgcaccagattgaagtcggcaacatctcgcgcctgatgctcagggagctgggcgtcgccatcatcaacggcgtggtgtggggcggcatcatgggcgtgatcacctggctgctgtacggcgacgcggcgatgggcggcgtgatgacgctggcgatgctgctaaacctgctgctggcggcgctgatgggcgtggtgatcccgatgaccatgctcaaactgggccgcgatccggcggtcggctcgagcgtgctcatcaccgcgctgaccgacaccggcggctttttcatcttcctcggcctcgccactctgttcctgctgtaa

SEQ ID NO: 446299 - DNA, 1119 bp, Serratia marcescens
ttgcaactaagaaagcaaataattgcgtttaatgataaatgcagagctgaaggtcaagatgaagagaagcttattccattacttaaagatactgagccttcaagtgttaaggtcggtaacacggttatatggaataatagttttaaaggaaatgtgtttagcctaacagaacaagaggtgtctaaagtttgcgctgctatttctagaggtgatataaatatagaaagcgtacaagacattgcgaatttgctagaggtaccagttggtaatttaatacatttgttatacagatcttcctccgtaaaatataagtcatttactattcccaaaaagaatggtggtgagagaataattttatctcctcaaggaggggttaaaattcttcaggaaagagctaagaaatatttagatgctttctataggccaaaaatctctgctcatggctttattttaaataaaggaatatttaccaatgcagaaaaacacgtaaaaaagaagtatgtgttaaatatagatttaaaggatttctttgaatccatcacatttccaagaatatatggtgtattgaaaaaacatccttttcatatggggcgatccgcagccgcggtgttggcacaattatgtgtccataacggaaaaatgccacaaggtgcgccgacttcaccggttctatcaaacattattgcgtcagcactggataagactctagtccgactagctggtaaatatagaatgcggtatacacgatatgctgatgatatcacgttttcttttaatcaatctcctccttcggatatagcaaaaaaaatagaggatacaggtgattatgagcttggcgattcattaaggcttgctatagaaaataatggttttaaaataaatgaagagaagttcaggctgcagttaaaaacagagagacaagtggttacaggattaaccgtgaatgagaaggttaatcttgaccgtaaatatattcgtttgactagagctatgattgacggatggggaaaagataaagttcaagctgcaaataaatatcataaaatacgttatggtaaatgtgataaaacgataaatccgcagtggaaagttttaggaatcatatatatgggcgcttga

SEQ ID NO: 446300 - DNA, 1509 bp, Serratia marcescens
atgaatcttagtgaattcatgggatcttacgtaaaccatccagtagtgtttgttggtgcagggtttagccggagatacctagtcggtacttactcatggccagaacttctaaaaaagattgtttacgaaatgaaaggaagtcatgacttttattttgattccgcaggcagaaacgctaattctttaggtgaagtagatctacccaaagtagctagcgaaattgaaacagagttcaatagattattagaatctgataggaatggtaagtttaaaagaataaatgataaatactacgagtatgctgcttcaggaaactattctgccagtcgcatgaaaatatttatatctgaacttgtagatctacatcaaataaatgatgatgataagtattcaacagaaatggagttatttgccaaagctagtcgaaatataggttcagttattacaacgaactatgatagattcattgagacattgattgggtttaatccaatcattggaaatgatattctgctaagtaacccttacggctctgtatataaaatacatggttgcgtctcacatcctgagtctattgtaatttcagatttagactatgaaagatttaaaatcaacaatcacttaattagagcccagcttatttctttatttattcacaatcccattgtattcattggttatagcataagcgatgagaatatcagggatattctgaaaactatcttttcttatatttctaaagattccgatttggccgataaggttagaaagaattttctgctcattgaacgagaggcagacagcaactcccttgaagtgcttgaacatgatgtggttatcgaaaacattggtaatattaaaatcaataagattaaaaccgataattttcaagggttttttgaggaattaataaaccttaaacttccagtctcatctatggatattagaaaggttgaaggagtaatgaggaaaataaaagaaggtggtaccgttaaagtaaaaatagttggtgacttagaaaacttagccaatgacgaactagtcatggctgttggctctgtacagaaaataacttaccattatcaatcagcatccgaaatggtcatgaattattttgaaatcatggattccagaaatgatgcgctaattatgttgttaaataaaataaaagtgacccgaaaacagtattttacagcacatggattttcaaccatatgtagtgaaatagatggtattgaacaacttaaaaaaaaccaggaggcaaatctcactacctattttaattctattgatgactctgagagaattaactgcgacacagttgatgatatcatttccctcggattcaaattgtataaaatcgttcgaattattttttacaacacatatgtaaacaatattgaacttgataatatcgaaggctatctgagggaaggggtggctcttgagatatccccctcagattataaaagacttgttagcttatatgactttaaacgttacccttaa

SEQ ID NO: 446301 - DNA, 2634 bp, Serratia marcescens
atgacaaccaccaatccaattccaagtgatgatttaagtgacctgagattcaacattgaaaaagttgatgagattgtaaatactactaactataactataacgacaggtttggagttgtacgatatacgtggtctggaattgaacatctaacccgttcatcaggcgccgcaatggcattcgctactgagcaggagttattggcgtttacacctgctacatctaatgttctcgctcaggtgacatcaacaggtgttttttattattggaatggtagtacctggagcaagtcagcatatcaaccaaccacagatatcatcaccccgtacaggcttggcctctttgaaagtggaaagaataagtacaactataaaacatcacttgatggtaagtacataaatgaatcaggcgttatctctgataatagcgagtacaccctttcaacatatataagtgtaaaggcaggggtaatgtacctgtctaactatcaactgcggtttgtttcgtatttcgataagaaccaagcattcattggttatgcggagaatcaactcacttttacaccaccgcagaacacaagttttatccgtataactgtaaccatcgcaacaaaacatttggtgcagatggaaaaaggcggcagtaagacagtgtatgaaagctacattgataacttccgcagagagaatgatgattttgctaaaatctccctacgttcggccatggggtatgagaagggtaaaaacctttttaacccagcactggcaatgcagggttacttcataaaccaatctgggattttggttcaatctgctgcatattgcacatccgactacattccagtcattggagggagtgactacagggcaaaccaacaactcagatctgttgtcttctatgatgtagacaagactcttatttctggctctcttgatgttagttcttactttacagctccgatgaacgcggcctatatccgctgttctgtactgttggctagaattgctgtcacccaggttgaattgggtcgaaatttaacaacatttgagcaatttgggattgcgccgccaatggcaatagacaacatgccagtggcttttccacgccagcatgttggcccagatgatgttggcatatttgaacccggtaaaaatatctttaacccctatacattatcaaatggcttcatcgatgagtgggggttttataatcctgatggctcttcatatcgtgtatctgattacattgtgattgagccaggcgtgggttatgtatcgaacaaacaaatgcgattcgctacattttatgatgcgaacaaggcatttattagcacaactgcatttattggcacgttcacatcaccagttaactcagcttatgccagaatcactgtaacaatagctagctccgcaggttttcagcttgagaagggggctgcagctacggaatatgaggagtatcattatggaataaagcaaaagcttgacaatggaactcctattgtaattgactctacttctgtatctgagacgccagattatttcggtctggagcggctacgtgaaacgcatatgcgattgagtaaattgacgtggggagagtcaatacagttttcacacgtaatgataggggatagctataccaggactccagagcgctatccattaaaggttgctcagaaattgtggcatttattcaataacacagatatcacaacgaggaacccgccgatcggatttggttatcgctctttcggatttaatgcatcgattgccgcaggcaagaatagcgacatagttggaacggatgttgtagccactggatttacatgcgcttataacgctggtagcggccttgatatctcgtcagtatctagttcaaccgctggctctacgatcacatggtcagataatttcgcgcttgggtttacttactcactttacgccgaaggcgggagtggggttataagctataacgcccctggaatgagcactgctgtgcagattgacctttcgacatacacagcagggatgcagatcattcctctttcatctatgcccacgacaggcagtggtacagcaacgataactgttatttctggcgctgttaccttgtacggattaatgatcggtaatgcgacatccgctggcgtagtagtgcacaagctcggaggtagcggcgcatcatcggcaaactggacaaatgctgatgctgttcgttggaaaaaagcgttcacgacgttaaaggcaaatctgaccacaattatgctcggcacgaatgaccagggagcgaagatggcgccagagcaatttaaggccaatctccttgagatgataacccgcatcagaagcgcgcaatcaacgacggatattttgctgatctgcccggctgaaaataatcgacctggcggcaatgaaatttctatgtcggcatacgcacgccaaatgtacgaaatcgctgtagagcaagacgtggcattccttaatttgcagcagtcatttggcgttaaccctgctgattatgctgcgggatcggctcgaccgtggatggtgggagatggtctgcaccccgcaccagaaaccggagggcatgcgattgctgctgccattctgcgctctatgagactacctcagtaa

SEQ ID NO: 446302 - DNA, 525 bp, Serratia marcescens
atgcaagaagtaaccgtaatccccaaatttgatttcaagcaaatggtgatggccgtacaaggtaaagtcatcactaccagcctgatcatcgccaactacttcggtaagcgacatgacaacgtcttaaggaaaattcggcaagttcgcgatgagtgccctgaagaatttgccttcctcaattttgaggagactgattttattgataaaaatggtgatgttcagcccatgtttaaattgaccaaagatggatatatgttggttgtcatggggttcacaggcaaggcagctatgcttatcaaggtgaattatattcaggcctttaactggatggcagaacaattatctcgttggcagctcatgggggaggacgcccaacaccgccatgcgattaaagccgcatgttctgaagttaaggggcggttcggaagtcgcctaatgaacgagcgaaagaaagagaaaaaggttctaacagtggagtatgagcaaatactgtcgctgatacagcccaaactaatccttgaataa

SEQ ID NO: 446303 - DNA, 339 bp, Serratia marcescens
atgagtagtagaagttttgactgggaatcagcccttaatgatgatgacggactttacttttacccaataggacacagagttgacggtcattttaaaattcatttcgagctcagcggctcatacagcttaaacgtttcagatgcgtttttttctgaaaaatctgttcttttttttgaatattccgatatagacgacgatcagccagcacaaataggattcattgaagcagacgtgaccattgagtcaatgatcgaatatctcaaaaacatcgaccctgtctatcatgagtcgatttataaatccattcacgagtgggcactgaaactgttctatagatag

SEQ ID NO: 446304 - DNA, 573 bp, Serratia marcescens
atgggacgccagactcacattgggtatcacaactgtctagacgatggtggctacgaatatcttcgccaacatgtacctttcttgagtggaaatggcgagaatcagtggcttacacaaggttactacttctggacagatagcccatattgggctgaaaaatggaactcgaaacatcaaactgcaatcagtgagtttacaattagttttcacgatgatgaagaactacttgatttggtaggaaattccagacatatccatgagtttggaagaatgaggcagaaagttgctgatagtcttaagatgaaagacctttctaaggtgacggtgaatcaaatcattggttactttagaaaaatagaaagatcgcgctcgggttttttcccgtacttggcggtgaaagcccaagatagcacgaaagatgacgcttttagcgtgatgagatttgttaaagcctggtatcgtaaagagacattagcttgtcatacacgccagcaactttgcgtgttctctcacgcaagagataggattaccctcaaggggttcttgtctccagaaacctatagagaccaataa

SEQ ID NO: 446305 - DNA, 234 bp, Serratia marcescens
atgctttcatttgaagaaagaatggcgatactagatgaggttttggctgaacacacgcctgagtctctgtttcaggagctttccgaaactcctgcatgcggaccatctctggcatcttattgccttgaaatttcagagaaagtgttgcttatagagccaagcaatctagaagttaaaagtatagatgatgatatttattcatcagaagcctttgagtatggtgaagcggcataa

SEQ ID NO: 446306 - DNA, 201 bp, Serratia marcescens
atgcataagtcactgctggttgctttgggtgtaatggttctatcaggatgcgcaggccagaacgatgattatcaattgaatagcaaacaatcgtctgctcagaaagacagcaaagagtggaaagagtttgtcgctcctctgtctaccaaaactcaatcgccacaagacagactgatgaagcgtgccgagagaaactactga

SEQ ID NO: 446307 - DNA, 447 bp, Serratia marcescens
atgtccaagcaatactctccttacccattcagaatgcctgccgagattcgtgaacagctagaggaaaaggctactgaggcaggaagaagccttcagcaagagatgctgcgtaggattgagctgacccttaaactagagggggcgcttaaaagtcgggttaatagtattgatggtctacatgacttagtttttgacaccatcatggaaaacaagaagctagaatcacaagtaagggtcctcactgagaacatgacgaagctgcaggaacaaaacagagttcttgccatgtccacccgaataagcgaagagcagcgatttgatggagtaaggaggaacttgtcgattattagggatgctctcgaaaaggccgagaagtcactcccccctcagacggaagagcctttcgataaacggccttcatataatcctaacaaaaagcccacctaa

SEQ ID NO: 446308 - DNA, 639 bp, Serratia marcescens
atgaaaagtatagccaattcagaacttaatttccacggcattaacctgtcacccgttccgcagatgaacgatatctggttgacctctgcagacctggcgaaggcgcttggctacgcctcaagcaagagcgtatcaacaatttactcacgcaattccgatgagtttacaggcagcatgtcaatggtcatcaaaatgatgactaatggaataaacaataacttacgtgaaaaaagcgtccgcgtgttctctcttcgcggttgtcatctgatcgctatgttcgccactacggataaagccaaagagttccgccgttgggttctgaatattctggatcgcgaagtcgagcactcgccaatcgctaagcagttcactgatgaagagctgatcagtctttcgtacatgtggatttggatggacaaggggcagcgggtgagtaaagcgatctacccagctatgaagcagatcggttcgacatattccgggtatttctacgacctgggccatgagatgcgccacctgattgaaaagacgcgtgaaacgttgatacgcgaaacggcaaatatcgatatgaacagcttccatgctcgtcacgcggcaccaatgctggacagactgaatgggaaaggggagttgcactga

SEQ ID NO: 446309 - DNA, 276 bp, Serratia marcescens
atgcgccaggttatcttttttcagatcggctttagcatcgtcaagcaacacatccggcaacagcaccacgaaaggagagtctccgatcaatggcttggcgcaaagtaccgcatgacccagccctttaggttgcccttgccgaatatgcatcaacgttacgcctttcggcgttatcgattggacttcatccaacaactggcgcttaacgcgagcctcaagcatcgcttccaattcaaaggacgtatcgaaatggttttctattgcatttttagatga

SEQ ID NO: 446310 - DNA, 264 bp, Serratia marcescens
atgaacaccctggccgaccgctactaccgcgacacccattacccaatcccgcacgccgattttctgcgtcttcagcatgcgcacgccaccggcgtgctgttcctcgacctgctggataccctcgacctcggcgggcagcgccccgacgctgagcaacaggcgtcgtttgcctcggtcattgccctgctgaccgaccagctcggccacgtcgtcaacacctgtgaaacccaaattcttgcccgcatggaggccaccgccgcatga

SEQ ID NO: 446311 - DNA, 264 bp, Serratia marcescens
atgttgaccgtttccaccccctctccatccaccccgtcgccggtgtttcagaacggcaacaccccgcgcgagcgctttatccgcctgccggaagtgctctacaccactggtctgtcccgttccaccgtgtacgagatgatgagccgcaagcagtttccggtacaagtttccctcggtggtaaaaatgtcgcctggttggcctccgaggtcgagcagtggatggacgaacgtattgccaaccgtcaccaggggagcgccgagtga

SEQ ID NO: 446312 - DNA, 1152 bp, Serratia marcescens
atgattgatagtacagcagaggaagaactggagcagttccaagaattgctcaattgtccagaacagaattggttattaggtgcggggattagctttaacgctaaaataccgttaatgtacccattaacaaatagggcaatagaattaatttctgacaaacctgaaatattaaaactagtagacaccataaaatcccagttaccaaaagatgctcatatagaacatatactcagtcacttaggtgactattcagctatagcctctcgttcagttacaaagtccatatctataggtgaggatgaattcagcctggagaaaatagaacatgctcacaacgaaatattaaatagcatagccaacaccatcagatatggatatgtagaaggaaaagaaataggtgatagtaataatttcatagtcaaaatagatgaacactttgagtttattaaaactcttttctataatctgagggcagggataaatgaaagaagaaaacctgtgaggctcttcacaacaaattatgacaccttacttgaagatgcattatctctaaacaaaattccatattgggatggctttagtggtggcgcagtagcctataggaattatagatatgggcagaatgaacccttaggtgatgcgaaagcatttgtcgtcaaaatgcacggttctatagattggtatcaaaacgatgatggatatttatggcgcgtaagagatagggacacatatccaataaagaatcaacgagttctcatttatcctcaatcaacaaagtacatcgccactcaaaaagaccctttctcatcacaatttgatttattcagaaaggcaatctcctcaccatcatataatgtattaatagtatgtggatatagctttggtgatgaccatatcaatcaagaaatatccctatcaatgtcaaatccggatagtaagactgttctattagctttttgtcaagaggttgaaaacaaactaccagaaacattaaaaacatggcttgatgagacttgggggaatagggtgtatatagcaactcaaaatggattacatatatctaaccggcaaccaataaaaagaaaagaagattatgatgattggtggacatttgcaggcatgacgatggtaatgaaagaaggagtaatatga

SEQ ID NO: 446313 - DNA, 1737 bp, Serratia marcescens
  misc_feature (1593)..(1602): n is a, c, g, or t
atgcaatttattccagtcgaagaattaaaaattggtcagatagttgaggtttctggtacaaaagtaagagttgaattatcaaataaagtcgaagagttgactagaagctatgaaggtaaagtctatccaataggacaacttggtagcatagtaaaaattcactttgggcgaaatatcatatttgggtttgtcacactgctaagaatgagatctgatgaaatacaagcaaactctctacccatcccccccgaagcagaccagagaataatggaagtcgagcttttttcacatggacaatggtcacaatccacccaaaaactaagtttcagtcgtggagttaaaacatatccacttcctcaacaaggtgtatatttattgacacacaatgaatcttcaggattattttccgctgccgaaggtgctagagaatataattatgatccattagttccttttgctcgctacactagtgcaacatcgataccatgcagagcgaacattgataagttatttggattacattgcgcagttttgggttcaacaggctcaggtaaatcaggagctgtggcaacattactacatagtattttggaacattcatgtatagatggaaataaaatagcaccacgaatcattatgatagatccacatgatgagtatggctcagcatttttagataaaggcataacatatcaagcatatagtgccattgataaaaataataaaattgatataaaactaccgtattggcttatgtcatcagatgaacttagaaatctgattattggaaaaactgagaaagaagcaacgtctcagaataatataatatataaggcattagcccatagccggatggtttcagtaggtttagtatccccggctccaacaaattataactggaacattcctgatgacgacttacctctacatgatcctcgccccaaagctggtcatactttcgaggagataatgtcatttgactgtgacaaaccaatagcattttcccttgtagagttcgaaaatcatatacgatatgttcaaggctcaagaatatcaaaaggtaaactagaaaaagaaacagatggaacattcgctgaaagattcaaatctatacttgacaagttatcagtattgagacgagatccgagagttgcatttttgatggaggattgggaaaaacacaaagaaataacattacaagacatactagatcaactagttggtgaaataataaaagaagagaaaaccaaggacataagaatcatagatatatccggtttaccaaatgaagtagctggtcctctaacagccatggtttctcgtcttttatttcaatataaagttcaccaaacactagaagagagaatagcagatccatttttactagtctgtgaagaggctcaccgatatgttcctgatcatggagaagctcaatatgcagcagctcaatcagctgttagaaaaatagcgagagaaggaaggaaatatggattaggcctaatgttggtgagccaacgccctgctgatatagagagtactgtaatttctcaatgtgggtcttgggttgtattaaggctaacgaactctacagannnnnnnnnnctacagatcagcagcatgtggctaaattcttgcctgatggtttatctggcctggttgcttcactaccctcccttgctcagcaagaagctatcttcgttggtgaagctgcagctcttccagcaaaaattaaaataa

SEQ ID NO: 446314 - DNA, 798 bp, Serratia marcescens
atgaaatacataataaatctaatcattaccttcgacccggacagccggttattaatgctcagaaacaatgaccaaattactatcgggttatccaagccagccacccgattgttaatcgagctaataaaaaacaataaaaatgaactaacgcgtgaaacgttgatcaagcacgtctgggaggattatgggttctctccgtcgagcgccacattgagcaaccatatcagtgagttgagaaaagcatttgaggcgttaggaggcagcaaagacattctgatcacggtgccgcgggtaggctttaaaatggaagcagaaattcaccccgaaaccaaactaccgaaagaagatacttccgttgaaatgattgagcccacggttgctgctagtgagccggcaatacaggataatgtaacggctaacttcacagattcgggccacaaaacaacgctacgccgcatgctgaagccaagcctggcgcttacccttggtttattcgccattactgcggcaataaagctgattactctgaacagagatgacgaacctatgctcgtcggtgttcaggataaatgcgagatttatactcctggggataataagaaaaataatgaacaatctgttcgtgcacgaaaaatgctctacaatgaaaagatagactgcatgcacgaaaatcatgacatctactatattgaagcgcgccctgccaatgactcattgaaaattaagtttatggcggtttgtaatcaaagcgccgatatgaactataaaaactgcaataactataaactggttgagtaa

SEQ ID NO: 446315 - DNA, 486 bp, Serratia marcescens
atgaacagagtaattatctggatgtctattcttaccgtcatcgccgcgagcctgttcttcttctatctgaacagtatcagctggaaaccgttccgctgtaacactcaagtgagcgcagatatggcaacaaaaaacagtaacagaattaagttcaacgtgaatataaatgttattgcctttcataaagactatagtgaagttctcgtgataggcacccttaaagtgaatagtgaaagttacgctgtctataggagggtatttgtcacccataaaccctctgatattaatggttatagtacaaccgtgattacgaatgagaaacgccatcctaaagacaacgtacccgatacactctggcaacattacatattaccagaagttccaggtgtcccattctacgtagaaacaaaaaaattaaggaaaaacttaatcctttataaaggactagataatccaatatttacgtgcaccataacgaaacagtga

SEQ ID NO: 446316 - DNA, 621 bp, Serratia marcescens
atgaataaaacattgaacatcgttatccttgatgaggataaatattacaccgctggattagcgatgatgttgacgatgtacttaaaaaaccgaggccagaaagcagagttcttttctaatcacgctttaggaaaaacgacagatattgtttttcaggcaatacgctgcggcacgttcatcgcgcctcacagctcaacctgtacgaacaacgataagcccctgtatgtcgccatcgctgaaagaaaggatgcacatttgcaacacttataccgcaacgttaataaatccaacatcctttatcgacaccaatcggtgagcctaatcttgcagcttatggaaaacatcatgatttctctacagaaagcaccggagaaatcccccccctcttcagcaacgttgcttcctaacccacttacacagcgagaacgcgaagtgctgcatcaacttaaagagggtaaaacacctgcctgcgtggcaaccagtctggggataaaggtcaaaaccatcagctcacacaaacgcgctgctatgaaaaagctgaattttaaacgaaccagcgaactgctccattggatgatccagggtggattaacccaccaccaaccgagaaaaggaaattga

SEQ ID NO: 446317 - DNA, 1389 bp, Serratia marcescens
atgatcgtctggaaacggctgacctaccgttttttggcctgcctggttggggggatgatgctgccagcggcttcatcagcgccaagcaagggtaatgccgatattccggctttgctgcaatttgccgagcagtacagcgaaaaaagctatgcggcagaaaaagcccctgccgcgcgggatagccctcgcactgaaaaacgcccaacccaagctgctgagaaaggtaagctctataaaaaaccggcaccacagcgcgaaacctggcgaattaaggataaggagatccagcaacagcgcacggaaatcgcccagctaaaattacagataacccgtctgcagcaaaacgccgtaacggcaagggttacgcccgactgggctgcgctatcccaactggcgcaaagcttgcgccaggcgctggggatgactcagacagaacgccaggcaaaagccaacctattgcagattcagcagcggtgggatcaggatcgggcggtattacagcaacagttgtccaaagcaaaagcagaaaaccagatcttatcagcggcagccaaccagcaaaaaaatttgctgctggaagcagaaaagcgcgaggcggcgcagcgggagcaacaggctgaattgcgctcgcagcgccaactgatgcaagccgagttggatgatgccgtcaagaaactggcagatacgcgagccgacataacttctttgcaagcgcgaagcccccgtctggtgacagccgatgcgctcaaaggcgcacaacagcgtgaggattacgccgcaggcgtttcactgggagaggaaattctgcaaatgcaggaagaacggcagcgttggggagtaaaatcggagaagggaatgctcttggccggcattgcagatgcctttgcgggcaagcggatgttgtcggatgatgaactcaataacaccctggccgccgccgaggaaaaggtggtatccgcaagagaaaaaatcagtgtagcccaacggcaaaaaggcgcggcctatctaggggagttcaagaaagataagcgtgttcaccaggcatcgtccgggttctggtaccgtatcgactatgcgggcgatgcgcagatccccgctaccgcctcggtggatgtggtggtaaaagaaacgctggtcgacggcaccgtcgtgcaagatatggaagcgactggtgccacgctgtcgcaaccggtggcagatttcccaccgttgtttaaagaggcaatttcgctgctgaaaaatcacggcacgatgaccctggtggttcctccagagcaggcttacggagagaaaggctatccacctaaagttccccccaacgccaccatgatctacaccttgcgcatagcggaggtatacccaaccgctcaagctaaaacgcagccctag

SEQ ID NO: 446318 - DNA, 519 bp, Serratia marcescens
atgaagtgtttctgggcttgctcagtctcagtagttttggttatgtcatttacagtcgcttctgcggagaacattacatacacaaaaccgtcagccgggagggacttatatcttacctgtaaaggttatcaggtgaagggggcgtctgtaattaacgtcgagaaaccttcttaccttgaaggtacaggtgagcaggttgagtttgcaatcatttctctcggtgatgcatctgatggactcaaggttttttttgattcatggggtttttcttcttttggattgattgaaagtcatgtaatgcatgagcactggtctttagttcatgttggggggcgtgtttcagtcaagggtgaaaagattgattattcatttgtagataaccagccacaggagggtgggagctataaacccaaaacaggtgtgttcctgtatggctgcattaactctgataaaaggccatcttgggtcgaaaaaatctacacaagaacaggcgtgtttcgagggggcatagaagactaa

SEQ ID NO: 446319 - DNA, 516 bp, Serratia marcescens
atggttcagagatataaccctgattacgtcatgcacgcggcgcgatttgcgccgtttgcacgcgaagctgagcacggtgagttcgttaaattctccgagtatgaagctttggtgtcagaactcgccaccagccagcagatcaacacccaaacgctgcaggtaaagctgacaatggctgaaaccatcaaagagctgactgatcgagttaatgcgctcgctgtggagaatgcctgcctcgttagagcgattaacgaccacaaaaactcaacgcacttctgtgaaagatgtggtgaagatgacctgtgtgccactgacgacgtgtgcagcgttctgcgaggcataccagatactgactccgccattgcagctttcgaagcgcagggagtggagaagtttgcagatgaactgcacaaaaccgccatggctatatgctcagtcaagccggacaacaccaccccaggcgcttacgcgggactggctcgaacattcgctaagaagcttcgggatgccaaatga

SEQ ID NO: 446320 - DNA, 552 bp, Serratia marcescens
atggatgcgatcaatgccgcgggtgggctctccgaaaatgcggattggcgtaacgtggtgttaacgcacaatggcagagaacagcgtatttctctgcaggcgttgatgcaacgtggggatttgacacaaaaccatctgctttaccctggtgatatcctctacgttccgcgaaatgacgatctgaaagttttcgttatgggtgaggttaaaaagcaagccaccttgaaaatggatcgaagcggtatgaccttgactgaagcgctcggcaatgcggaaggtatggatcagaactttgccgatgcgacgggggtatttgttattcgtccgctgcgtggtgctgaaggtaaaaaactcgcgaatatctatcagctaaatgcctcggatgccacggcaatggttatggggacagaattccagttgcaaccttacgatattgtttatgtcactactgcaccgctcgcacgctggaaccgcgtagtcactcaattgctgccgactatctctggttataacagtcttaccgaaggtactcagcgtatccataactggtag

SEQ ID NO: 446321 - DNA, 228 bp, Serratia marcescens
atgttttgcaatctgggtggctctggcctgcagctgcaggaactgcatttcgtggcgccgccggttcaaacgagcatcaacggtaacacgacgacgtggacggcgagcgtaatcacccggaaggtcttcaacccggatgacgactacgcagagatgatagtggaactgtcaccgggccagaggggaatactcgacgaggtggttaacagagaaatgccggagttttga

SEQ ID NO: 446322 - DNA, 231 bp, Serratia marcescens
atgcgtatagggaaggtaactaataatatttttcatccccagaattttccctgcattgataaaaacagcaccaaattctatatcgccttgaattacaaaggtgaagtcatgtcgtttttttatcctagtaaggaaactggccgcatgaaaaatatgctttggattcaaaaaggcatgaattatttctatatttccatggcgaacatcatggaaatcgtgttttatttctga

SEQ ID NO: 446323 - DNA, 219 bp, Serratia marcescens
atgatgtccctctgggatgcgctccggatgaatatgatgatctcatatcaggaacttgttcgcaccttccctaactcgatgcggcggcccggatgggccgcgttttattgccgccagcaaaccttttccttcccgttctgtccaacccatgaaagcgcgaaagccggcctgagttttggctcacacttctacgctgaaatcgcttttccccctgcctga

SEQ ID NO: 446324 - DNA, 801 bp, Serratia marcescens; identical to SEQ ID NO: 446015

SEQ ID NO: 446325 - DNA, 195 bp, Serratia marcescens
atgcaagcaactgtctatttcccggaaaaatatattaacaatgtattagcattggacattagtgaagctaccaaaaatgcaattaataataccaataatgttggaaagtcaaaaccttgcatgtttaagctagatgaacataaaataatcaaagattttactgaagtaatgcagtataaaattaacttaaaataa

SEQ ID NO: 446326 - DNA, 558 bp, Serratia marcescens
atgtattatcatattataaatattgaggataatcagaactatcaaaacgctgctgcagaaatattaaccagtacctttaataatttaggaaatacaagttggccgacatttgaatctgcaattagcgaagttaaagaatgcattgagaaaccaaatatttgtattggaataataactaatgatattttacttggttgggttggactccgaccaatgtataaaaacacctgggaattacatcctttagttataaaaactgattatcaaggcaaaggcattggcaaactattactcggtgaaatagaaaaagtcgcaagaaaacaaggtattattggaataacactaggaacagatgacgaatttaataaaacaagtctttcttcaacaaaaataacaaaagataatatatttgaatcaataaagaatataaaaaatgtaaatcaccatccatatgagttctatcaaaaaaatggttattttatcgtaggaataattccaaacgctaatggtaaaaacaagccagacatttggatgtggaaaagtttaatcgaagagtaa

SEQ ID NO: 446327 - DNA, 432 bp, Serratia marcescens
atgcacgacgctgcggcgtggatgtccgccaagggaacgcccgcctgggacgtcgcgcggatcgaccggacattcgcggagaccttcgtcctgagatccgagctcctagtcgcgagttgcagcgacggcatcgtcggctgttgcaccttgtcggccgaggatcccgagttctggcccgacgccctcaagggggaggccgcatatctgcacaagctcgcggtgcgacggacacatgcgggccggggtgtcagctccgcgctgatcgaggcttgccgccatgccgcgcgaacgcaggggtgcgccaagctgcggctcgactgccacccgaacctgcgtggcctatacgagcggctcggattcacccacgtcgacactttcaatcccggctgggatccaaccttcatcgcagaacgcctagaactcgaaatctaa

SEQ ID NO: 446328 - DNA, 270 bp, Serratia marcescens; identical to SEQ ID NO: 15286

SEQ ID NO: 446329 - DNA, 267 bp, Serratia marcescens; identical to SEQ ID NO: 446043

SEQ ID NO: 446330 - DNA, 435 bp, Serratia marcescens
atgcatcatgatcatcagccttattatgtcaggaaaggtgattcctggaccaagatagattattccaagacaccgaccgaatggatgaaaccgctggtacgcggagaagagacggaccttattgaattacccgccagttggacaatcgacgatattcctcctttcatgttcatgaaaacaaaacccaacagccaaggtttcatgaatcccagggacatcgaacagttgtggagagatcaattcgattgggtctaccgtgagcatgaatatgcgatctttacttttacgattcacccggacgtatctggacgcccgcacgtgttaatgatgctcgaacgcctcttaactcatatgcttggtcatccaggggtgaaattcctaaaattgaatgacattgcagatgactttgccaagcgatctccacggataaaataa

SEQ ID NO: 446331 - DNA, 309 bp, Serratia marcescens; identical to SEQ ID NO: 151835

SEQ ID NO: 446332 - DNA, 705 bp, Serratia marcescens
atggccggtcttcgcatgacgatcacatcaagctttaataatccgttccttaacccatcgcaagtagggtcacccttgctgctcgacagcacactggcgctgtacgaaatgcgtagcatctatgaccgtagtcctaatggtaatcaccttattctcaatgacctggttattgacgaatttggactggctagcgatgggattgagggccataacgcttacaccggaatttcagagccgagcgcattcacggtggttactgcaatcaatgttcctgtggcacctgcacaaacgacacagattttcagctcaattgccgaatcggggtctccactgacagggtgccgcctggcgatcactaacacggggcttttaactgcgtcaatcgggtcttcacctggtgtcactcttctcaactgtggctcagcagtgggaggctggacaatctttgcgacgaaattcagtgatgacggcatcatgtgcctgcgaatggggggagagaagtatcaagcaccactggcaggcacccgcaactatgctgtgcgccctatcatcctggcgggtggctacgttgccccacataacattggtattcctggtcatattggtctattcggggcctataacggggcattcagtgagtcagaaatgatgacgctgattcagaagggtcgcacagtgatgaaggggaatggggttaatatctaa

SEQ ID NO: 446333 - DNA, 2025 bp, Serratia marcescens
atgtatcatattgataaccccagcggcgtgccggtcatgcccaaagtgcaggacgtcaaaagcccgacgccgttgtatttcaccgaagaaaaagaccaggcgacctatccgggcgcggactggttcaatattgtcaccgccgagctgctgaacatcctcaaactcggaaacgtggcaccggacaaattccgcttcaaccagattgcgacggtgctggccgagctgattaacgaccgcctggcggctcagtcgcaaatctttgactcggaagaagaaggtttgcaaaaaacgtcggacggccagtatttcagtgtgccgcaagtgccgggcagcaacgccgctttcaaatactttaagaacgtgggcggtatggcccgcgaagtcgctgactcgccgtccagcagcttcgtgaacttcgtcatgatgatggggttaaatctgctgccgaccaatggcattttccctgggcaggctaatcatccattggaaatcggctccgctcgcggggaaatagccctaggcattaacgatcggggccaactactggcccaagcgggcattgccgacttgctgggcgttaaattccagccgctgccccctgagagtgagtatctgttcgtgattgacgacgatacaggtcgcgtggtgttcggcatcggcaagacggcctttgtcgaaattctgggaatgcgcattgaactcgccaatatcgataacctattggaagttattgaccagacgggattgattgccctgggtttgaataaaaacggtgtatcgctgacgtctacaccggcagctccaattgtgaaaacggaatactacgacttcgctgaacgcctgcatttgttcttcttcgggcaatcgctaagcaatggggcactgggtacaccagtgttaaatacacctgcgccaggcgcgttgatgtacaacgctggcgtacttagccgaggaaaaactccgacttcacttgtaccactgaaagaaaacagtgttgaaaccatggcatcggctctggctaatagctttgttagccatgtagagaatgctaacgggatggggggccgccagttaattttgaactccggcggagtcaacggagagatgatccaaaatctggagaaaggcacggcggcattcaatgacctagtgaatcaaattcgctggtgccacacctataacagccttgagggccgggagcatgcaccagattatattgtttgggtacacggtgagcgggccgcagcggacggtatgtccggcgctgagtataaaacgcgtgtaaagcagcttcgaagagacattgaagaagcgctggccgatattcgtgatccgtataagcctctgacgatgatgatttatcagatggcaagccatggtttctatgttggctcggcagaacatccgtcagttgaaatcccactggcgcacctggagctttcacatgaggacgacaatattcagtgctttggcccgaactacatgttcgccggttctgataacgtccataaaaccaaccacggttaccgccaaatggggctgcaagttgataaagctattcgtcatcatatgactaccggcgagaaattccgccctctggagcctatcaacttccgccgcatcagcgacagggtggcactgggccgtttcaatgtaccagagcctccaatggtttttgacacatccattgtggcgcagctcccagatggcaagaacggtatagaagcctgggatgacgagggccgagttccacttgagacgacggaaattatcgctggttcgcagctcaaagttacggctagccgagcttttgtgggagaggtctttattgctgccggttataccccagacaatcgtgggccaatcaccgataaccgttacaaggaatggtttgctggcccaactacgggcgtacgtaccacgctgcgggactctgataccaccgcgactgaactcaccggcttggatgggaaaccgtaccaacgccaaaactattgcgtccatttttacatgagggttgaataa

SEQ ID NO: 446334 - DNA, 885 bp, Serratia marcescens
atgagcgacttttctttttccgacactgaccaggcgttatggctttctcatttcgacaataagggtgtctatattggcagcggattaaccgttattccaaaaaataccggacttcccgccaataccaccacacaaaaatgcgaaccacaggacggatttaccggcgtctggaatggcacctcatgggattacgtacgtgataaccgtggcgtgcgttactggaataaatacggcgttggcacagttgtggttgagattgacgacgttattcccgatgaagccatttatatcgccccaccgaaaaaggaaccggggtgtgtgtatgtattcgagaacggcgcgtggcagcagctccaggacaaaaccggtcagaaatattacgacccactaggtcaggcgctgtatatcgatactccgtactttaccctgccggatgggtacacattcacggcaccaccggctacccgcgaggggtatgtgacgcactggaataacgatgcctgggaatacgttgaagaccaccgccaccaggtggcctaccgcaaggaagacggcacctcgatcatcattagcgatattggcccactggacgaggcgctgacgttccttgtcccggccacactctatgacgaatggattgacggcgcatgggtgaccaatatcgatgctgagcacgccgcccaagtggatgcggccaacgcgaagaagaccgcgctacgtgctgaggctgactctgccattggcgtcagaagcgccgcagtgaaatacggtgtcgccaccgagcaggaaaaagccgagctggaagcctgggaacgctacaacatcgagttgatgcgtatcgataccagcctggcccctggcatcatctggcctgtgaaaccataa

SEQ ID NO: 446335 - DNA, 216 bp, Serratia marcescens
atgaaaattaaagtgattaaacccaaatcggagacagtacaggtgcgtaagcccgatggcacgttattggcctccgagggggaaaccgtgccgctgtcggccttctggctgcgccgaattgctgaaggtgacctggaggtgagtgaaatcctggtgccaaaaactgagctggttgatgtagcgccagccattaaaccaaccaaagcggagaagtaa

SEQ ID NO: 446336 - DNA, 915 bp, Serratia marcescens
atgccagccccatctgcagaagtattacacgcgatcaccacctcgctgagcgcctcttatacccagggcctggaaggtgctaagccgttgtatgaatccatcgccacggtcattcccagcggtggtgcctcgaacacttatgcctggttaggtgactggccggagatcaaggaatggattggcgcacgccagttcgctgaactgtctcaaaacggttacgtcattaccaacaagacctgggaaagctctatcaaggtcaaacgcgaagcgattgaagacgatcaggttggccagtacggcgtcattgccaagcgcattggccaagatacggcggtgttccctgacaagctgactttcccgttgttggtcgccgggtttagcactctgtgttacgacggccaaaacttctttgataccgaccacccaatggcgggcggcacctatagcaacatcgtagggactggggccgaaactggcgagccttggttcttgattgatggttcccaggtgctgaagccaatcatctatcagaaccgccgggagtttgatttcaatgctctcgacgacctgagcaatgagcacaccttcaagaacaatgagttcctgtttggtgtggatggccgctcaaatgccgggttcggtttctggcaaacagccgttggttctcgtgccccactgacgacagagaactacgaaaaggctgtggaaatcctgcaaggcatgaagaaagacaacggcacaccgctgggcatttcaccgacaacgatcgtagtcggcaaagctaaccgcgccgccgctaaaaagctgatcgacgccatgctggtcgatggaggtgactccaacatctactacaaagacgttgatattgtgaatagtccattcgtagtggccccgccagcgcctccaggcccataa

SEQ ID NO: 446337 - DNA, 954 bp, Serratia marcescens
atgcctgctgaactgttggcgctctgttttgagttgcctgattacgttgataaccaaatacctgcctggttaccgatgctgcctatcggcccgttcactgggcgtgatggccgtgcatgggtgaacaatgaacccgaagcggttattgccaagtccctgcaatacaaccatctgccgttcgacatggaacacgccaccgaaatcaaaggcccgaaaggcgaagatgccccggcctacggttggattgaagacctgaaaattcagggcgatcaaatttgggcgcgtgttgcctggaacgccgacggtgaaaaaatcattcaggggaaaaagtaccgctactacagccctgcattctatttcaccgccgatggccaggtaacgcagttgtctagtgtcggcctgaccaacaaacctaatttgctagtacctgcccttaactcggagaacaccgacatgaaactgcatgaactgattgcagcggcgttgggcctgggtgcggaagccactgttgaaagtggtgtcactgccatccagagcctgaaaagcgccgagcaagtagcgctcaaccgtgcgcaaaaccctgacctaagcgcctttgtgccgaaggaaacccaccagttggcgctcaaccgagccgaatcggcagaagacaagctgaaggagctggccgagaaggacgccgaagtcttggttgatggggcgattgccaccgggaaagttgccccagccaatcgcgaaatgtacctggcaacctgccgcagcgaagaaggccgtaagcaattcaccgagttcgtccagggcgcgccggtgatcgttaactctgacccgatcaagaaaaaaccgggccactccaatcaggaattgaccgacgtcgagctggcaacctgccgttcgatgggcatcagcaaagagacgttcctggccgaaaaaactaaacgtgaggtacagcaataa

SEQ ID NO: 446338 - DNA, 855 bp, Serratia marcescens
atggctgataagacccccgatattatcccgaaagaatcgttagcctggttcaacgccaagaagctgcaacccggctttgattatcgcgatgtgtggctagaggagcacagcgccgcattcaccgtggctaaaatgacgcagctcgatttactcaatgacgtaaaggagcttgtgacaaccgccctggaacaggggcaaacatttaccgagttcaagcggctgctggagccgctactggtgaagcgtggttggtggggtattcgtgacatggatgaccccgtgaccggcgaaacaaaaacggtgcagcttggcagtgatagccggttgcgcaccatttacaataccaacatgcgcacggcgcgtagtgcaggccaatggcaacgtatagagcgaaccaagcgtgcaatgccttacctgatatacacactggggccatccagggagcaccgcgttgatcacctccaatgggccaatatctgcttgccagtggatcacccgttctggctaacacacatagggccgaatggttgggggtgcaagtgtggtgttcgccaggttagcaagtacgaatatgaccaaatggttcaggacggtgttacgcaaactgccccggagttcgacgacaatggccaacctaccggccaggtatcgcgagtcaaagtcccgttaaagactcaggcaccaccggtgaaaaatgtgaagtggttgaacaaacgaacgggtgaggaggaagcagttcctgaaggaattgatccgggctggaattacaatccaggcatcagccgccaggctgcgcttgagcggcagctcaaagccaagcaacaagtttttgatggtggcattcaaccaggttaa

SEQ ID NO: 446339 - DNA, 1584 bp, Serratia marcescens
atgttgaacaaaataacgggtgttattcgcaagctgatccaccccactaatggcgagtcagtcagcatcagcaaagaggagatgcagaccgaacagacccgtgctcgatccactggcgttcgccgtgcccatgctggcatcagcgtcgccagtaccatcacgcctcaacgcctcgccagcgtcttacgccgtgctgctgaaggggatgctacggactatttcatcctggctgaagaaatggaggaacgcgatctccactattcaagcgtactgcgtacccgaaaactgaaggtcgccgggattgagccaacagttgaagccgcaagtgatgaggcccgtgatgttgagctggctgatgcagtacgtgtgatgatggagcgccctcaaatccctgagctgctctttgacttgctcgatggcctgggtaaagggttggcagtgatagaaattctttgggatacaaataaagttccctggatgccgcgtgactattcctgggtagaccctcgttttctcaagccggataaagacacgctgcgtgaggtgcgggtaatcactgaagcagagcctaacattggtgaacctttggccccgtataagttcatcacgcatcagcctcgtttgaagtctggtttacccctgcgtaatggcctggctcgcttggttgcggtcatgtatatgctgaagtcattcacggttcgtgattggtgggcctttggtgagaaattcggtttaccgatcactgtgggtaaatatggcaataatgccagcgctgacgatatccaaacgttgattgatgccatagcgtctttggcttcagatgccgggtgcgcaattcctcaatctatgcaaattgaaatgcaggaaactgccagccgccagggaggtggtgttttatttgaaagcatggcggaatggtgcgacgcccagactagtaaagccgtactgggccaaacgatgaccaccgacgacggcagcagtcaaagccaagccaacgttcataacgatgtgcgaatggatatcgcccgttgggatgcccgccagcttgaaaacacacttaatgagttcttggttcgcccgttcatcatgcttaactacgggatccaggataactacccacgtgtttgcttgaggattaatgagccggaggatttaaaagccctcgtagaagccctagtgccaatgattgaccggggtatggaagtccaagtgtcagaggtgcgtgataagtttggtctgtcggaaccggaggctggtgcaaaaacattccaaccagcgggtaatgcagcaaacggttattccgtgttgccagcgatgaaccggcagcatattgcgcttaaccgccaatcagccccggacgatatcgaccaattgacagatgaagcgatcagcgattggcagcgtattggcccatcattcaccaacccagtgttggcgctagcccatgaggtaagcagctatgaagagttcctggctcgtctgccggagctacaagctgatatggatgctggagaatttatcgaaggcatgacccggctttgtttccaggcacgagcaatgggggatgtaaccgatgcgaactaa

SEQ ID NO: 446340 - DNA, 606 bp, Serratia marcescens
atggatccaataaccatttcagccgttgccagcgttttgatgaaagctggccctgcagtgcttcgttctgtcggtagtctgtttggtagggatacggccaaaaccgctgactctgttgcggggatcgttgaggcagttcacggagcagtcagcccacaagaccaacaacgcgtactcgaacagaaattggcgcagctcccgccagccgagttcgttcagcttcagtctttgaaagttcagttggaacagttccagttagagcgagacaaggcacttttggcagaccaacaggccgcacatcatgaacagcaggaaactatccgcagcggtgacaacgcagtggatgagtacgtacggcgtaccaggccactgatggccaggctatctctgtatagctgcattctttatgtactactgctggccatcgggcagcaagttgctgccatcgccactgcggcgggccacactatgagtatgcctgaaccagattgggatattgccttgatgttggccacgccagcgctgggctacctcggtttccgtacgctggatgggttcgcccgcttcagcaaatccagcaaacacaaaatgccggtggttaagtaa

SEQ ID NO: 446341 - DNA, 525 bp, Serratia marcescens
atgaatcattccgtaatggccgacgtgatcgcctcaaaaaagaggtgcttcaccgtatggctggtggccccaaaccggagccggttgattacaggggttgcgatggtactcatgccagcttttacaggaggggctgggagtcagtcggccccagggatatcgcttggcaatgccagcgttacaaggaaaaacaccatgttaaaaatcattgattcaccctggctggccgttgttttgctggtcagctcattagggttagcgttgagcgtggaatatgcatctcttgggttttggttcctggcattgctcgggggatgcatctccggagctgcaatggctatggaatacaagccgtttacaccacgggaatttgcgtcaacggtgactgttaccgtcggtaacatgctgtcgctatacgcgattttcattgggccacaatccgcggttcaggtcgtggctctttttgccggtgtggttgcccttcgacaagctgtgattaaggggctgttgccatggatccaataa

SEQ ID NO: 446342 - DNA, 528 bp, Serratia marcescens
atgaaaattgcacgttgtccagtatgccattcagatctgcaccttgacgctctcctggaagatgatgcggggcgggagttactgaaggttttgaccaggctacctggcgctggagcaaaagctatggtggcctatatcgccttgttccgccctgaaaaatccaacctctcgaactcacgcgccgtgaaactagttaatgaggtactggatcagcaccagcctggccgggttcttacccatgcgttaagtgaaaccgtcgagcgcatacgggccaagcgcaataacggcgatacaaagccgttgaacaatcatcgatatttgctagaggtttaccgttcttctgagcagatatttgcgcagagcagtaatatcgcggcccgtgaaaaggatgcagataaacgtgaaattgatcatgaccgtggccgcgatgattacctggcacagatgcatggttttggtcgagatgtaactacgctaccgggcggcatagagtggctggagcgtacccaagggggcaaaaatggctga

SEQ ID NO: 446343 - DNA, 276 bp, Serratia marcescens
atgaaacttatcgcctatgcctgggctagtggcttaatcgagtttggcaacgccaccccagacggtgcgttaccaatcctcgttgggcaagaagaaaaggcagtgaaagaagtcattgatgtattagcacggcattcccgcatcaataatcaattgttggttccgggtgttcctgaagcctatgaccagcattcagcaatggatgcattaatttatttttcaaatgtcgccaaaagaaattacgcagacttaattaaaggtgaaagtcatgaataa

SEQ ID NO: 446344 - DNA, 675 bp, Serratia marcescens
ttgattactcaggctattataaacgacctccgcaactcaacggccactgacgccacgactgtaacccagcagcatggtttcgagttcgacatcggtaccagcctgctgtacaaaactgctgcgtctctgacggcaacggccgccggcggcaacgcgacgggcaccgtcaacactggcgcatctcaccaaattagcaatgccgaaacggcagtgttgacggatgtgcaactgaacgccaatgccgccagcatcgtgaacctgaagttcgccgaccacctggcgaatctgaccatcaacggcaccagtgcagcaacggtcaacctgtctgacaacggggttaaccctggtgtcgatattaccgttaacaatggcaacgtgattctgaacgccagttccgggaatgatgatgtcatcgtgacgtcgacggccaacatcgccacgggcaccggcgactttaaccttggcaacggcaacgactcgctgaaatgggcggggaatgcggcaaccggcgcagccaacaccgtcggcgccggcatctccgctaatggcggcgcgggtacggactccatctccgccaacttcatcaccaaaaccgtggtgaccaaccaaaacgccctgggcgttcgtaccagcaccgtgaccagcaacgccaacaacttctcgaacttcgagtag

SEQ ID NO: 446345 - DNA, 258 bp, Serratia marcescens
gtgaacacaatgtttttgctgatggctgagtacaataccgcgtcgatccctcttgctgatgtatgcgagaagtacttcggcatgaaggtagctacggccgataaaaaagcttctcttggtaagcttcccatccccaccttcaggatgggggatagccagaagtccccaagaatgattcacgtaaaggacttggcagattacatcgacaagcagagggatcggggagttgagtatttcaaatcgatgcaaaacaactaa

SEQ ID NO: 446346 - DNA, 144 bp, Serratia marcescens
gtgaacaaggcgttcgaggcgatggttcgcctgaagtacggcagccggtacggccttgagcgggatttggaaggctactacgcccgcgagattgtgcgccggatgtttgaggtgtggtgtcattgtaaggggatcgcagcgtga

SEQ ID NO: 446347 - DNA, 759 bp, Serratia marcescens
atgaacaccatcaccattcaagacacacagttgccagtcgtcgagttccgcgatcagcgcgttgtcacctacgaaatgattgatgaagtgcatgggcggccagcgggaaccgccaaggatgcctatcaacgtaacaaatgtcgttttgtagaaaatgaagatacttatcttattgaatactctgaaaagaatgttttacgttcggactatattactgtcccttctcgcggaattcgtgtttttaccgaaaccggatacctcatgctgattaaggtatttggtgatgatttatcctggcaggcacagcgcgaattggtgcgttcatatttccgtcggcgccagcagcagccaaaaacgcaggctgaaatcatcgccgaaatggccctgctcaatgtcgaacaggaacgtcgcctgaaccatgttgaagaccgggttgaggctgtaaccgaaaccatcgagcaaattaagcgcggcacgatcccggccggctgggcgggatactcattgctcaggactaagtcagggctgactgataccaagtgccggactttggtcaagggctacaacatcccaacggacacgatcaccatcatgacaccagatggacagccacgccctatgaaaatcgtgctcgaatcagtcttcatgtccacattccgccaaatgatgacggaagccgaaccacgtggcgttcgctggtatcacccgctaatgggccttttccaggttatcggctgggagagtggattatgccgctaa

SEQ ID NO: 446348 - DNA, 372 bp, Serratia marcescens
atgactcagtggattaacaatattgctttaaatcgtcggcgtatcgccctcgcctatctggatttttgccagcgccatttcggcggcaaatggtcggacgtggttgtcacgaaaaagaaagtggtacgcgtggacctgacccaggaatgcgtcgaggcgctgatgaaagagttcatcgagaacatggttcgcgctgaattcggtatcgccggcggccaagagcagatcgccaaatcctacgacgcaatgctgagcaaagaccgcagccacctaaccccactcggtaagtcagcgatggaagaaatgatgatcgacgccgtcgcctacaagcttcacaacccgagcagtcagctgctgcaggtggtggcgtga

SEQ ID NO: 446349 - DNA, 345 bp, Serratia marcescens
atgagcatcaggaagatggcgttagcaatcacattactcagcgcctctgtttttgcgtcagcagctcagcagtgcggcggcttctatctcaaggggcatagtgatggcttggtttatgtaaacggcgtcaaaccgctaagccagaaggtcaccttccttaaagctaaaggtgattacgataacgttatgtttcagtggatggttgaggacgcaaagacaggccaattgctgggaatggagagcgtccgccgagatgctaagagtattctgaatgtcgaggccgtccgcgccaacatggacgcaccccgggtgttcggcacttatgactgcgtgaaggtgaagtag

SEQ ID NO: 446350 - DNA, 2091 bp, Serratia marcescens
atgtcgaataacggtttgccagtcactgacgtggtaggggtttctgttacccttggtcagcgccgcactgccggcgcatcagcaggtgatgcatacgcgcaagcagcccagggaagcgcaatatcagctgctggatctgctgcatcggctaaacaatctgaaattgcagctgctgaaggtgctgctgacgtcaaagagaatgcgcaacaagccactgacgcagccgaatccgcaaaagaatacgctgctatcgcccaggccgttcccaatgcctaccctgatgagttagctgctcaaaaagcagttgatgatgagacagaaaagcgagaattcttctatgtgcggtcacaatcaacaacagaattagcacttgaatatactgttgttaatggccgaatagtccctaccggacgatggactattgctggtgcagcggtaactgaggcgctaaacgaaatgaaaacgcgggttagcactattcccaacgagccggcggggatcgacaataatattgccgcaggtgttgagttcgcagatgggcattttgctccgcttatgctcgatgacgggcgccatgcctttattgatggtaatggtatgttgagagttgttgctgctgattctgacgtcgtggtgcgtccatatatcgaagcgcagccgtatacgcttcccgatggttcagtttgcacgaaaatcattgtcgatccgtatgaaaatatcacagaggcatggactgaagacggcggctattattttgctactccagatggtcttaaacgcgtcggtgatttaaagccagcagcacagcaaatagcgcaggcaacagctgttaacgatctggtgatgaactacggcgcgacgcgtatctctgttgccgatgatctgcgccctgtaatgtacattctccccacgttcggccaatccctggcgcagggatggagcacttacgcagatgacgtgttgatcgctacgacgcagctctatccagacaacgcgtggatgttcaaatcggatcggggagctgggaaagagaacccgaaccgcagcgcagggctgatcgatgaaattgtgtcactgaaagatacggtgaacgggggttggaaagaaacggcgtgctcatcttctgcggcgcacattatcagcgaagttgagaagctgacggggaaaaggattcatatcctgcgctatgttgctgcggatggtggtaaggcatatcgcaatctcactcgcgggacatcggcctggtctgccttggtgcaaggactgatcgatgcgaaacgaatttgcgaacggatgggatttaagcctgttgtattggggcttgatgtgaaagcaggggaaaccgatacggacggtacgcctgggatgttccccgagctttatacccgtttcctgaggaatcttgataggaactataacgccgaagtgaagcgcattttcggtggtgaccatccagaaacgccgatctttgttgagcagtgcagcttccaaccgtggggagagtgggacagtcgtgtcaggcaagggcagcttgatgcggacggacttgggaacatcagatttaccgggccgggttatcaatacccacacccgggcgacgttattcacatcaacagcctggggcaaaataagcgcggagtggctttagctcgcgccgtagcatttgaatgctttggcacgggttttatctctctcaagccgcgttcagtctactggtcaagcgcaaccactattgatgtgtattgcgcttcgtcagtatcgatcaccaaagacgagtctgacgctatcgtgcattctgcagggcttggccctggcgctgggttcaacattcgtgcacgcgatggttccgacataacaatcactgacgtttccccactcggtacgacgggaatgcgtctaactgtgaacaatccgacgaatacccgagtggtgcaaatcgggtatgggcttaagcgtacaggcaccaatagtcaatctgggccgatagatggcgcccgtgggctgattcggacaaccaacggcatcactaacctttacaccggcgagacagaatatcagtggctggccgctttcctgtgggagataaattaa

SEQ ID NO: 446351 - DNA, 828 bp, Serratia marcescens
atggcaaacgcaatggttgtcttcaaagccgatcgcccggcgaataaccctaatctgccgaagctggggataactgagcaagagatcgctatcttgcaaatgaacccgtcggcatggatcgaggcgaaaaccggggttgtttccagcggcggggaggtttctctcgttcgcgacaaaacaggccgtgccaattgggttcccactgccacattgaaaccgcgaattatcaccgccggcggtggtgccgccctccgatttggtcgtgcggcgcagaactctggcgcgctgatcgcgcagagtggttacgagtccctgccggccgatgggatttatgctcaattcattttgtaccgcatacctctcgcaaacacagagggatatacgggaacaggcggtaacatctgcgggaactacgcggccgtgcccgactggttgcgcgttcggttcgggaatgattcattccaaggtgatgctgtttggatcaatcacggtggtacggcggtaagtgaaccgagcaactacccgatcaatacgacgattgcagggtttcgtgataatcagtggcatattgcagcaatcgaggcgacgagctcgcatcatcgttgggaacatgacggcgctctgttgcagcagaaagatatcccggccaagccgtttgcaacggctgcatcgcgccagctgatcgtcggcggtgcaggcaacccgttgagtaatggttttcagggagacatcgctgcgaaaattatcattcctggcgtactctcggttgacgcaaaaaacactctctatgcgcgattcaacgcattgaaagcagaactgcaatcgtaa

SEQ ID NO: 446352 - DNA, 1026 bp, Serratia marcescens
atgtctaatacggttattcataacttcattgttcatcagattgttcgtgatagtgcaagaaatgcctttcttaagccgagagctaaagaaaacaaagttgatgaattaacgagcactgttgctttaagtctattgggtttgtttaacaggaccggacttcaaactggaactttccatcaagaatctggaaaaccaaaatttgaacaaactttagccaaatacaccagctgtgtggaaggttccttcacttttagtaattttagacagatgacagtagatcttgcgcgtatccttgaaggggaaatgaacaagggaggggggaaaatcgccaaaccaaattatgttgtttttttctttcatacaactaatgcaaccagttatttatcggtaatcactcttctcgagactcaaggtttcactttaaaaaacttatcctttgctactgttgagagacttgatcttgataaactacatttggctgcacgaattagactgaatgattggcaagatgaaatgttacaggatagatatatttcttttcgtattggccgcaattctgaaatgcgagagtacttccaagattttattgggtgtgtagaattcactgctgcgagaattgaaacaagaacactagttgatgcaattaaacaatgctgcgaggatttatatcctgataatccagcgaaaacaaatgaaattcaagatctggcaagtaattattgtaaaagcaacaaggatgtcgatggtaagattagtttgattgcgttaggtaaacatctatttccagaaaatgatgattacttattgcagatttcacagggagaaaaatacaagctaagtgagcgtgtaagtatagataataaaagtttaagtggactgacacgtttttcaggaagaactaaaaaaatgagtatcagctttgatgctgacttgatggaatcaaagaaggtcgtgtatactgatggggtgctaacgtttcatgaaatcccgaaggatcttaaggattctcttgatggcaaaaggtga

SEQ ID NO: 446353 - DNA, 1209 bp, Serratia marcescens
atggtaagttttgaaaatataaaggagatgcttagtttatccgaggtaattggatatgataatggtttgctcactttaaagcttccatttgagcagggggtttttgaacttgcatttaaacgtagcgagcaatatctactagagcctcaatatgaagtggatctaaattcaaagaattataaacgtaattttcattcttgggctgactctccgtcaacgctgcgaaatggggacgttaaatattttattgtcagtatgaaccttgataagctaagggaacgggttgaggttttttatgatgaaaaagatttggtcgcaaacagacctattgctagtgaacggtttgttttaatttcatcaactgcaaatgaaggtaaatgtacaatttgccctgatgatttcaatcgtaatgaaatattacgatactttcaagtttcaaaaatttggaaaatactcacaaattgttcagatggggaaagtggaagagagttgttgtttttatcaaagaataaattgtatttagatctgaactataaatttgaagatttagcttacgaatttgatggtttttcgagttttgaaaaattattttctgaccttttgcatgagcaagagaaaaaacacattctgcaaaatgtgttattctcttttttatggcgagttaaaaaagaagataggctttctaaaatattaactgattttacattgttttcgcgaatctttcaagaaaattacctgtcattcactgttgggtttagttttgaaaagataagaaaggagtaccaagaaaagttcagagattatttatcaaagctaaattctataatgtatgataccctcacaagatctcttgccattcctatatctggaataatcagctttgccgcaatcggtaaagttgacaatgtgaattcttgggttttgaatatggctgctttggtactttccttttatacaacttttaccatacattaccttaccaattatcagaaggtattagtgcaagagtgccagtctgagtatggtgttctttttaatgctatgcgcgatgagttgaagaaattagaacttgcggagcttaataaaaaagaagtcactttaaattctcaatgtagcactttatataaagtgttcagtctagtgtcggctttatcattcagtaacttaatattgaattgtgcgatgtttatatcagccttctttaaatag

SEQ ID NO: 446354 - DNA, 720 bp, Serratia marcescens
atgtcttctgcatgccagtcttggaattctcgcgacattctgcgatccttaaatgtttaccggtttcgttcacccacacaggtgaacggttcaggtaaaagcatatcggcaaatagtttgaatgtaaagagtctttcgaactatttatcggatgattatcaatgtatgtgcacaggagtttttttatatatgacaagcaaataccgcgaagatgatgatattttaagcaaaaatacaaaccattcttttgatgacccaggaatagttcatttcggagagcgcttgaagaaagcaatgaatggagagtccaatacgtcattcgccaaaaagtgcgggttatccgatacggttatcgggaagtaccttcgtggcgagtcataccctggcattgataaacttccgtccatatcgatggcatgtggtagatcaattgaatggttgttaacaggaaaggatgattcgacggcaagtcaatcattaaaacagataaaaaacaatgagttaatagaatggtggcaaataattttgaagtcgctcagcgaagatgaattagaaaaagcggtggaggcatttaaagagggggggaaaaacgcgctattgccttctgctatccgctcaacggctagcaaagagattttgtgcggaggtactgaaattcccgaaagcccatcaacggcgtccatagaaaccgcatcacgtaacactaagcgagctggctga

SEQ ID NO: 446355 - DNA, 270 bp, Serratia marcescens
atgaaacaacacgagctcaaaatcttgccgaaacatttcgcggcggtggtgagcggtgagaagaaagccgagtttcgcgttaacgaccgcaacttcgccgttggcgatttgctacgcctgcggttgtccggcgaatgcccggaattcatgcaccccgcggcatttgctaatgcccatacctgggtacgtatcacccatatcaccgacctagccgaatgggcgccgggttacgtgatgctgagtatcgaacgagggccattcaaatgctga

SEQ ID NO: 446356 - DNA, 213 bp, Serratia marcescens
atgcttgaactaaaaccgggcatgaaatgctacgcgaagcgggtgagtatccacattgacgggcaggagctgatctatatcgcccctcgcggaaaaaagttcgcattaatcctgatgggcgatgaatcccctgataacgcagctggaataaaagcaaatgacttcatgcgcagcaacggctggagtcacgagacggacggaggtaaggcatga

SEQ ID NO: 446357 - DNA, 867 bp, Serratia marcescens
atgacaccacaacagcaagcacagcaatgtttgaatagaaactgtctggttttagatacagaaaccacgggccttgatgataaagcagagatcatcgagatagccgtaattgacgccaccggcaaggtgctgctgaacacgctggtaaagccatcaaaacctgttccggcagaagctaccgcaatccatggaatcactgatgaaatggtaaaagatgccccaacatggccggaggtcaaccctcagctgtgcagcttaatcagtggaaaaacgatagcgatttacaatgctgagtatgacctccgtttgcttgagcaaacagatcgcatctggaaggtaacgccgaaaattagcgtaacgccacagatcgtatgtgccatgcatgagtacgccgagttttacggccagaaaagcgaccgaggcggctacaaatggcaaaagctgaccgccgccgctgaacagcaaggcgtcattatcgaaggaacgccgcatcgtgccctttctgactgtctgaccactctcggagtaatcaaggccatggccgccggtggctctcgttacgcaccgcaggggctgagcgcacaagcggccgtcgacatccttcatcggctgtttgttgctgatcctgatgcgatcactgcattggtggatcatcgtgttgagtgtactgaatattttgctgggttgacggttgcgacagtaggacggcgtgccgacgatgcttatgtcgtaggtatgattggcattatcaacgcgctgatttttcccgaagtaattgcagctatttacgatggtaatgagctgacgggatttgctgttgctgacatttccgcagaaggggtgctgtatgaacaagcccgcccttaa

SEQ ID NO: 446358 - DNA, 198 bp, Serratia marcescens
atgaacgaacaagagcgggcggagaaaatcgagtacatctctggcgccatccgagaaggctatgagccgatgtttcaaatctcaccccccgaactgaatgaccagcaacttaagcatgagcatgggaaggcgtgggaatactacaacatggctgccgacgaaaacggaaagcccccacgacgcgatttaggcgaatag

SEQ ID NO: 446359 - DNA, 714 bp, Serratia marcescens
atggcgaagccggactggggcgagcttcagcaacggtttctgtcagagcacgccaaaaacaatatttcaccgaaagaatggtgtgaggctaacggactgaactatgcgacagcccgtcggtatatcaaaaaaacgagtgcgcaggatgcgcaaagaaatgcgcagaaaaaaatgcgcactgcgcaaaacaaaaaaaccgataggcaccaccggcaaagggaggatggtgagaactgcgcagaacagaaatgcgcaaatgggtcagatacgaaacgcgcacactacaacgcgcgccctggtaaccaaaatgcattgaagcatggaggttatgggcggcggatgctttacagcgatgagatttccgaagatgcccgagcgctggctttggatgatgagctatttcgcttgcgtgccgcgaatctaaccgccgccgaaaacattgggcgcttgataacccgcctcgaggatgcaaaggacgaggagaggaaggtgattaaggaggagattgccgccgctgacaaagcgatgatgcgcaatacggtccggattgagtctctggagcacacgaaggcttccatccgaaagcttaacgccgataccgaatatcgaatcgtgaccacggaaaaagtgggaatggaaatcgacattatgaaagacggagacagcgacaacgcgatcgtcgtgcataactccctaccgatacctggaagatga

SEQ ID NO: 446360 - DNA, 1332 bp, Serratia marcescens
atggccgacatttacctaccaacgctgcatgacggacagttaaaagtctggtctgattcctgggacgaccaactgcacgctgtgcgctgcggtcgccgatggggtaaaacgttcatgctttccagtgcggcagtcacttatgccaccgcgccattcaagcgccccggcatggatattgaactcggcggccgggtggggattttcaccgctgaatatcgtcagtatcaggagatctacgacaagctggaagaaatcctactgccactgaagaaaagttttagccgtcaggaaaagcgactgctgctgaagaacggcggaaaaattgacttctgggttaccaacgacaacaagttggctggtcgtggccgtgaatacgaaatcatcctgatagacgaggcagcctttactaagtcaccagagatgttgaaggagatctggccaaagtcgattaagccaacattgctgacgacaaaggggcgggcttacgtattctcaaccccggacggcgtagacgaagagaactttttttacgccatctgcaataacaaaagtttgggttttgttgagcaccacgctccaacatcctccaacccgttcgttccaccggaggaactggaaaaggagagggagaacaacgaccctcgcgtcttccgccaagagtttttggccgagtttgtcgactggtccgcggcctcgcttttcgatgtgcgtaaatggttcgagggtgaaaatcaggatcagcctgttgattacccggagatgtgcgaggccgtatttgcggttatggacaccgccgtgaaaggtggtgttgaacacgatggcacggcggtgatttattacgccgtagatacgcgccccgggcgccagagactaaccattctcgactgggacgtggtgcagattgatggcgcgctactggaaacatggatgccgtcggtattcgagcggctgagtgaactgtcaggccagtgcgtggccgtaaatggcagcctgggcgtatttatcgaagatgccagcatgggcagcatccttcttcagaaaggtgaaagtctcgggtggccggtaaataaaatcgaatctgcgctaaccagtaaagggaaagatgagcgtgccattatggcatccggttatcactaccgcggcttggcgaaaatatcccgatacgcctacgaaaagaccgcagtattcaaaggcgaaacagccaaccatctgcacaagcaggtttcccgattccaccttgccgacaaaaaagcgcataagcgtgctgatgatttgcttgatgactacacctatgggctgatcattgcgttcggtagcggcgacgcaatctga

SEQ ID NO: 446361 - DNA, 336 bp, Serratia marcescens
atgaaagctattactactctaattattgctggcagcatgtatgtcagcgtagctgaagcggcagagagatgcgagtccatcgcttcatctttaatccgtgcggcaatgattacaccaaccagtgcctacgattttcggccctcggaaaaacagctgatctccatgtgcaatattggaagtgatgcagccgcaaagggcgagaacataaacgatgccattattgccaatcttaattaccgtaatgagatggcaaggaaaatttcagacggaaataaggctgtacttgagctggctgacctagcatttcagttaggctttgatacctacaacaaataa

SEQ ID NO: 446362 - DNA, 1161 bp, Serratia marcescens
atgatcaccggcgtaagcctgccagccggggcgcgagttgccccggatttttcgctgttgctgcaggataacgacatcacgcagaacatccgcaagcggctgatttctctatcgctgacggataaccggggctttgaagccgaccagctcgacatcgagctggacgacagcgacggactgatggcgatgcctcagcgcaatgcggtgctgtcgctggcgctcggctggcaaggctcgccattgacgccaaaaggtcagtttacggtcgatgaggtcgaacaccggggcgcgccggacacgttgactattcgcgcgcgtagtgcggattttcgcggttcgctgaacacccggcgcgatgagtcctaccacgacaccaccctgggcgacattgtgcagaaggtggctgcgcgcaataagctgaaagcctcgctggccgccggtctgggcaccatcaaaatcagccatattgaccagacgcaggagacggacgcggcatttattacccgactcgcaacgctcaacggcgcggtggcggcggtgaaaaatggcgctctgctgttgttgcgaccggggaacggcgccacggtaggcgggaagccgttgccggtgtataccatcacccggcaggatggcgatcagcatagtttcagcattgccgatcgggatgcctacaccggcgtgacggcgagctggctcaatacaaaacagccgaagccgaagaaagtgaagctgcagcgcaagccaaaagagcagcatttgcgcgcgctgcaacacccgaaggcgaaaccgggtagcagtaaaaaaccggggaaaccggcggaggcagcgaaaggcgattatctggtgggggcagacgataacgtgtttgcgatcaccaaaatttacgccaccaaggccgccgcgatgcgggcagcacaggcaaagtgggaaaagcttcagcgcggtgtggctgagttttcactgtcgctcgccatgggccgggccaacatcataccggaaacgccggtacgcgtcagcgggtttaaagcggcgatcgatgcacaagactggatagtgagcaaagtcacgcacaatttgagtaacggaggttttacgacggcgctggagtttgaggttttgctgtcggaggttacttatgacgtgcgtgacttcgctttatga

SEQ ID NO: 446363 - DNA, 1935 bp, Serratia marcescens
ttgccgcgctacaacgagatccagcgcgtcgcggacgtgatgaccaaaggtttcaccagctcgaacagtaacctgctcgattttggcgaagcgatgaagtacgtcgcgccgatcgccgaggctgccggggccagtatcgaggacaccactgccttgctgggcgtgttggccgataacggcatcaaggggtctatggccggtacggcggccagcgcgatgtttacgcggttacaggcgcccgtcgggcaggcggctgatgcgttgtcagaattgggcgtaaaaaccaaggacggcaaagggaacatgctgccgatcgcgaacatcctcaagaaaattaacggttcgtttaaaaccaacaagctcggcaccgcgcagcaggccgaatacctgaaagtcattttcggcgaagaggcgatgaaaggcgctatcaagctgattgatgccgccggtaacggcaagctgagcgaaaaacacagcaccgtcacccagtcaaaaggggctacggcccagattgcccgagtgaaggtggacaacctcgacggcgacctgaaaaacctgttttcggcgtgggaggacgtgcgcattgaggtgttcgacggccagaattcagcgctgcgcaaactcacggtttccgccaccgaatggctcaccaaggcgggggcatgggtgaaggccaatcctgagctggtcggcacgctggtgaaagtcacggcgggcgttacggccctgatcggtggcctcgctgcgctgggccttattgcatggccggtgatggccggggtcaatatgttgatcgccggggccgggctgctgggaacggtctttaccatcgtcggcgccgggattgcggccgcattcagtgtgatcaccctgccggtggtcgcggcggcggcggtgattgccggtgtggcgttgactatccgtaaatattgggagcctatcagcgcctttttaacgggtattggcgaaggcttcagcgccgctttcgcgccgatgcgcgccgcgctagtcccgctggctggcgcatttacgccgctgctgaacatggtgcgcaacgtctggcagtggttcggcaagctgatcgaaccggtgaaatcttcacaggccgaactccagaccgccgcgcgctatgggcgcatgttcggtgaatggatcgcggccggattgagcctgccgctgcagctgttgggcggattgcccggcctgctgaccggcatctgggccgttgcgagcggcattgcagagcgtgccgccgccgtctgggacaccatcggcgagcgtgttaacgcggcatggctggcgctgagcgccgccacggttcaggcatgggatcggctgaccggctggcttaatggcaaatgggaggggctggtaaacggcgctaaagcactgccggggcagttcaaagaagccgggatgaacatgattaacggggtcattgacggcattagcgagcgctggcaggcgctgaaagacaagttttccagcctcacggatatgctgccggactggatgaagtttggcgacgatgaggcggaggttaacccggcgatttcatacaaccgcccggcgcctgagctgatgccggggccgggctatgcgggggcattcgacaagggcggcatcatcccgcgcggccagtttggcatcgtcggcgagcgtggcccggagatcgtcaacggcccggccaatgtcaccgggcgccggaaaacggcggcgctgtcggcggcgatgttatcgctgtcaacgccggtgatggcgtcggccccggctgctgcgcctgctacggcgccagccccgatcacgattcaggtgtacggcgcccccggccaagacgcggcatctattgcacgcgaagtctcgcgccagctcgaggccgaacgacgcaaacacgcggccgccgcgcgtagccgcatgacttacggagattcatga

SEQ ID NO: 446364 - DNA, 225 bp, Serratia marcescens
atgaactctgcaaaatcctctctgaccagaaaactaactaagtatgtggggttaggtgcttcgcacgttttggaagcgatagtaaccggggtttgcgcgattgccgctttcatgtcgcttttcttacttgatggggccgtgatgaaagtcgcgggctttgttggcttcttcgttgtgggctacttaatcaccctggcgattgcatggctgcgtggggagcgataa

SEQ ID NO: 446365 - DNA, 630 bp, Serratia marcescens
atgaaaaactttaccgatatgcaaattttgtggctgagagagaattgcaagggactttcttatcaggagctgaccgacgcgcttaattatcgtttcaagtgtaatcactcaaaacttgccgtgcgtaataaaatagtctctatgcgtttgggtaaaacaataagattggagcgtcaatatactgaggcccagctgacatttttatatagcaatcgcacgctgccttacgctgaattaaccaaggcattcaatagaatgtttggagaaaataagacggaaggcgccatacgcattacgatgcgggttaacggatgggggaaattggctggccctcaacgaagaaaagaccgtaaaattaaagtcggtgatcggcggttgccgcttgataattatgtctgggagtgtgtcaacgggccgatcccgcatggtatgacaatcatccatcttgatggggatattgaaaataacagtatcgccaatcttaagctggccccgaaatacaccaattccgcatttataaacgcaggctatggcgatgcgcccaaggcgctggcgcctgcgctttatgcccaggttatgctgcgcaatcacctgagaagtctggagaagcaggtgaggggcataaaatga

SEQ ID NO: 446366 - DNA, 261 bp, Serratia marcescens
atggcgacgaccatttcaatcacgattccccgtgcatgggtttacccggaagaattcgccaagctagaggggatgtcgatccacacggtttacaagtggaaagaacacggcaagttggaaatccttcctaaatcaattgcgccagggaaaaagcgggccggcgggcgaattcgtatcaagtatgcgaagtataaggctcaacaaacccgcgatattctcgggcactcgaacttctctatcaacattgttggtgtccattag

SEQ ID NO: 446367 - DNA, 564 bp, Serratia marcescens
atgaagtacgacaaaggcggggcagctgcgattgacagagtagtggaggcatacgggtttagattcaaaaatgacttatgccgacatatagggattgcatcaagtacgttgtccacatggattaaagccgactcaatgccgggaagcctaataatccaatgcactctggaaactggcgtttcactagaatggctagtaacaggagaaggaccaaaatttgagcactctagatccgatattacgacgctagaaagttataaattgatagggaatcaactaaaaaaatcaggcaagatgatgtttgataaggtttttctacctaacgaactgaaggagccctatgtcattatctcagacacagagactttctttgttgataaaaactacaaagaccagaacgatggtcgctggctagtggagatagagggcaatcacagcataagagagttggctttcattccagtgaaaagagtcagagtcttgggtggtggggttccctttgattgcggtgttgatgacataaagctaattgcccgtgtagtggcagtgttcagcaaggagtaa

SEQ ID NO: 446368 - DNA, 339 bp, Serratia marcescens
atgaaagccgtaatgttgatgttcgataccttgacccgcaaccatctggcgccttatggcggagcggcgattacgcctaatttcacgcgcctggctcgcgaatcggtgcagttcgataatttttatgtgggcagcatgccctgcatgcctgcgcggcgcgaactgcacaccgggcggtacaacttcctgcaccgtagctgggggccgctggagcctttcgatttctcgatgccgcaggcgctgggccaaaacggcgttcacagccatatggcgaccgatcacaagcactactggcgtgacggggggggccacttaccatacccgctattcaacctttga

SEQ ID NO: 446369 - DNA, 399 bp, Serratia marcescens; identical to SEQ ID NO: 71312

SEQ ID NO: 446370 - DNA, 465 bp, Serratia marcescens; identical to SEQ ID NO: 49359

SEQ ID NO: 446371 - DNA, 141 bp, Serratia marcescens
atgcggccgctgttcgcctttggatgggcgcgggacgaacacaaagcgcaggcgttggcgttcggtgctgccgtattcgcggtgatgatacgtgatctcggttggccgatgcaggccggtaagcagccgctgcgcgcgtag

SEQ ID NO: 446372 - DNA, 210 bp, Serratia marcescens
atgaaaaacgaagaacttaagcacgtaatcgcgctgcttctggaagatgcaaaacgccgtcaggagctggagccaaatgcaggcacagaggcccgaatctggctcggtgattactcccttacctacggacgcattgtgaacggaagtgacggcgtaaataggcttaccgaagaagagaaactacgccttatcgagatcaataaagaatag

SEQ ID NO: 446373 - DNA, 285 bp, Serratia marcescens
atgtcccggtttgttgttcgcatcgagctccgtgattctgaatctgccgattatgatgaactgcatgaaaaacttgcttcacacggcttcaaaagaacccttcttaactctgattacgatcccgtatggcttccgaacgcagagtatttatacgaaacagaaacaaacggtatttattatgttggacatttggccaaagttgtttctgaaaaaatcaggcctaacccaaaggtccttgttaccgaagtaaaagaactattctttattgatctcgataaggcgtag

SEQ ID NO: 446374 - DNA, 135 bp, Serratia marcescens
atgacccagcaacacaggttagcagcagcacagagcaaggccgccatcgcgcaatttatcggtgataaaaatatgtggcgacaggcaatccggcaatatttctttgccataggcggaaagatctccgctaaataa

SEQ ID NO: 446375 - DNA, 294 bp, Serratia marcescens
atgagcaagactattattttcaaattggcgcaggtcagcaataacgtggcaaaagtgttttcaaatggtgaagtcgctggatatatcgcactcccggaaaacgagcaccagaatcaacgccctttcgctatcacccagaatggcaaggatattggctacgagcattgcgaagtttgcgcgattgaagctgttgtccgccgcttcgagcgcatcgagcttggggttgaggtgcgcctcatcacgcctaaagagccagccagctctataagaatcaacgtggtatcgattcattaa

SEQ ID NO: 446376 - DNA, 582 bp, Serratia marcescens
atgcagacggtactgctgcaaccaaccaatattcacatcttgcagcagtggattggcgttcagatccgatttatccgcgcggctagtaccgttaaaaccgacggtgatgcgatccaatgcccgtcgcttgatgatctggttggtgatacgggtctggaagtccttgaacttcgcccacatgtccaattgcgcatagctgataaacgtatcggtgttggtcttctcacagcgatatttgttattttccagcgtgtgaacagaacgcggaacacggcgatccgtggtggagtcattggtcgacgccagcgggccattaatgcccaggccgattttttcgccttcctgctcaggaacgccaacgatattgatcttcttcaaaaattcgtcggactgttgcgttttatcttccagtgtctgcgcgacggaaggggcaagattgaaccctttggtcacggcgccgacggtcacaccgttcagctctacctggcgcgcgatatatttgtcccacaactcacgggtttcgtttcgcattgtcatagacttatcctgctgttggttattgcgctgttagcagtcggctaa

SEQ ID NO: 446377 - DNA, 438 bp, Serratia marcescens
gtgtatcagaacgacggcaatattaacggttccatctggggcggttatctcagcaactggctaaacaatcagattaacggccgtgttgactggggctcttacaatcgagatgtcggggcaagggcaaccatcgactatgtaaacacccgttcagctgttgccggtggtcgcaatgcatggtggtacaaggacgaagtgacggggttcattattcaaggcggagtggttaatcgtacggattatgcaacccgtgtcaatttcccgcgtggttatgcccgtgagtgtttcggcgtgcaattaacgctcaccaacacaaacgggaattggttcggcgacagccgagttaacattcaggcgcgggatctggataacaacgggtttaatgcaatgatggacggtcaggagcaggtagtgctctggcagtcggtaggagtttga

SEQ ID NO: 446378 - DNA, 408 bp, Serratia marcescens
ttgctgctgcgcgctgctggcggttccgtcgatggcggcggccatttcctggcatttttgctcggacgcccggcgcgcttcctgcaggttatattcaactcgctggtcaaggaacgcgacacgctgctctttgtcatcagtccaattctccaacacatcgcaggtaatgtggtgaacatcatcggcaaccagctgattgaacggatcgcatgtttcgatctccttggccagcaggcgggcgatggagccgcgcgaaacatctccgatggcagcaatcaattcagaaacgtcgctttcgcccataacggtagttgtcccgttcaacgctgcgcgaatctcagtgcggagccacgtgcgacgctctgtctcgaactcggcgaccacttcatctttttcacccgcatctga

SEQ ID NO: 446379 - DNA, 615 bp, Serratia marcescens
atgcattttgctaaccagggcgattgtgtttgggggaccggtgttaatggaaaaatacctctagataagttagatttttctcgcttggatgttcgtgcagttcgtgggccaaagacgcgtaaagttttgcaagacaaagggatcgatgtacctgaggtttatggtgaccctgctcttttattacctagcatttttagcaagaaaattttagaagatgcacgtttgcagagagaggttattgttattcctcacatgaatgaaaatatggggaaatacgaaaaatatagagatatgttatgctcgccaaggcagggcgcgctaaacttcactcgtagaattgtaaatagttcattcgtcatctctagttctttacatggtgttatcattgcagaagcctacggaatacctgctattttcctcgatggtgaaagtggtgagtcaatgtttaaatacgatgactactatcaaggtactggaagggattactatccagtggcaaaaagtgttgatgaagcattcaagcttaagcatgcagagcctatagatatgaataaccttgtgccaaagctgttgcaagcatttccatatgatctttgggatgtgactgaatcatga

SEQ ID NO: 446380 - DNA, 462 bp, Serratia marcescens
atggaaatcaaacacgagcagatccgcgaagcgctgcgcgggtgggccatcgaaacaacccagcgcactgtagccgccgagatcacccgcgcttattttgacctgcagttaaaggcgccactgctggcgcagatcgaacgtgccgacggcagcgttgacgatgcagcatggcacaacaacaaacagcagatatttcgctggcttgacggcgatagtgtggccgcgcgccgcaagattcaacagctacaaccggcgatcctcgccgcgctgccagcagagctacgcgcccggctgattgccggaaacagcattgaatatctggcaattcgtgcgctgaaagaacaccaaggggcgatcgccgcggcgctgttgaacgcgttgccgaccgactttgaacgggaatgcgacaaagctgagcgaagcctaaacgagttacggcgcgcctattcaaccctgcattaa

SEQ ID NO: 446381 - DNA, 234 bp, Serratia marcescens
atgctgtgcttgagctcctgcgcccggccgccggtgtcagtgccgcaggcggtgcagttgctgccccctgagtcggtgtttaccgcctgcgcgcaaccgagtcttcagggcgacacctggggcgatgcggtgagttatacgctggcgctcaagacagcattaggcatttgcgccgtacgggtgcagacgttgatcgagtggcggcaacgccagcaagggggaaagggtgcataa

SEQ ID NO: 446382 - DNA, 288 bp, Serratia marcescens
atgagcaaactcacgaaagaagcgcgaggccgagactgccagatcaggatccccggtatttgcaatttcaacccagaaaccacagtgttggcgcactaccgtctggctggtacctgcggcggcggtatgaaacctgacgacgagcagggctcttgggcctgcagtagttgccatgatgcgatcgacttccgtgcgaaatctaaatatgaccgtgaaactttgcgtctgtaccacgctgagggtgtattccgcacgcaagttatcttgagaaaggaagggaaactatga

SEQ ID NO: 446383 - DNA, 858 bp, Serratia marcescens
atgtcggcatttattactccacttcgttaccccggagggaaggggcgcctagggccttggctgtctgaattgctgcgatttaattctataagcggaggctggtatgttgagccgtatgctggcggtgctggagctgctctttttttattaatgcgtgggtatgtgaatcacatagttatcaatgatattgatcctgctattcacgcgttttggtggtccatcctaaataggaatgaagattttttgcacctattggaaaaaacagatgtcacgatggaaaactggtatgaacagaaaaaaataatagaaaataataatgattatgaaccattggctgttggctttgctgcattttttctgaataggacaaatcgatcaggtatattaaaaggtggagttgttggagggaagagacaaaatggagcatataagattgatgcaaggtttaataaagttaagcttgcagagagaataaagaacattggaaagatgcgaactcacataagcctctataatcttgatgctatcgatctgattgatcgagttgagcataagcttccgaaaagctctttggtctatctggatcctccctattacattaaaggtagccagttgtatagaaaccactataaacatgatgatcatgaaaaaatagcggagcgagtaaaaaaactatctacacccgtattggtgacttatgataattgtgaacaaatacgagaaatataccaaggtgagaaagttagggagttctctttccattattcaacgcatttggctcgacctagaatcacggaaatcatgatatataagaatattgagttacataaaacaccgtcaatggttaagaaaaaataa

SEQ ID NO: 446384 - DNA, 1422 bp, Serratia marcescens
atgagtcgtatgcacttcactcagcaaaaagacattccaatagagaatattcttttggacacgggcaatgcaagaataagagccggaagcgaccagaataattgcatatcccgaattttgaggaaagaaaaacagctattagttctaatggaggatatagcagaaaatggcttaaccacaatgccaattttagttatgccgacaaatgatgaaaaatggatcgttaaagatggaaacagaagggttactgcattaaaattgcttaacgaccctaatttatgttcagaacctcatttgataaacaaaataaaagaaataaagaaaaagcactcatcaaatataccatccaaaatagattgcctctctagtgataataaagacgctatatttaaagagatcgttgcacgtcactcaggggccagagaaggtgcgggtcaatatgactggcatgcttatatgagaactgtttttttattaaacaatgaacatccaacagactacaagagagccggacagtacttgattttggctgagcaaggaggtctcgatatagaagatgacttccccataactactgttcatagattcttcactatagccaatcttaagttacttggatatgaagttgaaaatgacaagttaaaacccatcttgtcgcaagataagataataaaaatggcatcaaagataaataccgatttttcacaaaaaattgtagatgtaaactcggtcttcactccagaagcagcttcgatgtacctgagaaaagttagggagtttgcaggaatttttgaatatgaagactcatctaacgaaaagaatgaaaatcaaggagagcctgagggtaaagatacaaattctgatagcgatgatgcaggggattcatcatcaaataacacatcgaataccgaaaaccctgataacattaatactactgatgatgtaaaatcaccatcctcaggtcggggaagaactccgaaaaaaagaccatcggaaagaaataagatattcggaagaggaaaagtcggcataccagttcctgatgatgatgtaaaagtcagaacaattattgcagagctacgacagttagacgtgaagaaaacaactcttgcagtaactttcttattgagggcgttgcttgaacttagtgagaaagaatatagagggttaaataaattaaaagataaatctagtctttcaaagaacatagctacatgcgcagaccacatgttggctaaaggtctgatagacgactctgaacataacgttatcatgtcttacactagaggtgagcagggagcattgcatattgagacattacaaaaactaattcatagggatactcatcacccagattatattacaatcaatactttctgggataatataggttgttttgtccgcgcgtgctggaaagattaa

SEQ ID NO: 446385 - DNA, 372 bp, Serratia marcescens
atgagcaagatctccggcggtagcctagcggttctgttgctggtagctatcagcctgggtggctacagttcattgctatcgcatcgattggatctggcacggaggcagtcggcggagcagcagaagatgctggcgcagcaggcaaagttgatcacctcattgcgcacggatgacgcccgcaatcgcgcattgatggcagaacaacaacggagagagcagcagctgcgccagcagggcgaaaactaccagaggaaatatcgtgaagcaatcaagaatgatgcctgtgctggtcagcctatgcctgccgctgttgttgagctcctgcagcagaacaccgccggcaccgcagcaaatcatcctgctaccccctga

SEQ ID NO: 446386 - DNA, 1548 bp, Serratia marcescens
atgaaagtcgacagactgcatattcgctcacgctttaaaaatcttgaaaacgtgagagtggactttgacgaagaccatctgatgacagtagtggtaggccgtaatggttccggtaaatccaacgttctcgaagccttggttgctatatttcgcaacctagacttgggcgaagctccacctttttcttacgagcttgtttatcgactaggtgaacgtcataagcccaaccaatccagtgcgcgatggctggaaataaccattgatgctgatccagaacgcggtacgttagcaaaacaatatgaagttcgtgtacgtaaccttttaagtgacgctacaccaaaggatatttttaatgagttaacttcaggttctcttatcccattttcaaaagttaaacgggataaaaatggtaatgcaccatacctgccgaactatgtttttgcgtactactcaggccccagtgatcgccttgaaaaccattttaaaaaacaccgtactgatttttatcgtaggctactagaagataagctggatctaaaaggtgatatccgaccattattttatgctaaacctcatcatagccaatttgtattacttgcttttttcttatcagaacaagatagcaaagaaaaagcatttttgcgggaacacttgggcattgaaggattggatagtattcattttgtgatgcgccaaccagggtgggctaaacagaaaggcgaattattttggggagctcgaggagttgttcgtcgctttctggatgaactgataaaacatacactttcaccgataaaagtgactcgccaagaagatacttcgctaaccggaaataatatccgcaatgaattctttcacctttttttaccagatgtaggcgcactgcgcgaatttgcaagagacctcagtgccgacgagctatttaaaatgctcgaaagcactcttctgtcggaaattatttctgaagtcagcattcgagtgaaagtttccaacagcaaagatcctctcactttccgagagctcagtgagggtgaacaacagctattgaccgtattgggtctgctcaagttcactggcggtaaagactccttgtttttgctcgacgaacctgacacacaccttaacccgtcatgggcagttaaataccttaaattcctacgtgaatttgtacctaatcacgaaaccagtcacttgctgatggtaactcatcatcctttagctattgcggagctggagaaagagcaagttcaggttatgaaacgcgacgataaaaaatatatatctgccaagatgcccggtctgcagacaactctagacgatgatactaaccaaaggcttacaaacagaaatgcactcgcagcaaaagaaacattatctaaagataagatagttcgtgaacaaggatttcagcctgaggatgaagagcaatacttagccaggctcaatactgaactcgaacaattgggtttcaatctagcaacggatgatccagattaccttgagttccttcgtaaaaagtaccacgccaaacaggaggaaaactattaa

SEQ ID NO: 446387 - DNA, 522 bp, Serratia marcescens
  misc_feature (16)..(25): n is a, c, g, or t
gtggttagcattcgannnnnnnnnnaaaactatcggtgcgcttgcacattctgcaatagccgtagagtttttgatgaaactgaaggcggtaaagcatgccgtttcccgcttgaaaaccccgatgagagagcctttgcacccacggataatgtcaaactgagaaatgaaagaccatactttcttgatcctttcaacccggatgatgaaaagctgctttggtttgataacgatgggctaccaatagctcagccatcagcaacagctgagcaacaaacaaaggtcaaaaattctattgaaatatttcatcttcatgagagcaagatagctagagcaaggaacaaagtacgcttagaggtagaacggcaagttaggaaaataaaggataatgacgacgtacaagcagctaaagctaagttgcgacgcatggtaaaagatactgaaaagttatcgcgtgctgcggttgtttacttgcgagcatatagagaactcccagaggtaaaagacatattgaacctagattaa

SEQ ID NO: 446388 - DNA, 153 bp, Serratia marcescens
atgtacgtggcgcaaggccgtgactgcgtgaaagcgacgctagcgttaaccctcgcttgtgaagtgctgccacaatatcggcacgatgccagttccctgaacttcctttgctctgttttttctgcgatgctgttgagttacgcacagtattaa

SEQ ID NO: 446389 - DNA, 573 bp, Serratia marcescens
atgcgaatgaaagatacctttcaagttcttttggtatctatttttgtgttttttattaacgcattgatatctggtgaaatttatatgagcagtaagagatcagtatcggctataccgacccatcctgaagcttctgttgaaggggctaaagactggctgacagcagaggaattcactcatattgagggaatgccgggcacgcctcgcggtgcaagaatgcgcctagaaaagttggcatccctgcacccagaaatacgtcgtaaaaggactaccgggaaaggtgtggtttaccatatcagcgcagccacaatgtctcttgacgatgagagaagcagggctaagggcgaagcgtttactctcaccgacagcgatcgccaacttagtctctggatacagttgtatcgcaatatgtcaccagcttcgcgggcgcaattgatggagcaggccctcaggctggtaaaggacgatctgatatctcaggggcctgatgtttctgaactggcggtacaaatcatgaagctgcccgaagatgagcgtaagagcctgtttgaaaagctgaacgggaaggtgtga

SEQ ID NO: 446390 - DNA, 540 bp, Serratia marcescens
atgccaaatggcgatacgattttgcagccactaatgcagcagaaggcagaaagggaaagaagcctcaacagggcgagacaacaaaaaagaaaggggttagttgcagcgaggtttggaaagatcgtacccatccatatgttggaagaaaccaaaactcggctggagatgatcgctgaaaaaacagccataagtcgcaaggaacaaaatgcagctgagaaacgaagtgcagtgatagcggaactggttaaccagtactacatagattatatcttgtctcataagcataaaaactcagaactggtatacaacgtttataaccaaatatggcaatctaactttgacggaaaacccaccgacatgatagccagggagctcaataatgctggtatagatataccgtattttgataaccaaagcggtaaaatagttgttgagtcaggaaagtggaaaagagacgatatagaaacgttttccaactcagctttcgttataaaaatgattgagtcaaatgagcaaaacgtcaaaaaaaacgctaaatag

SEQ ID NO: 446391 - DNA, 1167 bp, Serratia marcescens
  misc_feature (1110)..(1119): n is a, c, g, or t
atgacgcaacaatttaatcgtgaacgggtgacatctttacgtgataaaacagcacttagagtaaatggtgctggtcagtcttcgcatggcagtatagacaaaatagcatgggtaacggacatgcatgactgggaagagaatcagatactcagacagcgtttgtttggactcacttcaggtgggcgctacctgataaaagttcgaccggctggaagggatgagtgcggtggacactatcgccgggtggtggaaatccgactgaaagctaaatcgcgcaagcaccccatattgctggcaatccattttgacccaaccagtagtcaacgtggatttcagcggatggaacttagtccccagcactattctgcaaaacagataactgatttgtttgtgtggctggggcggaagggacgcatcggtaagtacctatatcggggattacgtaatgcctggataacaactatccattacgcgctggacgtggtgggaatgaagcttcacgactatttaatcaggctggttggtgcaaggggcggcgattttaatgatttgcatggtgagcaggaagggttacggctggggtctacgactatcgtcgcgtcaatatatgaaaaggccgatgttccgggtctggcaactgaaagaaggtatgaacaggctgtccttctgcttgatgagcaacaattccgacggtttctgcgactggaattgcgtttatcacccggcaagcaaaagctcatgctgaacaacctgctaaacatggagaatctggtatctaaactcgcattttatgaccgtaacgcgctggtagattctgagcttgaacctgatttttctcgcctgctacgtgaatatgtcccttacccggttgctagagcggattaccagccgtcagccagtctgaatggtaagcaggtcagcccggcaaaaaaagctgctgataagcgcgttgataaactcatggagcgctaccgtgtggaattattcgattcagaggctgtatgggctatgttaccgcttgttgtggcaaaacttgggattctcgcgcaaccgcaatactggcaatttaagcatcgccagaagtggcttcagttgcgactgaaagacggnnnnnnnnnnggtaatggtagttgggcagggatgccgtttgttttcatggtatggtaa

SEQ ID NO: 446392 - DNA, 705 bp, Serratia marcescens
  misc_feature (680)..(689): n is a, c, g, or t
atggccagtaaatctctcggcacgctgacgattgatctaattgctaaggtggccgggttcacatctggcatggacaaggcggagcgtgcatctgataagtggcgaaaaaaggtcgagtcggatattaaaagtgccggttcagcgatctccggaatggcggcgttagcggttactagcgccgctgctatcacggccgttggcgtttccttgttaaaaacgtcctcagcgcaaatcactgaaacggaccgttgggccaagtctttaggcacttcaacgcaagtgttgttagagtggaagtatgcagctcagcaagctggtattgaaggcgataacattgctgatatttttaaagatctgaatgacaagattggcgacgctgttctgaatcagtcaggcgaggcagctggtgcactcgataccctgggattatcggcgaaaaaacttcaagaactgtcacctgagaagcagctggtggcgatagttgacgccatgaagggcatgaataccgcccaaaagacaaacattttggaaagcctgggcaatgacctgtccagaatgttgccgctatttgataacggcaatgaaaaactgaataaatttatccagcaagccagggattttggtgttgcaccgccgcaagaagatattaacaagctgctaaaggtcaatgaggtatttcnnnnnnnnnngtatttcaggagatag

SEQ ID NO: 446393 - DNA, 1548 bp, Serratia marcescens
  misc_feature (1522)..(1531): n is a, c, g, or t
atgcgtattgttattgacctgcaaggagcacaaacggaaagccgttttcggggtattggccgttatactctttcgattgcaaaggcaatcatccgtaataacagtcaacacgaaatttttattgctttgtctgcgctgtttcccgaaaccatcgctgaacttaaagcgcaatttgctcgcttagtgccggccgaaaatatcgttatctggtatgcgcctggccctgtcagagcgatggatagaaacaatgcttggcgcagtgagtgtgcagaatatgttcgtgaagccttcttacataatcttaaacctgatgtcgtttttataacgagtttgttcgaagggcatgtagataatgcggtgacgtcgatcgctaaattaacgccaaaaactaaagtggcggtgttgcatcacgatctaatccctttggtacaagcggatgtttacctgcaagatgacgtttataaagattattatttaaagaaaatcaattggttgaagagtgcggatctgctgctgaccaactcggactatacctcttcggaggtgattgagtggttggatattcccgaaagcaaagtgtgcacgatttcggcggcgaccgaagaacattttgatatcagcgagatttccgctaataatttttctgaattaaaagagaaatatggcattacacgtgatgtcgtactttatgctcctggcggttttgactctcgtaaaaacttcaagaggttgattgaggcttacagcaaattaacgcctgaattgcgtgaaaaaaatcaactggttatcgttagtaagctatcggatagcgatcgcagttatctgcattccatcgcgcgtaatcaacagctgcgtgatgacgagatggttctgactggatatgtatcggaacaggatctggtcgtgttttatcagttggccaagttgtttgtctttgcttcgttgcacgaaggctttggattaccgattctggaggccatgacgtgcggtgcggcgacaatcggttctaacgtcaccagtatcccggaagtgatcggttatgccgatgcgctgtttgatccctattctgttgagtcaataagcgacaagcttcaacaggctttaagcgatgacgttttcctcgctaaattaaagaaacacgctttggagcaatccgccaagttttcgtgggataaggcgggaactatcgccttgtctcgctttgagcggttagttgctgaggccggagatgtggagtttgaatcggtaacgtcatcgcaattgatctccgccgtttcctcgatcaaatgtcgtgaagagccttcggataacgatctgcggtcaaccgctgaggcgatggatagaaatgccaaaagactcgagttgcaaggcattgcgctagagtctctctcttggcgcgttgaaggaccttttgacagctcctatagcctggctttggtaaatcgagaattcgcgcgagcactcagtcgcgacaatgttgacgttctgctgcattcaacggaagggcctggcgactttgctnnnnnnnnnngactttgctccaaatga

SEQ ID NO: 446394 - DNA, 396 bp, Serratia marcescens
atgccccacaatgacaatgccttccttagctggctggcaaatctctattcgaacaattctaactggataaacgggatggtgattacgtctgccttggcatttggtcgagtccttttctacggtggcaagatccgcacagccttggtggatgcattactcacgggcttgattgcagtaaccacggtcccagtcctatccccgttattagttcggtccattgagatgctaccaggcatgagtaacgtgctatccaaaaccgagacgatgaaaatcgaactgtttgtgttctcggtattgggagttatcggtgccagggttatccgtgaagcagcgatatcgatattgcagcggatcagcggcttgaatagtaagggagttagtaatgcagataagtaa

SEQ ID NO: 446395 - DNA, 927 bp, Serratia marcescens
atggcagatttgaagaaaaaagaggtaagccgtagtcgaatggcggagtttcctgccggaacgccgcttcgttcaggggatgagtttccgactgaggatatcatctgtgaggcactagaaaacaaaagctttgaacgtctgaataactgcctggttatcgccagctcagatgaacatgatatgcgttttatcaatgaggagacgctgaatatttatttcagggatgatgtctggaccaatcgctatgtcagaacccatattggtgaaacgttaagaaccgttaatttttcaggcatacgggatcctgaactgcgtcttgaagccaaaatcatctcagccagcctgctctggattgtcggcaggaccgcgaagacgcagtcactgatccggaaatgtgcaaacattgtggcgggagcccgtattattgagtctatggggtatcgcagtctgtttcagcttcgttttccgcttgtccggaatgctttcattgtaaagatgaaggaggaggatgagcacggcaggaagcgttctgaaagaacattacgtaattactttatggacctggcggatatctcgctgacaggtcatacccgtcttcgaaaatacggttactttcctgatattagcttcgacagttacaacagtgtggatgattcaaaccagacatattgtatgcctttcagtcttatgatgtctgtctgggaagggctgattactgaactggatgctgaaatcagtgatttcgattttgacgggttttcccggctgtgcgctatcataaacggtttttatgattcgccttactatacgtcgatgctggaagcccgtaaaagagggacagcaaacttggccccgggatgcagggctggttctcggtacataaaaataagcgctggagatctgattttattggcgttgatcacataa

SEQ ID NO: 446396 - DNA, 3726 bp, Serratia marcescens
  misc_feature (3700)..(3709): n is a, c, g, or t
atgtctcatatatccgaaaatatcttttcggcgctttctttgcatgccaaccagacgtttatggagtataacggagcgcattacagttatcgcatgcttgctgttaaaatggcgggtatcgcagcggctgtcaatgcactgccatatcgacctgaagcactggtaatctgtgttcagaaccctttttttcattgtgccgtgatgttttacagtgcggtttccggtataccctatgttcctgtcgacaagggattacctgagcagcggatttcattgatgctgaatacgctcagcgggaagaaagtcatctgcgttgatgggaaaacaaaaagtataattcaggattctatcggggatattttggatattgctggtttagacagtgcgaacccgatatcgaatattcattctcccgcccctgattccttacaatatatcatctttacttcgggatctaccggtgtgccaaaaggcgcggctgtttataatgaaagttttgacaatacgttgaaatggtatcgccggctcattgacccacagccgggtgagcgttgcttaattgtcagctcattgtcgttcgatttgacgcagaaaaacatttttatcggcatgatgagtggcagtgtgctgcattttattgatggtttggtttttgatccgcagaatattcgtgagcaagtcaatcgccattcatttaagtggataaattgtgcgcccagtgctttctccttgattgtggagaatttatcaaaaaatagccttgcttcaatacagacagttgtcctggggggcgaagcgattaactcgcagacgctgcttcagttgcgccgtgatggcgttaacacgcgtttcattaactcttacggcccgacagagtgcgcggatgttgcattttggcatgaaataagcgacgaggatcttacaaaggggcgaataccgatcggaaaaccgatcccgggagtttacttcgaagtttcttatgaggatgctcaacgcagagctggggaactgattcttaaaggtatctgtgtaggggcggggtatatcaataatgaaggggccacgaagaattcctttcttcgtttaactgcagatgccgggtgtcaacgcgcttatcgcacaggagacattgtgacggaagaggccgatgggacgttggcgtttgtttccagaacagatgatcagatcaagtatcgcggcaaccgtatcgagctcggagagatagagcgcacgtttcgagatatgtcggaaataaaagaggttgtggcaaagttagttaaccaagatctcgttgtttttgtcgttctcagcgatcatcggcgccaagccgatcctcacttcaccgcctttttgaggaaacaggccgcttgtaagctccccgcttattcgataccaacccagtttgtttatttatcggcatttccattgaataacagcggcaagattgatcgcacttcattaacgacgcagcttcccgcagttagccataccgtacaggcgaaaacatttttcgacatgaccgtcgatgcgcttagagggattgcgggtgtcatcagcgcaggcttgatgactgcggacgagggcgaaaccgtaccttccctggactcgcttgagatcgtcgctttctccggcgtgctcagacaggtggcggagccgccgataaaagttcgcgatatcatgacaacgccatctctgaaggcactggccagaacgttaacatttaagcatggcgttcattcaatacgctgctatcccatcggaatggatatcaacaaaagcgagaatggcagccgtgtactcagcggtaaaaatggcaagattgaaattatcgccgagtatgaaacgcctgaagatgttatcgagaacggcagggaggcatcggcgtgtattgaattgccaggtggaagagtgcgtaaacgtattgaggtcgttaaccctacttgcaaaggaatttatttcgaatctgtttctgaaacgcgatctggcgcgtataacattccgctgattatacaatgtgagacttcgttagccatcaatgagatgcttgaaaaatttgtcggtttgctggatgagcacgaaattctcagatcaaacctgtattttaacgatggcgtattatcctatagcttatgtcagacgttaacggcagagaggataatgacaacgccggcccttttcaagacggtaaccgaggaacaggcgattaaggcgatcgataagccatttgatcttgaagatggatatcttttccgcgtgttgtttataaagcggaagaacgggggggaactgctatttatttttcatcacataataatagatggcttatctttagggctcatacgggagcagttgctttcccgtgacgacaaacccgttattctttcgccttgtacgttagaagagtattaccaatacacgaagctcgcattcgaatatgacaaaagcgtgctgaaggaaaaggcaagtcagttggcgttgacctttacggaggaagcgccattttctgcttcttatccagagtttcagcgtattttacgcgttaaagaagaaaatgttcttcggctcagaaaatggtgccgccagcataacttgtccgttacatcgtggtttttatcaatggcgatttttcactatcagagcgaagccggacgtgctgagttcaatgtgcttttcccaaatgcgaaccgtaatgtcccgcaggtcagtcgaatgatcggctgtttggttaatagctcgctgattgctgtcagactgaacggtatctctgcgttttccgcgctttgccgttatgtgagcgaagagcttattgccgacatcctcgatcacccgaatatgccgctttccgctttgttggccaaagaaaacgtcaatattgcgttccttttcacggcggtaaattatcaacgcccgtcgctaacgcgttctcccggtgaggtttacaacccccggccgcgcgcggagtgtggcattgaagtacaagagtacgatgattgtatcgaggttatttttaatggctatggccatccgcagacgctgcgtttcatcgactcgttgatgaattcgttaagtgacattaaaccttcggatttcccagtttcgtttgtttgtcagccgccggtaaatgtggacggcctgatgccggaaagttcaccgaaagcactgtccggcacggtttgtccgcctgaaaatagtaaggatgatgcattcaaccggcgttttgacgccttgtgcaaaagcattctcggcgtggatcaggatagggatatgccgctgttcgagtgcggcttggattctctcagagccattaaccttgtaaggctaattaacagtgagtttgatgtgcgttactctttaaggcaattgtttaaagacagaacctttgccaatgtcgcaggcagtctggcgaccatgaaatatacccataagcgcgacaatcgcatggcgccgtcggttgatcgcatttatccttcgcagtcggtgctgttgcaacgggataacgctattcctggggatagggaaaatatcatctcggttgcgttgatattcaaggagaatgttgatgtatcaggttttacctcgcattttaaaaagttcttgaatattcatccggaactgtttattggcgaagaaaacgcgcgctcgcaggtttgcgaaagtttcaccgttcagcatcatggcaaagtttacgttgatgaagacnnnnnnnnnnggcccttatccatgtga

SEQ ID NO: 446397 - DNA, 657 bp, Serratia marcescens
atgggaattgcttttgacggtgatttcgatcgttgtttcctgtttgatgagaagggcgctttcatcgagggctactatatcgttggcctattggcagaagctttcctgcaagccaaccctggctccaagattattcatgatcctcgtctgtcatggaataccatcgatatcgttacccaagctggtggcattcctgttatgtccaaaacggggcatgcctttatcaaggagcgcatgcgcaaagaagatgctatctatggtggcgagatgagtgcgcaccattacttccgtgatttcgcttattgtgacagcggtatgattccatggctattggtagcgggtttactttcagttaaaggcagtgtgttgagtcagctagtgaaggatcgtatggaagcgtatccagcatctggtgagattaatcgcaaattgcctgatgctaaagctgccattgagcgtgttttaggcgtttacaaagatgatgccgtggcttttgacatgacagatggtatcagccttgaattcaatgaatggcgttttaatctgcggacatcgaatactgaacctgttgtacgtttgaatgttgagtcaaaaggggatgttgaattgatgcagaaaaaaactaaagagattctggcgctcttaggcggagaataa

SEQ ID NO: 446398 - DNA, 534 bp, Serratia marcescens
gtgtctgtgagtgataaaacccaaattgaactcggtcaatttttgtccgaactaaataaagaatcagatcgtggctctgttctaatagcaacatccatttttgatgagtggttatccgagatcatccaggctcacctgttaaatgacaaagtagctaaaggtctactgaatggtgcaacagcgccattatcatcttttgctgctaggacaggcttagcatatgcgttaggactgataatggaacacgaatacaaagaactaaacactctgcgtagcattagaaatgcttttgggcatagttggaatggtgtgagtttcgatacacccaaaatacaaaatcaattggaacagttaccttggcttggacccaaggatgttcctaatactcccaaaacaaaattcatgttctttgttgccatactgcttgccgatttgatgcaccgtaaacaactagtggaaagatataaggtgacctctaaagtatggggtcacactgcgcgcggtaatgtggtcggagaaactacaaattgttaa

SEQ ID NO: 446399 - DNA, 1263 bp, Serratia marcescens
atgaattttttacagcaatttaaatgccttgtatgtgacacggtcattgatacaagaataggtatgtctaatcgagacatacaaccgttccaatttgcatgtccaaattgtgagaataatatatcttttactcttggggagggagaaccagtatttaacggtgcggaaactgtagaaaacaatgactttggaacaacaaatccattcatcgatttgcatttagattttcccgtaggatttggaacgtacgaaataggaaaaacagcattcttaaaagtaacaagtgcaattggtcatgaaaaatacttaatgctgaatgctcatctgaatggaatgaattatatttataaatatcgcgataagcttcagcgactcattactcaatacaaacaaggaaattacaatactttcagtaacctaatgagagaattacctactctgaaaaaaccacgctcgctaaaaatacaagatattctttcagcactgtatacagcaacgtctgcaatgtcatttccatttacaatacatgcacacaatgctgaaattagtgaaaaaatgccacagcttattcattctattcagaaaagcaatccgaaacaactaaacaattttttagatgatattattggaagtggatttctgaaagccttgcatttcgattgtttaagcctatatccaaaaatgcttgaatttgaactcccttcacgcccagcgctttactatgattatgatgaaaacgtagatttatcaatgattcctgctcgagtttctactgccgaatttgatgactgtaacaatttctacaaagatttatctgaagtgttctctcggcaattaataattgtggctggattgaataacttactaaaacgtggagattataatatttttgacgattcagtaagactaaataaaaagggcggtttgattaaagggttttctagtctcaacgaatatgcaaacgttgatttaggcacaaagacaagcggattggatgatagtttttatatagttaatctccatgccttagacaacaaactgcgaaatggcattgcacattataaatatgaatataaagagtcatctcagatgataacctactattacgctaaggaaggaatggaacgaactaaatacaatgaacttagttttatgtcttttatgcggaagctattactattatttcgcgaggtgcacagcattaatcacattattaaaactttatatttttactgtatttttatcgctaaaaagaaaatttga

SEQ ID NO: 446400 - DNA, 615 bp, Serratia marcescens
atgaaaacaacgatctttaagagcctctattttcaggtgctgacggcgatcacgctgggtatcctgcttggccacttctcccctgacctcggcgccgagatgaaacctctgggcgatggcttcgtcaaactgatcaagatgatcatcgccccggtgatcttctgcaccgtggtgaccggcatcgccggcatggaaagcatgaaggcggtggggcgcaccggcgccatcgcgctgctgtattttgaaatcgtcagcaccatcgcgctgattatcggcctggtgatcgtcaacctggtgcaaccgggcgccggcatgaatgtcgatcccggcacgctggacgccaaggcggtggcagtctacgccgagcaggcgcagcagcagggcatcatcccgttcctgctggacatcatccccggcagcgtgatcggcgcattcgccagcggcaacattctgcaggtgctgctgttcgcggtgctgttcggcttcgccctgcatcgcttgggtgaaaaggggcagctgatcttcaacgtgatcggtgattttcggcatcatcaacatgatcatgcgcctggcgccgctgggggccttcggcgccatggcgtttaccatcggtaa

SEQ ID NO: 446401 - DNA, 246 bp, Serratia marcescens
ttggacgagttcaaggctgaccctgagatgcaaggattcctcaaggcggcgcacgccaagggtatcaccaacgatcagatggggttttacatgaaccgcgctccggcgatggtgggcgacaccgctgagcttgatcaagaggcggcggctaccgagctgtgcggcgcgtggaaaacctatgctgagttccagaaaaatctcgggctggcgcaccgcgcgtttatgtctctggctgacccctgctga

SEQ ID NO: 446402 - DNA, 237 bp, Serratia marcescens
atggacgagatcggcaacaacccgatggtgatccgcatgctggctaaaatcggtgcggagatgggtgaggatacgcctgtaggcaatggccaaatcaatctcgaagaacagcagtgcatccgcggtctgatgaagtacgaggcatactccaacccaaaatatggcgttcacgaacgtgtatctgcccaggtgtgcgcgttctatcagaaaatctatggggatcaaacaatcgcttaa

SEQ ID NO: 446403 - DNA, 885 bp, Serratia marcescens
atgaaaagtaaccgtgttgaatcattagattatctccgtggtctaatggcgttgtcagttgtgatttatcattacacatcgtggtctatgtctactggatcatcagttgatgttattggcagtgaattccttttgggaaagttaggaatatatgctgtttctgttttttatatccttagcgggataagtttggcatatatctatgatggaaagataacatcaactcgccacgtagcagcatttgctgttaaacgcgtatttcggatatttccattgttctggattgcagtgactgggatgataatatttagctggctattggcaacggttaatggccaggcttttgactttccatactacaaagcatttttgaattacacactattgtttggttttatagatccaacagcttacctatcaaccggtgcatggtctattggtaatgaactcgttttctattcaattctatgtttaacctatctagtatcttcgtcatataggcatgtatttcccgcggttgtgttattaagtatcgcggcgggcatatacttttctttcgatactcttgactcttcgttgccactttcagaccagtgggcgaactacataaacccattcaaccagctatttcttttcatgtgtggtgctgccgttgggaaatacgcaccagcaataaaaataaataaaatactgctaattgctattggtttactggcaattttagctttcatattttatccagtacatggcgataagataaaccttgtgtccggatacaatagaatattaatttcatcgttatgcttagtttttgttttctcattgtataaattgaatccaaactatgacaacatgctaactaacgcattaggtaagttaggctag

SEQ ID NO: 446404 - DNA, 825 bp, Serratia marcescens
atgaacaacatgaaggaaaagatagaacgcgatggatttgtcgttatccgcgggatgtttactgaagacgagatgtccaggatgaataattcgattgataagtttttcgccaataagggcgttacgtatcgatacggattgactcagccgaatattgctgtcgaggagcaggaattttcttgggttttccatcacccaaaagttatcgatgcttaccgagaggtttttggcagtaatgattttgtgttcacttctcatgctgacattcatcacaatatgggattcggttggcataaagacgatgccaaaggtgcatatttttccgagccatatttcactcgtgattgccgagtttataagatgggaatctatatgaatgaccactctactgatggcaacggaatgtccgtacgagttggctcacatttgaaagataacttaaccgacggcgaagcggtgtcactggctacaaaacctggggatgtagttatttttgacgtcagaattacacacgcaggtaaagagtatgatttatttgagcgtggcttgctgaagttgggccgtacgttgggtgatccaacaggtaagtcactaatagggaggaaggttcgtgatatctattgcggatttaaagcaggaaaaccaaagcgtagtttcttttttacatttggggctcccaatatctttacctatgacttcgcacgcacaaacatgcgtagacagatagaacaatctggcggcagcgaatacgttttatctgaaaacctatcaaatgaacttcataaaaaaggggtgaaaaccctaagttatgaagacggtttgtag

SEQ ID NO: 446405 - DNA, 249 bp, Serratia marcescens
atgcctataaataacttgctaattcagcccgtattgatcacccgcgaaggtatacaacagcagttgggcggtatatccagaaccaccttttggcgcaggaaaaagcagtgggaaaaggctggtacaccgttccctaaaccagcgcctggcaccaatcccatccatggcggcgagcagtatagatattgcgacgtgatacgctttttccgcgctcaaggcctcattgatgaaacgcaggacgccacatga

SEQ ID NO: 446406 - DNA, 1089 bp, Serratia marcescens
ttgcagctggcggcggataaggtcagcttcagcgacggcggctatctgccggcgccggtgctggcgctgcaggtaaacggccgttcgccggacagtttccaactgcagggcaaactgcaggcgcaacagattgggccgatcgcgctgcgcggccgttgggacggcgaacgtctgcgcggcgaagcctggtggccgaaacagtcgctgaaggtgttccaaccgctgctggcgccggatctcaatctcacgctgcgcgacggcgagttttacgcgcagtcggcgttttccgccgcgcgcgaacaggggttcgaggccggtggtcactgggtggtgaaaaacggcggcatgtggctgaaggacggcgagatgagcggcctggattttatcctgtcgtaccggttcaagcagcatcagtggcaattgggggccaaacagccggtgtcgctgcgcatcaagtctttcagcaacctgttcgagatgcagaacatttccgccgatctgcagggcacctatccttatagcgaaaggcagccgctgacgttgagcaacgtcggcgtggacatgctcaacgggcatatcagcctgtcggcgctgcggttgccgcagcatgacgccgcggtgctgaagctggacaaggtcgatctcagcgcgctgttcaccgctctgaaaccgaagcagttcgccatgtccggccgggtcgacggcgagctgccgctgttcctgaatcacccgaaatggttggtgcaaaacggctggatcgccaacgccggcacattgacgctgcgcctggacaaagacatggccgacgccatcggcagcaacaacctggcgaccggcgcggcgatcgactggctgcgctacatggaaatcaaccgttcgcacgcccgggtcgatctcgacaacctgggcgagctgacactgagcgcgcgcatcgacggtatcaacccgcagaaaagcgccaagcgcgaggtgatcctgaactatcgccatcaggaaaacgtgtttcagctgtggcgcagtttgcgcttcggcgacaatttacaggagtggctggagcaggccctctcacaacctggggagcaacaatga

SEQ ID NO: 446407 - DNA, 1734 bp, Serratia marcescens
atgagaagcttgacatttcaacgattagttctgatatcagattcgaaaagacttgcgaatcagttctcgttccagaaaagattgaatttaattaccggaaaagataatagtattggcaagtccactctagcaaaaagtttactgtggtctttaggatgcgatcctgttttcgatgaagaatggaaatcaaatgacattaaatcaattttatattttactataaatgacaaagagtatttttcatgtcgaggaagccactcaataattttgggagctatcggtgatgaagctaaaagatatataaatattactggtgatttttcgaaagatttctcggatctcgtcaatttcaaaatgaagcttcctaatcgtggtgatggaaacttagagacacctcctccagcatattactttttaccattctatattgaccagataaaaagctggagttcaccttggaattcattcgagaacttagggcaatattccaactggaaaggttcattaatcaaatactttactggttatcttaagcctgagcattttgatattgaggaaaatatttatgaatatagtgaaatcaaaaaagaatcagcacataaaatagaaaaatttcaaagcgccattgaagttatagttgataactcagttgattcgcctatagctttagataataatgatttcattaagattcagaatgaaataaaaaatgagctttacgacttgatcgattaccaaacaagactttatgatgctcaggctactatcacctcaaatatttacgatctcgaaagtcagtatgcgttagccattacttctgcaaatgaactcgaggaagattataaatttgcggtagaatccatacctactgataatttagagtgtccattgtgtggcactcttcacgataactcactacctaacagagcgttgcttctttcagaaaaagactcattgcttaatgaggcaaattcaatagcatctaaaatagtggaactcaattcttcattgaactcattaaatgatgacgctcactttattactaacgaaatcgaaagaataaataagaaatacattacagacgatgatgcagttaaaaatgttctcattgctcaagtaatcgatactatatctactgaaaacgtctcaaaaaatattcaaattaaaatcgataatgaagaccttaacatcagcaaggctaacagttccatcaaggaattaaaaaaagaccagaaaaaacttctttctaccaaagaaaaggaagaactgaattcgttttttatgtccaaattgttggcaaatattgaagcactggggtcgacaggaataaaccttagcaaagttaaatcccccactgattacaaacagttgcttggtggtggtgctgctgaggctgctaggggactacttgcttatcaactctctgtgctacaacaaattcatgcagctaaatcttgtgtagtgcctcctttcgtcatcgatacacctaatcagcaagaacaggcgggataccgttatgaaactgttattaaagaattaatgcatagtgttcctctggattatcagttaatactatgtgcaatggaaaatgatgctttaaaagaatttaaacacgatgctaatgttattgagttaaattcaaatagacttctagaagattcacaatacaattctttgaggtctgaatataaaactattcaggcaatggttgcaggtttaagtgagaaggaataa

SEQ ID NO: 446408 - DNA, 1086 bp, Serratia marcescens
atggaacgtaatgttttgggtcatgctcaaagagaaatttcaggagcaaccacattcggaaaatatgattttcaatatcattgggctttatgtagaataattgaaaagcataaatctaattctgactatgcattattaatcgaatatcatgaggatgtcgttatcgcagactcattgtatggagattcggcaaaatttgaatttttccaagtaaagaatactggaaaacctttcacttctgacgccttaactaaacgagagcaaggtgctgagggagctaagagttccattctcggtaagctcttaagctcatgtattggtacagactatgaagaacgaattacggaaataggtcttgtgtcctccagtggtttctcatttgaacaaagagataagaagttaaaattagacgttataacttcaggtgatcttagtgtagattgcttgtcggggttaactggaaaattaaaggatgagcttggaatatctctcttgccagaaaatctaaagtttattgttccaaaaataaaattagagaaccaagaagagtttgtcattggtagatttgctgaattagtaaatgaaatatttccaaatagtcattgcaatgccgttaatatttatagagcgataatcgatgaaattcatcgcaaaggacagaatacttatgattttactgtttgggagaaaatggtagaggataaatctcttacatctcataaggtaaaggatgttatagccgttaacacaacaagcccgaaacttgaagactttgagaaagactttgagtacttagctaaaaatgatatgaaatggaacactttaacttatcgaaagattaataaaaaaataaaacaacttttcttgcgccgaatcggacattcgtcggcttttgatatgaatataatgagaatagtccagctggcgctaagtagtgtctctgaagaagactttacagaaacccgtgattacattgagtcagttattgtaaaagctcaagagtttaatattgaagatcaagtgccagaatatgacgatatattatgcgagataatttatggctttttaaaggtgatgcatgaataa

SEQ ID NO: 446409 - DNA, 387 bp, Serratia marcescens
atgacagacaaatacttaaatttcatggggcttgattttaatgaggtagctgagaaaaagaaaacatttaaaggatttgaacgagggatacggatagacaacgaagatgtggaagaagagatgttttatttttgctgctttatggattatttttatggaaaatataatctggtttcgttttcatcctatcgtcatttttgtgcttctcttcatgactatctatactccatgttatatattaataataaaaatacggtagcgggattaattggtttccaccccggtagattattctggtataccgctgatatttgtaatgatgaaacgttttacttactcaacatatattacagggacgaatgggcaaacaggaaaggagataaataa

SEQ ID NO: 446410 - DNA, 2334 bp, Serratia marcescens
atgaaaatgaacgtaacagaaacggtaaaacaggcgtgcggccactggccgcgcattctccctgcgctgggtgtgaaggtgattaaaaaccgccatcagtcatgcccggtatgcggcggctccgaccgtttccgctttgacgataaagaagggcgcgggacgtggttctgcaatcagtgtggcgcaggtgacgggcttaagctggtagagaaagtgtttggcgtgaccccgtcagaagctgccgggaaggtgaacgccgtgaccggcaatctgtcgccggttgccccggaagtgattgcggccgcagaggctgaaaccgatgctgaccgcaaagcggcggccgggctggccgcgaaactgatggagaaaacccgaccggccaccggcaacgcctacctgacccgaaagggcttccccgctctggaatgtctgacgctcaccgtcatgcataaaaccggcggcgtgacgttccgcgtcggtgatgtggttgtcccgctgtatgacgataccggcacactggttaaccttcagcttatcaattctgacggtctcaaacgcaccctgaaaggcggggcggtaaaaggagcgtgccataccatcgaagggaaaaaacaggccggaatacgcctgtggattgcggagggctatgcgaccgcgctcaccgtgcatcacctgaccggggaaaccgtcatggtggcgctgtcgtccgtgaacctcctttctctggcgagccttgcccgtcagaaacacccggcctgtcagattgtgctcgccgccgaccgtgacctgagcggcgacggccagaacaaagccgcggcggccgcagaagcctgtgagggtgttgttgccctgccgccggtgttcggtgactggaatgatacgtttatgcagcacggcggggaggccgcgtggaaagccatttatgacgccatccggccaccggcgcaaagtccgtttgataccatgagcgaggcggaatttaccgccatgagcgccagcgacaaggctctgcgggtgcatgagcattacggtgaagcgctggcggtggatgcgaacggccagctcctgtcccgctatgaaaacggcatctggaaaaatatcccggccgccactttttcacggaatgtggctgacttattccagcgcctgcgcgccccgttctcatccgggaaaattgcctcggtggtggagaccctgaaactgattattccgcagcaggatacaccggcgcgtcgtctaattggctttcgcaacggggtactcgattcccaaagtggcctgttcagcccacaccacaaatcgcactggctgcgcacgctgtgcgatgtggattttaccccgccggtggaaggggaaacgctggagatgcacgcgccgaacttctggcgctggctcgaccgtgcggccggtaaaaatccacaaaaacgcgacgtgatactggctgcgttgtttatggtgctggcgaaccgctacgactggcagctctttctcgaagtgaccggtcccggcgggagtggcaaaagtattctggctgaaatcgcgaccctgctcgccggagaggataacgccacgtcagccgatatcgacacactggaagacccgcgcaagcgtgcctccctgattggcttctcgctgattcgtctgcctgaccaggaaaaatggagcggtgacggcgcagggcttaaggccatcaccggcggcgatgcggtctcggttgacccgaaatatcagaacccgtactcaacacatattccggcggtgattctggccgtgaacaataatcccatgcgcttcaccgaccgcagcggcggggtgtcacgtcgccgggtgattattcacttcccggagcagattgcgccggaagaacgcgacccgcagctcagggataaaattgcacgcgagctggccgtcattgtgcgccagcttatgcagaaattcagcgacccgatgactgcacgtgcactgctccagtcgcagcagaactccgacgaggcactcagcatcaagcgcgatgctgacccgacgtttgatttttgcggctatctggaaatgcttccgcagaccagcgggatgtttatggggaatgccagcatcatcccgcgtaattaccgtaaatatctctattacgcgtatctggcctatatggaggctaacgggtacaggaacgtgctcagcctgaaaatgttcgggctggggctacccatgatgctgaaagagtacggcctgaattatgaaaaaaggcacacaaagcaggggatacaaaccaatctgtcgctgaaagaggaaagttacggcgactggctgccgaagtgcgacgaccccgcagcgacataa

SEQ ID NO: 446411 - DNA, 321 bp, Serratia marcescens
atgaaaaagccattaccgcccgtattacgcgccgcactgtatcgtcgtgccgtggcctgtgcatggctgaccctgtgcgaacgccagcaccgctatccgcacctcaccctcgacgcgctggaaagcgccattgccgccgagctggagggcttctacctgcgccagcacggcgaggaaaaaggccgccagattgcctgtgcactgctggaagatttaatggaagccggaccactcaaagccgcgccgtcgctgtcctttctcgggctggccgtgatggatgagctttgcgcccgccatatcaccgcaccagtactgtactga

SEQ ID NO: 446412 - DNA, 228 bp, Serratia marcescens
atgagacacaccaccattaccgcccgtgacctcgaatgccttgagcatatgcgcaatgtcggccagctcgtcggcgacctgatgcaggtgcaggactgcgccaccattcgtcgagaccctgcgcagcagttacagctcacctccgtgatttacctcatgaccgcccagctcgacggcgtggtcgaacgctgcaatcagtactggctgaccggggagggtaacgtatga

SEQ ID NO: 446413 - DNA, 552 bp, Serratia marcescens
atgatgatggccgctcagcaaaaagcccctttttctggcttgcttcttttcgccgtttccaggtatagttttcccgctgtcgcaaaatcggcagccgggattggcgtcccgtttacaacattggcgacaccggacgcgccttgcgtctttttttgtgtctatgcctcagcgcatccatttttgatccagggatttatctgtctatggatccttcgtgtaatggtggctcaggtgggggcttctcacgaagcgccggtttccaatgttgccggttacgccaaccccgtctgggctaccaccagtgaaattggcgtttccggtggtagcagtcacatgcaaacattggaggttgccactatggctacgaccctcactccgtcacacccgcagtttgtctttgtgtttgccgccgttcgtcgcgcagaccgtaaaccccgtatttgcatgctgcgcaccgttgccggtgacgagcacgccgcacgcctttccctcgttcgcgattacatcctctcgttcgttggctgtttgccggttctggaggtgcgcgcatga

SEQ ID NO: 446414 - DNA, 267 bp, Serratia marcescens
atgcacactgctttttcttccccgtcttctgcccctgccgcgccgctgattccggtttctgataccgttcacgagcgctttatccgtctgcccgaagtgatgcatctgtgcagcctgtcccgctcgaccatttacgacctcatcagccgggaagccttcccgaaacaaatctccctcggcggaaaaaacgtggtgtgggcgcagtctgaaatcactgcatggatggcggatcgcattgccgaacgtaaccgggtctatgacgcatga

SEQ ID NO: 446415 - DNA, 744 bp, Serratia marcescens
atgaaaaccgaaacagtcattaccgccctgcaaaatgttgccgctcagcagtatgcagagaacaaccagcacctcactaataagctgagcgcatttactgcggccagagacacccacgcggccagcatgcaggtactgaaagagattgatacgtccattgaacgctgtaagcaggagcggcagaccgccctcagtgagagtgcagaagcggagcaggactggcgcagccgctttcgcaccctgcgcggcagtctcacccctgaaatgaaagatgagcacagcaggcgtatcgccagtcgcgagctggccgacgagttcaccggcctgattgcggagctggagaccgaccggacacgcgccatgctgaatgcctgctccaccggcaataaatacctgtcagtgcatgaagatgcctttaccgcttacgccggtgcggaatgggcacgggctgtcaattcagttcccgtcgccctcattcgcgctttcctgctgcgtgttcgtgccctcgaaatgaagggtgaaagcgccccgcagtccgtggccaccggcgagctgcgcgatgcgctgagccgtcagggcagcctgtatcacttcgatatgacgcaggagccggtgttgtccgtgacgggcatgcaccggccgcagattactgacgttgatacggagctgttacacagccctgcgaagagaatgatgctcgccagaaaactggctgagaatggcgagacaaaagcggaggagtaa

SEQ ID NO: 446416 - DNA, 219 bp, Serratia marcescens
atgtttcactgtccgttctgcaaaaccagcgcgcattcccgcaccagccggtatctgtccgataacatcaaacagcgctatcaccagtgcatgaatatcgagtgctcggccacgttccgcacgcttgaatccatcgacggggttattcattcaccggcgacagagccggttatcccggtacccgcaccggaggccaccgttaaccgtgccggtgcgtaa

SEQ ID NO: 446417 - DNA, 564 bp, Serratia marcescens
gtgaccacactgacgctacagaaagcctttgaggcctgtcaggcaaacaaatccgcctggctgcaacgcagggatgaactgacgcaggccgaacaggcataccgcgaacagcttgccggcagaggccacagcggccggagcctgcaaacgctgcgcgagattattgacgtgaaaaaatgggaaattaatcaggctgccggtcgctacatccgttcgcatgaggaggtgcaacgcatcagcatccgcgaccgtttaaatgattttatgcaggtgcacggcgcggagctggccgccgcccttgctcctgagctaatgaattattccgggcaacactccgccgttcagcgctgcgccatgcagcactcactcgactatctgcgtgaggcgctacagctctggctggtcgccggtgaaaaaattaattattcggcgcaggataatgacattttaacggccataggattcagacctgacgcggcttcgcgcgatgataatcgtgaaaaattcacgcctgcacagaacctgaattacacccgccgccgtgcagaactggccgtgcagtag

SEQ ID NO: 446418 - DNA, 2271 bp, Serratia marcescens
atgagcttcatagccattgaaagtaatgcagcaagaaaaattgtctctgaaaggatgcttcagtcagcggattatgataaaggccggatacttgctgatttattgaaagacagaaaaatagttgattttagcctcgaagttaaagctgtgtcttccaactctggcatttatattttaagtaaaaacccaaataaaaagaacatattaatatttgacaccacaacctttgagggctttaaaagaaatagcaatgagattatcacgataattcaaaaatcttgcaggctggctattaagttatgggataaaattggacatagtccatgtgagaaaatcattggtggctcatctttaattgccttattacctctttcatttactactggaaaatcctataaagtcatacttgataaatctccggataaagagcggcaagaaaaaagaaacgaaagtagtttcttaatatttcatgatgggtatgactctaccgatgcggtgccaaaattagctaattttcgcaaagcgaaagaagggatacatgaaattgatacacttgctctctttaaaacagccgacaaagaagatgagaatatatctacctatcttaatataaatgaaattgataataccagttctcaatcaaacccacatatggggttagattattggtcaaaaaacctaactgaaagccaaaaaagattcgttttcagcgagagttacgggccagatattcttaaaggggccgcaggcacaggaaaaactttaagtttaattttgagatgtgtagttcagcttcgtaatgccaaaaaagcagaaaatcaactacgaactatttttataacccacagcatagctaccaagactaacatagaaaaccttatagcctctaatggtggttctgagtttatcgactcagagcatccgcagtctgttgaagtgaccactttacaggaatggtgtattaaaaacttaggtaacaggatagaagcaacagagtatcttgatagcgatgctcttgaatccaaacaattacaacttctatatataaatgaagctcttgaagatttcttgataaatgattacgcaggatctataaacttcatctcccccacacttaaagatttctttggtagcaatgatccatggggaatatctattttgcttcaagaggagatatctacgtacattaaaggacgtgccggcgatgatcttaaaacttacgcaactcttcctcgtagcaaaaatgtcataccattagaaaatgaggatgactataaaaccatattctcaatttataataaataccaagataaacttatcgctttaggtttatttgacagtgatgacataaccctatccgcacttaaagaaacctcgactccaatttggaaacgcagaagaataaacagtggttttgatatagtgtatatcgatgaaactcatctttttaatattaatgagctgagtttattccataatcttctcaaacctaattcaaaccatattgtattcacaatggatcgaagccaagcttctggcgacaccactataactaaagaggatgttgctaaagaacttgacgcaaccctagcacatgagcatggtttaaacgctgttttccgctcctcagaacatattataaacttggctagctgtgtgttagcttctggtgccaccctattccaagagttagaaaatcctctagctgagtcaatgacaggccacacttctcttattgaggaaaaatgcgccattccttatattataagcaaaaacagctcatctgaagtttatagagcgacattttccttggttgattatatatcacaaaattctgatattgcgcgaagtgacattttagtagtcccatgcacagacgacacattgaagaatcttaaaacatatgcagacgagaatggtaaaaatcatatttctatagaaaagcgcggagataaccttgctgtgtctacagcttcagaaaaaaattcatatgtaattggaggtatggactacatcggtgggttagaattttccgcagtggtgatagtaggtgctgactctgacaagttcccaggacaatcaacttacaatggtgaatcactacatttcattaattactcttctttcaataaattgtatgtcgcgattacgagggctaaatatcaagtagctttcgtaactgaaaaaacacaaaaaatcagcccattacttgaaactgcttttagagaaggacttgtcatacagaatgatgagctttcagacatcatctaa

SEQ ID NO: 446419 - DNA, 789 bp, Serratia marcescens
atgctgcgtgacatggttgatgttacggatgataaaagcctaacacaaggcacaattttcaattgtgcctattgtgcttcgcacccaaacaatgaaacattaggcctggttataacagctagatgtgacatagctaataaagacaaggttaagttttataattttataccggcaattccatttggaatctggagagaaaaagagctattacctcttataaaaaaacaagtttttaaaaatttagacaaccaatattcagagttgctggctaaagcaaagttctcaaaaatgaatattaaaacctatggctttgataggatttatgacgttatcgttgaaaaaaaactacttaaccctaaacagataaatcaactaaacactttaaaagaaaaaataaattgcttagagcaaaactctgcctactctcagttagtaagctatttccatgacgagtcaaaaaaaatactctgtgacattattgaaaataaaaatcctgactatttcttcatcgataatgttcttgggtatgactccgtattagtcaatttaagagaaatttatgaacttaatcttcttacagcaaaacaaatccctaatggtatagagcttgatggtaacgaattacatcccggcctaaacttaaatattccaaataagttttgcagtattgtaggtcaattgaaatcaccatttatagaattgttaatgcaacgtttcacaaataactttgttcgagtaggtgtaactaatcaccgctcggaattattaaccaaaatcatggacgcataa

SEQ ID NO: 446420 - DNA, 1197 bp, Serratia marcescens
atggcgcgcatcacacgccctctcactaataacgaaatcctcaaaacaaaaccccgcgaaaaagacttcactcttcatgatggtgatggcctgttcttactcgttaaaaccactggtaaaaagctttggcgcttccgttaccaacgtccagtaagtggttgccgaaccaatttaagtctcggctcataccctgcccttacactcgcagcagctcgtcagatacgcgaccagcatttaaccacgctcgcacaaggcatggatccacaacagcagcaaaaacaagcatcagaacaacgccagattgagttagacagcattttctcaacggtggccgctaactggttccagattaaaagcagaagcgtcacagaagattatgcaaaagacatctggcgctcattagaaaaagatgtgttccctgctataggcgctataacagttcaggagataaaggccagaactattgttgaagcattagaaccaatcaaagctcgtggagcgttagagacagttcgtcgcttggtacaacgtatcaatgaaatcatgatttatgctgttaacattgctctcattgacgctaatcctgcatcaggcgtaggtatggcttttgagaaacccaaaaagcaaaacatgccaacgctgcggcctgaagaactgcctaaactgatgcgttctttgattatgtcaaacttgtccgttccgactcgttgccttatagaatggcaactcctgactctcgtgcgcccatctgaagcatccggtgcacgatgggaagaaatcgatctcgagaacaaattctggacgattccagccgaacgtatgaaggcaagacgagaacacgttgttcctctatcaccgcaggcgttacaaattcttgaagtgatgaggcctataagtgcacatcgagaacatgtattcccaagtagaaatgatccaaagcagccaatgaacagccaaactgctaacgctgccctgaaaaggatcggatatggtggtaaattagtggcacatgggctaaggagtattgccagcactgcattgaacgaggcagaatttaatagcgatgctattgaagtttctttggcacattccgataaaaatgaagtaagaagagcttacaaccgttccatctatctagataccagaacggtaatgatggactggtggggaaattttgtgagtaagaactcattataa

SEQ ID NO: 446421 - DNA, 1689 bp, Serratia marcescens
atgaatataatgcttcaaagctatttcgacaattttatcgaaaacaatcaactcgacgaaaatcctaaagatgaaagctttgagaagttttgtaattactatttaatcaatcaatgttatccccaagactttgatctggatttgtgtagcattggcggaggggatgattctggaatcgatggagtgtgtgtaattgctgatgatatatgtatacatagcaaagaagatctaaaaaatctatatagctccccgcgaaaaatagaagttaaatttctgtttaaccaagtaaaaaactcagataggttcgagttgggtggaatcttaaaatttttgactggagtgagtgcattcttcaaaaataaaaatgagtataccaatgaagatcttagtaactattgtgatattaaggacgatatctataaaaatataattaaattcaaacgaccggaaattattttaaattatgctacgactggtaaatgggaggatccagaggagataaaaaaaggtgccgctgtgctagtttgtaatttagaagaactgaatatcggtgatataaaagtcaattacatagactcaaaaaaactagagttaatacataatgaagtggaaaataaagttgaaaagcaaattgatttcagaactcatctgacactaccaagcattaaggatgtcaggcagtctcatatattatcggtcccaataaaagaatttgttaaattgattacaaatgacaatggtaatatattaaagaatcttttcctcgataacgtaagagattttcagggtaataactctgtaaatgaaggcataagaaaaactttaacatcagaatctcaagaagctttaccaatgttcaataacggtataaccatcattgccaagcatcttgagatcataaatcagagaattgtattgactgactttcagatcgtgaatggatgccagacgagtcatgtcatatgggaaagcagaaatgaattaaatagtaacactgatattatagttaaagttatagaaacaacatcatcagagttatctgagagtataattaaggcaactaacaagcaaacagaagtgaaggatgaagcatttgaatcattgtcagattttcataagggtctagaaaattactttaacgcatatgctaaaaaaagagcaacgccaattttttatgagagaagatccaagcaatatcaaggcgatcacacaaaaaaacctcaccaaatagtaaatctttcgaaactaactcgcgcaagtgtagcatgtatcctgtctcaaccacagagcactcatagatattatggtgagcttttggatagcaatagggataaaatcttcaagaataaggactcaaattacaataagtattacttggctacatccatatcttgtaaggttgatactttcttaagaagaaaggaatttttaaagtataaatcaatgaaatatcaattttccatgatgatatacaaactctttgaggcaaaaaaaattagcgtggggaaaacatatcaagcaattgattcagataaggattttaaacgcatattaaacatggcaattagtttcttaaatgggttatcaagtgaaggtaagtcatactcgtatctttccagaaataaagacttcactgcattaatcgtagattcgatcaatggtttaacacaaaaagatttaaagctatag

SEQ ID NO: 446422 - DNA, 561 bp, Serratia marcescens
atgagctttagaaaacatgaagattatagtaaattaattcagatctggccagccattgagcaatatcaattattagcaaacaagcatggtataaacgatatattccaagataatggcgggaagttacttcaagttttactgacactaagtttagatgtattgccaggtcgtgaaggtaatgatgcaagagactcttcaggtactgagtatgaacttaaatctgtaaacattgaacttacaaaatacttctctacgcatcaccacatgaaccccactattattgcaaagtatagacaggttccatggatctttgccatttatagaaatatcacaatccaatctatttacttattgatgccagaaaacttggaaccatactactctcaatgggaagcaaaatggtgtcgaaccaggaaagatataaataaccctaaaatcccgctagcttatgttatgagtaatggaagacttttatggagcaagactaatacagatgaacttttagcaatccctgaaatttcttcacaaggcgatttaggtggttttgaagctgacaagtaa

SEQ ID NO: 446423 - DNA, 996 bp, Serratia marcescens
atgactgttttggataaaaaacctgcttacagtacaaaattaggctcaatatatatcggggattcattagatttattggcgaaactgcctgataatagtataaatttagttatgactagcccaccttttgctctgcaaagaaagaaggagtatgggaatcacgatcagcatgaatacattgattggtttctgcagtttgcaaaactagtatttaaaaagctgaaggatgatgggagctttgtcgttgattttggtggttcttacatgaaaggagttcctgctaggagcacttataattttcgtgtgttaatcaagatgatagatgaagtgggttttttcttggcagaggatttctattggtttaacccttcaaaattgcctagtcctatcgaatgggtgaataagagaaaactaagggttaaagactctgtaaatacaatatggtggtttagtaaaactgaatggccaaaatccaatgttactaatgttcttgttccttacagtgatcgaatgaaaaagctcattgaagatcctgataagttttattcacccaaaatgcgtccgtcagggcatgatattagcaagagttttggtaaggataatggtggggctattccatcgaatttattgcaaataccaaattcagaatctaatggtggctatttatcaggttgtaaaaaacttggtattaaaggccatccggctcgattcccagcaaaacttcctgagttctttattaaaatgctaactgagccaggcgatttagtagtggatatttttggtggttctaatacaactgggcaaactgctgagttgctagaaagaaagtggatgtctttcgagctgtcccaagagtatgtagcagcttctgcatttcgtttcttggaaaaaggtacagacgttgaagttttgcagaaaatttatgatgatgtgctaagtggagaaagtgtagatttgagtactaaacaagtcgagcttggtactttattgaaatag

SEQ ID NO: 446424 - DNA, 1134 bp, Serratia marcescens
gtgccggagcgcattttcggcgatccggtgcggctgcagcaggtgctctccaacctggtgaacaacgccatcaagttcaccgataccggctgtatcgtgctgcaggtctgcacccgcggcagctacctggagttcagcgtgcgcgataccggcgtcggcatcccggagaaggaaatctcgcgcctgttcgatccgttcttccaggtggggaccggcgtgcagcgccacttccagggaaccggcttggggctggcgatctgcgagaagttggtcaacctgatggacggcgacgtctccgtcgagtccgaaccggggctgggcagcttgttcagcattcgcattccattgtttaacgcccagttcccgatcccgcaggccagcgatacctggcagggccggcggctgtggctggatatccgcaatcagcgcctggaaagttacctgatggcaattctgggcggctacggcgccgatatccagcgctatgacgggcaggataccgccgccggcgaggtgatgctcagcgattacccgctgatgatgaacacgccgctgctggctcagatccaattctccaccgaacatatcggtccatcgcaggaaacccggccgggctattggatgcacagcacctctacgccgcgtgaaacgctgaccttaatcaaccggttgttcggcgtcggccacggcgcggcagaggcgctggtgcaactgccggtgcccgccaaggccagtgcggcggacaacggcgatatttatctgctggtggttgacgatcatccgatcaaccgtcgcctgctttccgatcagctggggtcgctggggtatcaggtggtgaccgccaatgatggcgtcgacgcgctcggcgtgctgaaacagcaccacgtcgatattgtgctgaccgacgtcaatatgccgaacatggacggctatcgtctgacgcagaccctgcggcagatgcagttcagtgcgccggtgattggcgtgacggcgaacgcgttggcggaagagaaacagcgctgcctcgaggcgggcatggataattgcctgtcgaagccggtcacgctggagacgctggagcagacgctggcatattacagccaacgggtacgctacaaccgcagcgaggtctga

SEQ ID NO: 446425 - DNA, 1155 bp, Serratia marcescens
atgacagccaccttgtgcaatgaacagcaaacgcccggcgttcctcaacagatcgccacccgtctggcctttttcgtcgccggtctcggcatggccgcctgggcgccgctggtccccttcgccaaagcgcgcatcggtatcgatgacggctcgctcggcctgttgctgctctgtatcggcgccggctccatgctggcgatgccgctgaccggtttcctgaccggcaaactgggttgccgtgcggtgatcctgatggccgggctcgggttgtgcatcgatctgccgctgttggcgctaatggattccctcggcggcatggccgcggcgctgctgctgttcggtgcggcgatcggcatgatcgacgtagcgatgaacgtgcaggcggtgatcgtcgaacgcgccagcggcaaggcgatgatgtccggttttcacggtttcttcagcatcggcggcattgccggcgccggcggcgtcagcgcgctgctgtggctggggctgacgccgctgcaatccaccctgctcaccgtgctggcggtgatcgcgctgctgacgctggccagccgccatctgctgcgtgagagcggcgccgatgacggcgggccgatgttcgtcttgccgcgcggctgggtgatgttcatcggcattctgtgctttatcatgtttctggcggaaggatcgatgctcgactggagcgcgctgtttctcaccacattgcgcggcgtcgaacacagtcaggccggtctgggctatgcgctgttttccatcaccatgacgctcggccggctcaatggcgatcgggtggtgaactcgctgggccgctaccgggtgctgctgctgggcagcctgtgcgccgctctcggcctgagcctggccatcgccttcaatcacgcggccgtttcgctggtcggtttcatgctggtcgggctgggcgcctcgaacgtcgtaccgatcctgttcagcgccgcaggcaaccagcgcgacatgccggccaatttggcgatcgcctccgtcactaccgtcggctatgccggtattctggccggcccggcgttgatcggcttcatcgctcagttttccagcctgacggcggccttcgcttgcgtagccgttctgctgttggcggtggccgccagcgccagggccgtcactcgctga

SEQ ID NO: 446426 - DNA, 186 bp, Serratia marcescens
atgaaggacggttttttcaccgttgattaccagagtgtggccagcgttatggccaccttggtagcgcacaacatattgagcccgttcagtcagcaggtctacaaccttgcctttaccttcgtcaccccattgggtgcccagtacgacgaggttcttacccatttttcaaaatcaccgattgcttaa

SEQ ID NO: 446427 - DNA, 741 bp, Serratia marcescens
atgagagtcccacaaccaaaatctggcgaactgctcgacatactgacaccatctctgatcaaaggggagaacttgctcagtgaaatcgaggttagaagggttatcgtagaggcaagaaagttgccagatcgctatcaggggctctctattgaaggtttggttaggatcgtgggtgacgatcttgaagaagggtactcactgcttgagaaggcgctggctctggctccttatgatgctgtatcgtgggggaatttttcccgagttgttggaaataaagccttacacagcaagcagttggagattctcaagcgctctttggttgtcagggaaccagcattgctggttgaagcattgataatcggagccttttgggctgatatggagttgctggataaggtggttcccatggtaagagctatggaaatacaactgagcgaaccagccacgcaggcaatagctatgtatgagcgcatgcttgggtatggagacaaggcaaaacaggtaagtgctgtagcgaaagttgttatgtcagtcgccgagcgccatcgtctgccgtcagatatcagtcgagtagatgatgatgatgaaggtttgatggggttctgtttgtttgtaaatacagacgatgcagactacattcaagctttgaacaatgaattgttagacgaaatgatcgatgctgggttggagacaggttgctgcgttggcttctttgaaccaggtggtaaagaatgcctgtaa

SEQ ID NO: 446428 - DNA, 264 bp, Serratia marcescens
atgttgaccgtttccacttcaactccatccaccccgtcgccggttattcctggcggttacaccccgcgcgagcgctttattcgcttgccggaagtgctctacaccaccggcttgtcccgctccaccgtgtacgagatgatgagccgtaagcagttcccggcccaggtctccctcggcggtaaaaacgtcgcctggctggcctccgaggtcgagcagtggatggatgaacgtatcgccaaccgtcaccagggggccgccgtatga

SEQ ID NO: 446429 - DNA, 156 bp, Serratia marcescens
atgagccaggaattactagcagacgatggattgtttgtgtctcacatgcttacggagattggcgaagaaatgactgacgagctggcggcgatggaagccgctgctgactttatgacggagcgtcagactcaacaaatggggatcggctatgagtaa

SEQ ID NO: 446430 - DNA, 252 bp, Serratia marcescens
atggaaattaacattcgcaaaagtccttcttacggctcggctagctggagaagtgttgaagtcaaagaggatggaacgaaaatctccttcgacgtcagtgttggcgacgaactaaagaaatttcacgaggcgcttcttgacgctgctttcggcgacatggaaatggacgaaattgtctcttatctgactgctaatgggtacgcagacgaaatcatagagcgctacgaagaagaaaaatcagaagccgcctaa

SEQ ID NO: 446431 - DNA, 216 bp, Serratia marcescens
atgagcaaagaaacgggtgggcaggcattccctatgctgggaaatgttggatacaactcagattgggtagtagaagaaggcatgacgttgcgcgattacctcgccgcgaaggcaatgacttccgtatcgctgtccttggataaaggcgaacagcagctgattgccaatgcagcttacatgatggcagacgccatgttgaaagctcgcaaccaatga

SEQ ID NO: 446432 - DNA, 1470 bp, Serratia marcescens
atgaattccactgagttacgcaagattcttgatgagcacaagctgtgggtgacgtctttacgcgaaagcggatccagagccaacctgtacggtgccaacctgctcggtgccgacctgcgcgatgccaacctgcgcgatgccaacctgcgcgatgccaacctgtgcggtgccaacctgtgcggtgccaacctgtgcggtgccaacctgtacggtgccaacctgctcggtgccgacctgcgcgatgccaacctgcgcgatgccaacctgcgcgatgccaacctgtgcggtgccaacctgtgcggtgccaacctgtgcggtgccaacctgtacggtgccaacctgctcggtgccgacctgcgcgatgccaacctgcgcgatgccaacctgcgcgatgccaacctgtgcggtgccaacctgtgcggtgccaacctgtgcggtgccaacctgtacggtgccaacctgctcggtgccgacctgcgcgatgccaacctgcgcgatgccaacctgcgcgatgccaacctgtgcggtgccaacctgtgcggtgccaacctgtgcggtgccaacctgtacggtgccaacctgctcggtgccgacctgcgcgatgccaacctgcgcgatgccaacctgcgcgatgccaacctgtgcggtgccaacctgtgcggtgccaacctgtgcggtgccaacctgtacggtgccaacctgctcggtgccgacctgcgcgatgccaacctgcgcgatgccaacctgcgcgatgccaacctgtgcggtgccgacctgtgcggtgccgacctgtgcggtgccgacctgcgcggtgccgacctgcgcggtgccgacctgcgcgatgccaacctgtgcggtgccaacctgtgcggtgccgacctgcgcggtgccgacctgcgcggtgccgacctgcgcgatgccaacctgcgcggtgccaacctgtgcggtgccgacctgcgcggtgccgacctgcgcggtgccgacctgcgcgatgccaacctgtgcggtgccaacctgtgcggtgccgacctgcgcggtgccgacctgcgcggtgccgacctgcgcgatgccaacctgtgcggtgccaacctgtgcggtgccgacctgcgcggtgccgacctgcgcggtgccgacctgcgcgatgccaacctgcgcggtgccaacctgtgcggtgccaacctgtacggtgccgacctgtgcggtgccgacctgcctgatcacacattcgtaattatgggccatgactacccagtaaccataactaacggagaatatgtccgcgctggctgccaaaaccacaccgttgagcaatggcgaaaattcaccaaacgagaaatcgcagaaatggatggaaagaaggcgctgaaattctatccgcgactgttgaagattatcgatttttaccttggtgctggcgagcatcctgattgggttaatgagccagaaactgataccgaagaggctgcgtaa

SEQ ID NO: 446433 - DNA, 216 bp, Serratia marcescens
atgacggaccaagattcagatccgatttatgacgaggcttgcaggatagtggggcagtcttgtttgatgctggcacagaatggcgatgagataagccgtgcacaggtggcgtaccagcttaagcgcatacactggcagattatggagcaaacaggcgagtcgaatctggcgataaacctggctatagagcagctagaggatgggctggagaagtag

SEQ ID NO: 446434 - DNA, 123 bp, Serratia marcescens
atgaccagaaccgaacacatccaagacatgttaattattgccgataaaattaacgccatcgttgcagatatgaaggctcgtaaagagatcatgctgcaagacatgtatgcgaaagctgcatga

SEQ ID NO: 446435 - DNA, 315 bp, Serratia marcescens
atggataagctacgcgaagagagccggaggcagtttgaagagtggtgggaaaaattctacgaaacgtcgccgcgagagccttggggcgttatttattctccagagcatgattattactgtgaccaagacgttgatgggcaatacgacgcatggaaggccagccgagcaagcatcgtagttgagcttccacacctggctgttgataaagacaaaagattaacagtcgagaccagccgagaaggtgcttttaacttggccttaattcggtgcaaatcagccatccgctctatcggcctgtcaatcaaagaggagtag

SEQ ID NO: 446436 - DNA, 276 bp, Serratia marcescens
atgaaagacaaaacgatggacgaacttgttcaagaagcaaaggacagggcaagcactgaaatttacagaccggagtttgtgagcatcccaaggcgacggtggagtaaggaagctgaaatgatagaagcttggagccgcaccgccacgcacaacgaatggaaggaattggttgttgaagccactcgcaagtgggtcaactgcaaaggccgctatcactcagagcaaaatatgaccgcgctgatagaactattcaagcaggagccaatgaaaccatga

SEQ ID NO: 446437 - DNA, 123 bp, Serratia marcescens
atgaacgaaaaacgccaagcatgggaacacgaagacatctaccagggcatgcgtaacgaatcatcacgcaactaccgccgcctggttaagaaggcccagaagaaacgcaaggtgaaaccatga

SEQ ID NO: 446438 - DNA, 168 bp, Serratia marcescens
atgaaagcacacgaagaaatcatgaaggcattggcttggtattttggtgatggcgagttaacgccaagtgaagaatcaatctatgaaattatcgggcaggagcatgatccgatacaaaccatagccaatgctcttgatgactatcgcgagcaagaggtaaagccatga

SEQ ID NO: 446439 - DNA, 2592 bp, Serratia marcescens
gtgaataaacaacagcttgcggcaaaaatctgggaatctgccaaccagatgcgctctaagattgaagccaatgaatacaaagactacatactcggctttatcttctacaagtacctaagcgaccaactggtgcagtttgtcaccagacagggtatgacgcccgaagacatcaaaaccctcaatgaagaagacaccgacaccgttgaatacgtacaaagcaacctgggctactttattgcctacgataatctgttttctacatggattgatccaacatccgaatttaacgaatctaacgtacgtgatgcactttcggcctttagccgtttgatttcgccaacgtacaaaaaactgtttgacggtatctttaccaccttagaaacaggtttaagcaaactgggtgaaagtgcaggtaaacgtaccaaagccatcagcgacttactacacctgatcaagagcatccccatgaatggcaatctagggtatgacgtactgggctacatttacgaatacctgattgaaaaatttgccgccaatgccggtaaaaaagcgggtgaattttatacgcctcatgaagtttctgtattgatatcgaacatcatcgcccatgagttaaaacacaaagataccatcaaaatttacgaccctacttccggctctggttcgttgctgatcaatatcggtgaggcgttcgagaaatacgcgaaaaataaagactgcatcacttattacgcccaagagttaaaagccaatacctacaacctaacccgtatgaacctcatcatgcgcggtattaaagccagcaacattaaaacccgtaatggcgacaccctggaagaggattggccgtattttgatgacagcgatcctcaaggctcatactacgccttacatgtcgatgccgtggtgtccaaccctccttactcacaaaactgggaccccagctttaaagacagcgatccacgctattcacggtttggcctggcacctaaaaccaaagcggattttgcttttttactgcacgacctctatcacctaaagcccgatggcattatggctatagtgctacctcatggtgtcttgttccgtggtggtgaagaaggtgaaattcgcaagcaactcattgaacagaatcatattgatgccattattggtttaccggcaaatatcttttttggcacaggcattcctacggtgattttgatactcaagcaaaaacgccaaaacaccgatgtattggtagtcgatgcctccaaacactttatgaaagaaggcaaaaacaacaaactgcaggccagtgatatcaagcgcattactgatgcggtgattaaccgagagagtatcgaaaagttctcgcaactggtaagcaaagaaaccctgcgcgacaatggttacaatctcaacataccgcgctatgtggattcttcagcggcggcagaaagctgggatttacacgcgaccatgctcggcggtattcccaatagcgaaattgccgagttacacaatttttggcaagtgtttccggaattgcacagtactctgtttacgccaaaatctgccgcttacagtgaactggccattgccaaacaagacgtcaacgccagcatcagcgggcatccgcaagtgttagcgtttatcagtgcctacaacctggcctttaatggatttgatgactacctaaacacccagttaatacaaaactggcaaagcgtaaagcgtaaccagcaagaagcagcattgagtgctgagctatttgcccgtttagcatctattggtttagtcgacaaataccaagcctaccaatttctaaataaccaatggcaactcatcagcgccgatttagaaatgatgcaaaccgaaggttttactgccactaaacaagttgaccccaacattgttataaagaaaaaaaacggccaggacactgaagtgcaagacggctggaaaggccatatcttgccctttgatttagtgcaacagatttacttaaatgatgacttacaagccctggccgctaacgaaagccgtctggcagaaatcgccagcactctggaagaaatgttagaatctctgagcgaagaagaaaaagaacaggatacggtcaaagagagcaaagacggctttgccagtgccgaattaagcaaggccgccaaagtcttcctgaaagaacaaaaagacagcaaagttaaatttgcagaagaaagctatgaagccaaaatcattcgtgcgaacaaattaatcgatgaagaaaaaaacctgaaaaaaacggtcaaaaatgccaccactgccctgcactcaaaaaccaaaacgactatcgaagccttaaccgatgaacaggtgaacaacttgctgcacctgaaatggattgcgccattaagcgccgaactcgccgccatgccagacgtcgtaattagccagcttacccgcgaggtgcaagccctagctgataaatatgcaatcacctattcgcaggtgtcccatgaggtaaaaaccaccgggaaagagctggcgcagatgataggcgagctcacgggtagtgagtttgatctgcagggcctggcagaacttaccagcttactgaagggtgaataa

SEQ ID NO: 446440 - DNA, 1191 bp, Serratia marcescens
atgagtgtggatagcaaagtgccagagattcgctttgaagggttcggtggggagtgggggcaagacaatatatccaatattgctcccttacaaaggggatttgatttaccaaaaaattcaattaaggtcggtgcacatccagttgtaatgtcaaatggagtaaactgttttcataatgaatttagggctaaagctccgggtgttgtcactggtcgttcaggaacgattggaaatattcattatatcgatgttgattattggccacataatacttcgctgtgggtaacaaacttccacaaaaatgtgcctctttttatttactatctttatgttaaattggatctaaaaagatttggcactggaagcggcgtaccaactttaaatagaaacgatgttcatgttcaatcagttgctttgccaaaggactcgaaagaacaagctgctatcggcaactacttccaaaagctagacgcgctgatcaaccaacatcaacaaaaacataataaactcagctacattaaaaaatccatgctggaaaagatgttccccaaacaaggcgaaaccatcccagacattcgcttcaaagggtttagtggggagtgggatgagatcagtttgctcgatagcattgaacggattattgattttcgaggccgcacaccaaaaaaactaggcttagattggagcccttcaggatacagagcactgtcggctttaaatgttaagcaaggctatattgatttttcaattgatccgcatttcggggatcaagagctgtatgataaatggatgaatggttctgagctccatcaggggcaagtgctttttactacagaagcgccaatgggcaatgtagctcaagtccctaacactgataaatacatcttaagtcagagaacaatcgcttttgtagttaaatctgaaattatttcggaagatttcctagcagttttactaagaagttataacgtattccgagagctttctgcactatctagtggtggaactgctaaaggggtaagtcaaaaagttttagctaatctaagcgtttctatacccactgatttggtcgagcaaaccgccatcggcaactacttccaaaagctagatgcacttattaatcagcaccaacaacaaatcaccaagctcaataacatcaagcaggcttgcttgagcaaaatgtttgtatag

SEQ ID NO: 446441 - DNA, 3228 bp, Serratia marcescens
atgatcaccttcaaaaatgaagcgcagtttgagcaggcctttattgacgtactcaccaacaaaggttgggagccggagatactcaaaaacaaaaccgaagcggatttactacaaaattgggcgtctattttgtttgaaaataatcgccagcgggatcgtttaaacgatgttccgcttaccgcgactgaaatgcagcaaattattgagcaaatcaaagaacttaaaacaccgctcaagctcaacggtttaattaatggcaaaaccgtggcaattaagcgcgacaatccggccgatattttgcatatgggtaaagaagtcagcttaaagatatacgatcgtcaggaaattgctgcaggccaaagccgttaccaaattgtgcagcaacctaagtttgaacgcggcagtcccttgcgcaacgaccgccgtggtgatgtattactactgattaacggtatgccggtaatccatgtagaactaaagcgcaatggcattccggttaaccaagccgtaaaccaaattgaaaagtacagtaaagagggtgtatttagcggcctgttttcgctaatccaagtgtttgtggccatggagcccaacgaggccaaatactttgccaaccccgggctagacggcaagtataaccccgactatcaatttaactgggccgattttaataacgaacccatgaaccactggaaagacatcgcgtctaccttgctttctattcctatggcacaccagttaattggtttttataccgtcgccgacgataccgacggcgtacttaaggtaatgcgcagttatcagtattacgccgccaatgcgatatcagacaaagtagccaaaaccaactggcaacagctgggtagcgctaataaccctgatcgtctcgggggttatgtgtggcatactaccggttcgggaaaaaccatgaccagtttcaaatcggcacagttaattgcacaatcgaaagatgccgataaagtgatttttttaatggacaggattgagctgagtacccaatctctgacggaatatcgcaattttgctagcgatggtgaaaccgttcaagctacagagaatactcatgtactcattaccaaattaaaaagtagtgcaacttccgatacgttaattgttagctccattcaaaaaatgagtaatatttttgaagaagctgatgatgaggggacagcaacaaattcagctgatatagaaaaaatccgtgctaagcgcttggtgtttattattgatgaagcacatcgctcaacgatgagtggaggcaaagaaaataaactaggcatgctggtaagcattaaaaaaacattccctaaggcactcttttttggttttaccggcacgccagttcatgatgaaaataaaatcaatagcaatactaccgctgatgtatttggtaacgagttacatcgctatagcatagctgatggtatacgtgatggtaacgttttgggctttgatccttacaaagttcctacctttagagatagtgacctaagggaagaagttgcattagaacaagctaaggctaattcggtttctgatgcgatggcggatcccgctaaaaagaaaaagtttaatcactttttaaatgacgtaccgatggctggctataaagatgccacaggcaaataccataaaggcattgaagactatgtacctaaaagccaatatttaacggctacccaccaggaaaaagtcgtcagtgatattttagataaatgggatgtactcagccaaggcaataaattccacgcgattttagccacaaatagcatcgctgaagcgattgactattaccggcgtttaaaatcggccaaacctgagctaaaaacctcagccttgtttgacccaaatattgataacgacggtagtggtgaccgaggcccaacctttaaaggcgatgggctggatgaaattatgagtgactacaataagcgttatggccacgattttgattttgcccgccacaccgcttttaaaaaagatttagcggcacgccttgctcataaaaaaccttacgaacgcattcataccgagccgtcaaaacaattagatttattgattgtagtggatcaaatgctcactggctttgattctaaatggcttaatactttgtatttagacaaggtaataaaataccaaaatataattcaagcgttctcacgcaccaatcgcttgtttggtcccgacaaaccccacggcatcatccgttattaccgctacccacatacaatggagcagcacattaatgctgcggtaaaactctattccggcgataaacctatcggcttgtttgttgacaagttagaaagcaatcttaaagccataaatgaattagtagctgacattaccgagctgtttgttaccgctggcgtggagaattttgaaaaactgccagacgatatagaagcctgcgcccaatttgccaagttgtttaatacctttagccagcacctggaagcggctaaagtacaaggcttccattgggaacagtcggtctattcctttactgaaaataatgcagaacatgaagtaacgctagctatagacgaacaaacttacctgagtctggtcctgcgctataaagaattaacagccaaaggtgggcacgatggtgcaggtggtggcgatgtgccttttgatatcagtggttatttaactgaaatagataccggcaaaatcgatgccgactatatgaatagccgattcgataaatatttaaaagagctgaacaaacaccaagaccctgcaaacattgaatccacattaaatgaactgcacaagtcgtttgcaacgctcacccaaattgagcaaaaatacgccaaactcttcttgcacgacttgcagcgtggtgatgcgcagttacttgaaggccatactttcagagactatatcaacacctacaaagataacgctgaaaatgcgcaattaaacgcagttgttaatgctcttggcttagataaagagctactcatagcgttaatgactaacagtgttaatgataagaatctcaacgactttggtcgctttgacgcattaaaagaaacagtgaataaagcgaaagccaaagcttattttgaaaaaaaagacggcataaccatacctctattcaagctaaatattcgcattgatcagtttttaaagcagtttattttttcacaaatggatgatttcttaagtagcaaagatgttgttgatgatgtgatgtga

SEQ ID NO: 446442 - DNA, 870 bp, Serratia marcescens
atgtataactcaggaaaggaatatgaagagctagtgcgagatattcaacgttcattgatcgcagcagagaacatttcgagtctaagtaacattaacatcgagaaaaacaagaaaattaaagatcgttcgggcattgagcgagagtttgacatttattgggagttcgaaataggaggcagtatctatcgctccgtcattgagtgcaaagactactcaacccctatatctattgagaaaatagatgcatttattggtaaaacatcagatataccgggccttaaattaatttacgctacgcgaacaggttatcagaatggcgcaaagataaaagccgaacaacacaacattcaattactcataattcgcggacagcaagaatccgattgggttaatgaagatggtgaaccattattaaaaacaattcattttaacatagtagctcatacactgccgaaaattaccgaatttaatgtcaatgttgattctgcatggtttcaatctcagaacgaatacacagaagatgatttctctgagttgtttaagaaaaatttgaacaatgaagttattatcaatgacatccataataattttaaatatacaatttatgacatacctcaactaatccttagtaagaattccagtttagaatatggaacagggacactcacagaagaactcaaagatggttggttagagagcgtcgatcagaaaatacgaataaaaattaacaactataattgcagttatatttacaacaaacccatagaaagcacttcaataatagacttctccaagcaaattaaagctattgttgaagatttccaatccggaaagaaaaaatggattatgaatgatggtagcataagatag

SEQ ID NO: 446443 - DNA, 1731 bp, Serratia marcescens
atgacaaagggcaacgacaatcccgcgctgaaagcagcagaggaagcacaaagaaaaatcaatgatgcccttgatgctaggcaaagctttcgactggaggcgggggccggtgcaggcaaaacttattcgcttgtagccgcactgaaacgcttgattgaagaacaaggaacgactctcgtacggcatggacaaaaggtggcttgtatcacctatactgaagtggctcgaaatgaaattgcgcaggaaatcgaagagcatccagccattctggttaatactattcatggtttctcatgggcatttctgcgtccatttcaaaaagcattgcgagaactcataggcgaaatggaggataaaaaagaaaaaatcgagcaaggtggcggtattggatcacagtcggtggaatatgacatgggcttctttggtgtcgatgagaacagaatttcgctgagtcatgatgacattccaaatatgatggcaaaatttttgcaaagggaaaaatttcgacttattttcagtaaacagttcccggtgatatttattgatgaataccaggatactcatcgtcaatttatggaagcaattactgaatatttcctgaaaccaactacgggtccactggttggtctttttggcgatcattggcaaactatttacagaagcgagtacgaacttgccaagtacccgattaaagagatagggaagggttctaattttcgttctaccccagccatcgtcaatgtattgaataagttacgccctgagctataccaagaagttcatagtcctgaagcaaaaggggaagctcgattcttccacacaaataactataaaggagagcggactaatgaccggcactccaaagaggatctacttcccgatctagctcgaaaaacacgagtatctttgattacgcgactacaggctgaaggttgggacctaagcaaaacaaaagttctcatgctcacccataacgtacttgcggcagagcagggatatccaggcattgtcgagatattcaacggaagaaatgatctctttgccaaaaaagaagaccctgttataaaattttttgctgaaaacgtagaaccaatgtgtgaagcctattgctcatcccgttatggagacatgtttagaatatacgggtctgcaccagccataactaaacaccaggataaagacagttggcgaagagatatggacattttgaaggctttacgtgaagaagggactatcggacaagttattgatcacctaaaagcgacgaggcgtccagctccaccagatcgtgtactgcgtcgagacgaagaattaaattctttggatggtgctccggttccagaaggagcatccgcactcaagagatacagtaatcttagagatgttccctataaagaagttattgagatagttagatttattgaaaagcaaacggcttttgcaacccagcatagtgtcaagggggcggaatttgagaacgttctggttgttttaggaggtggatggaaccattacaactggccactgcttctggaactcatcaaaactaaagctctgactgaaaaaaataccaagggcttttatcgcgcacgtaacctattttacgtatcgctctcccgaccgatggtaaggcttgccgtacttgctacacaaactatgtcagataaagctttagagtcagtagaagagctttttggcagcgaaaacgtcgaaggactagtcatctcataa

SEQ ID NO: 446444 - DNA, 2085 bp, Serratia marcescens
atgcgaatcgaaaaagttcgagtcgagggattccgcctcctccaagatattgaaattatgttggaagacacttccacagtaatcgtgggtcgcaataacagtggaaaaacatcgttcactgagatttttgagaaatttgccagtgataacggagcacgattccgtcttgaagacttctcgcctgttcagcgtgatagatttttcgctgcaaagttactgagggatcaaggtggcaaagcggaggatatacttgcgacacttccgaccttatctctcactcttaccttccgttacgatagtacatctacaaatctggggccgctttccccgtttataattgatcttgatactgaatcgacaactgcaattgtttgtattgaatacaaaacttctgcggcggacttccatattttgttggatgttcaaccagcgcccgagggtgttgaaccaagggcttacttcttccgttcattgcgagaaacattgccaaaggcatatggcacctttgtttcggccatagatcccaccgatcaaaaaaatagacgtagcttcgatggttctacggatttagcaacattgatgcaatgcaatttcgttcgagcacaaaggactctcgatcatgcgaagcatggtgatgcagatgtgataggtaaattactcaatacactgtttaagacagcatccactccgactgcggcctcgaaagatcaggaacttgccgcaaaactgagagaatctgttgaaggtgttgagcgtagtatgcagggcagtttcgatgaaatgttgaaaaatctgcttcccgcaatggaagttctgggatttccgagtctcaacgacaccgagcttcgccctgaaacctcattgaacgttgaggctcttctcacaggtcacactaaggttgtctacacaggtactgatggagtgcatcttccagaaggttataacggattagggacacgtaacctcatctacatgctcttacagctcgaaagttaccataagttataccgagcaagacctgtctgtccggctacgcatcttattttcatcgaagaaccagaagcgcatttgcaccctcagatgcaagaggtatttatagctcagcttaatgctgcgataaaaaaactatcggcaagttatcccaacgagccagtgtggaatgttcaattcattatctcgacacattccccccacgttgcaaatgcagcatccttcgaggccgtgcggtactttctcaatgaagcgccaactccaaaaaaaactcgccagacaaaagttaaagatttcaaaaagggattaggttgcatctcagttgaagaccaaaacttcctgcatcagtacatgacactgaccaaatgtgatttgtattttgcagataaagccattttggtcgaaggaactacagaacggttgctaatgcccaagctatgtgagttagtggatatatcacttgacgataaacataagttagccaggcagtacataactaatgtcgaagtggggggggcctttgcgcatattttttacccattattggatttccttgaactaaaaacgttggtaataacggatatagactcaaccaagtcggtggaaaaacaaaataagcatgggaaaaaaattactacttgggaaaaatgtcctgtcgcagagggacaacgtacatccaatgcagcaataaaacgctggtttcgacctgaagaggtcccagatgacgaacaatggcatatcactcctgctgagctgctttcaaaaacggctactgagaaactaaaaggattccgccgcattgcttatcagatagcagaaaacccggaaacaggaatcagtgcaagaagctatgaagatgcgcttgttttggcaaatcctgaattgtttacatggactaaagagcaggatgaagcgactgaagcatgggaaatagccaagactctcgggaaagcggacacagccttgcacttcgctattcgtgaaaaaaaatgggtagtgccgcgttatattcatgagggcctgacctggctttcggaaacacttcctttacctgaacaagcaaatgaagtacaagccgcacaggaggctgtatga

SEQ ID NO: 446445 - DNA, 843 bp, Serratia marcescens; identical to SEQ ID NO: 109405

SEQ ID NO: 446446 - DNA, 318 bp, Serratia marcescens
atgagtaaagcaataacagaagtccacgaaatcaaagtttacaatgaatctaccagattattccttgtaaagtcattttattgctatgagctttatattagtaatatgcaggaatacatgggcgatagatttgttaaaatggttgaagacagaatatatatggatgatatttttgacaaggtaatagaaaacagtaaggaaggatttaataagtttcttaaggagtgtaaaagctcaggctctctcagagatgttttattcgatgaggtcaaggtaaatctgagacatatgcacaacgttatttttaactcaaactaa

SEQ ID NO: 446447 - DNA, 237 bp, Serratia marcescens
atgattgatgaatttcatgtgttgtatatgtataaaaaaatccaagcagaagctgctactaccgacatcaaaacactggaacagctattgacgaagttccgcaaagttgttgcggagcgtcgggaagaatactatcaggagattggtgagaagaaggctcaaaagctaagggcagaaagattacaacggttgcttaagaaaatggagcgtgatcgtgtatcaccccatgagttataa

SEQ ID NO: 446448 - DNA, 702 bp, Serratia marcescens
atgagcattgattacaatacaataatgacctccagcagtgaagaagtggaagaatatatcaacagaaatcattttacagacaaacagaaactggagatttacagtttttataacagaaacagaaaagataaaataaccgtaaatgtgaaaaaagagagaagttctgatattcaaccgggaatagcctatgttcatgcttttcttgataatctggaaaagctcggaaaaaatatgtccggagcagaatacacaataatgatccgcttatgtaaactcatgcagcatggaaacctcattgccagtatatctcagtcggcactcgcagaagagcttaatatgagcaaatctaacgtgtgtaaatgctggaacaagctaataaataaaggcattctggtcaaagaagggaagcatacaatgataaacgcaaatctctttctgaaaggccagtacagaacattaaatgccataaggaaagaatatgttaagaagtcgctgagaacgaccagtgaaggcatagaaaacgtattcgtcaccgtttataaagatgcggtacttacaaacaacgcagaaaaaaccatcgataaaggagatgataaacctttactttctacgcccgacgaagatattgactgggactctgtttcagaagatgacatttttgttgattatcctgaatatgttgatcaagaagaaagaatgtag

SEQ ID NO: 446449 - DNA, 303 bp, Serratia marcescens
atggcctttgttaaaggctgggataacaacacgcttgggataacagatgaaggtaaacaagccaaaatctgggatgccaaagaaggtgtttgcattggtcgccgcgttgttgatgaagtgaaggaatggaccgagccgggcaacggtaatcagaaagttgttcgcgtgtcttatacatggaagttggcggatgttccttcatgggtggacaaaaaagcgttctccagcgtcaaggggatgaatgaaccggaagaaggcatgattaatcttgttaaaaccagcaatggctggaaagccaactaa

SEQ ID NO: 446450 - DNA, 516 bp, Serratia marcescens
atgatgagtatcacccctgtagaggtaggatcttttttcctctctcttgtagtacccataacaactggcgttgcagcagcgggctttacagcgtattttgcgttgaacaggttttatcgcgaaaaatggtgggaaaagaaacactcatcatacaatcaacttttagataaaatttttgaaattaaagcgatatatcaatatgccgcggatcttggcgaaagagaatataaagcaagcatgagaggtgaaagcgggcctgacggggaggttgattgggcgagataccatgagattaattctcagcttcaccggttctatgtacttgctcctatatcgctgagcacatctactcgagacctattaagcgactttttcaaggaggatgccgcttcagattacagcgttcatgaggagggaaatccaagctttattgcatatggagagatggcaaaggcagcacaaaaacttatagaagccattgttcgggatgctgaaaaagaactgaagtttacgtga

SEQ ID NO: 446451 - DNA, 660 bp, Serratia marcescens
atgggaatggtctcttttgacacagcctgccctcattgtttgagggagaaagccgtgcttgttggtctgaatgaatctcgtagaggtagaaccgaggtatacgatgttcatttttattgcagaagttgtgacaagtccgggatagctgttgttgcatcccaaaacgggtatggccctttagtatccagcgggcaaaatgggggtagaaatatcgtaatccctaatccaacagagccatttgtgctatttgaagtctatccaagattggtatccactgcggctcctggcagtacccctgcgagggcagcagcagcctatgttgaagccaaggaaaacattcaaaggggtagatatgacactgctgttatgctatgccgaaaggttattgatattgctaccagatttctattaggcgatgaatcaaaggatgagaaactagtaaaaagaatatccatgcttcatgccaaagagttaataacagtacagatgaaagactgggctcacatcgttcgcatcgactccaacggcgcggtgcactcagatgaggaatttacccaagaagaagctgaagagatgatcggcttcactgaagtgttcttgatctactcattcactcttcccgagatggtgagggcgaagcaacacaagccagaagagtga

SEQ ID NO: 446452 - DNA, 279 bp, Serratia marcescens
atggaaactgcaagcacacgcaagacggcgatgaagattcactcgtcgcttctgaacaaaatcgcagtaatgggtcagcgcaaatttgctgatgctatgggtgttcatgagtcccaggttagccggtggaaatcaggcttgctggagactatgagcatggcgcttgctgtcctgaactatgggatagctgatgaagaaatggcggagttggctaagcgcctggctggatatctgtcaccaaaagaaaacgccccggaagttgcagctttcgaggcgtga

SEQ ID NO: 446453 - DNA, 588 bp, Serratia marcescens
atgcgtgatgctgaagagtacacaatctctatccggctcgagagcattgaaggtgagcgtctttatgttgctcgagtagacgaactccctgatgttgaggagtatgcagattcttatgcatttgctcatgagctagttcttgacacgataagaacaacacaaaaggttttcgaacggaaaggaatgacaatgccagagccaaaggcatttgtccaaccaagcgccagtggaagagttactttaagacttcccagatctgttcacgctaaatgcaccaaagaggcagaaaaagaaggcgtcagcttgaattcctatttaattagtaggattagtgaattttctgttgcaactagccatagcgaaatccgatctctaatggagcgcatgacggctacgctgactgagatgcgcgctgaaatggcaataaagtctactgagtacacagttattggccatgagcacagcctcgcgagaagcttctctaaaaccgtgagactgccgatacacaaggaagatgaagaatttaatatacgtgaagggttcaagtttagcacttcacccgactgggggaaaatggccagatgttga

SEQ ID NO: 446454 - DNA, 1269 bp, Serratia marcescens
atggctgaactagaaaaaataattgatggggttgttgaagctgatgttgacttcttggataagactcatgaagcactgctgacaaatagaaataattatcctggttctgttgttgatgaattaaataatttgattaaaaatggcttatcaattactgggcgagagtttttaatctattatctttttcacaagaaaggttgtgggattccgcaagatgaatttatcgaaaatctaagcgcagccgaaggaatgatggcgcttcatttgcagtatattaagccaaatatttgtaagcgccctaataggagtgtgactcgacctattgctgagaatattggggagtcaataggcatgctggcactagcaaagtgctttggggtttcgaatgctgattgggatgtgatacctgaaagcaataaatgcatgacattggattttaaactttgtgtttctgaattagggacgattcaattggaaaccaaaggaactgcagcaaaaaaaataaatttgtcaggcccaaaaaaaagtatcctagaaaagaaaaagtccactgagaagccggatggaaactattattacggtagcatagttgccatagataataaaaggcttaagtgttacttactagaccctcctgcgaatgatgaaaagcaagatctgaaacgattgatgcttatttcaagaatgcgttattataatagaatatttagtataatcgctccgacgtctgaacttatatcgatagtggatgagagggttgtgatgcttgagaataatgcgtttgatcttaatgaattacctgtgttgaagcctgagaagagaagtcattttaattaccatagtaataatagaccaacattttttttcaatgcatactatcagagtgagggtgggaagtttggtggtcggggattttacattgatgagagtagccttttttttgttggtgtcaccaatgagttactatgtgagatagtcgaccaagatgtgcggtttatcactagagactatagagcaacgatcgataaaaaaaactccggcaaaatcattaatgatattcaacaggatggtgcgggcgtggcggatattgatgccggctactcactgcatgtaaaaattagcatgcctattaacgcacttcatagggataatgtcggaagcaatggacatattgccgatggaaaatttttttccatagataattatttagatgttgagggtgaattgcattttataaatggcattgtgattggtgtgttaaattattag

SEQ ID NO: 446455 - DNA, 963 bp, Serratia marcescens
atggatggaaaaggtggtataactgcatctggcggtaagtcatactttcaaaatatacggaaaatgaaaacacttgaggaagcccataatacactaatggggcactctgttatcagtccctatatgagagttctttaccatcttttgaaacacatctttacgttttcaactaatcctgatatttataaaaaatatacatccccattacgctcacttattcgtaatgatgttctttatcttgttgcactaaatacagcaattatctacaaagatggttcgttagatgataatggctatcaagagtttcaggagtatcttcaaaagagtgatttctttgaacatacaatattcactgctgatgagtataaaaattttaatgctgttaaaagtgcagtaaaatccagttttgatgaaaactttaatgtcccgattagaatgtatatttttaattatgtgagaacattgaggttccaaaattatgtgattgatttgcacaaggatttaatgctttgtgttatttttaaaaatcccttttctcctcttgtgaaatcctatgttgataatatttcactgattgttgaagaatcatataagcatcatttaggtgagattcataaattagaaggtgaccgtttagatattctagaggacttatgcgcatattatgaaaaggaaaacaaacaaaaagaatttacactgataaatgatttttctactcttcgtgaagttgcgaatggcaataaagataagtatacattattcttcgtgagacgatctgatggagggttcgaaaattgtgccaatgtagcaaactggattgttgagttggatagatatagagaaatattgaggcaacataaaaataataagttagaagtaaaacaagatcttgataagatatccaagttatttttggatgtttttgatgaaagtgtgagtaaatataaaaacagcttattttaa

SEQ ID NO: 446456 - DNA, 351 bp, Serratia marcescens
atggaacagcagatgcatgaatggttcggtgaggtgccgaaattcatcatcacgctcgctgccgactactgctcgcagtgttcagacgccgagttctgcgctctggtcgagcatgagctttaccacatcgcacaggcgacagacgatttcggcgcaccaaaattcaacaaggaaggccagccggtgctgaagctgcgcggacacgacgttgaagagttcgttggcgtagttcgccggtatggcgccagcgtggaagttcaggaactggttgatgcggccaataggcctgcggaggtggcgcaactaaacattgccagggcgtgcggtaactgcatgttgaggctggcgtaa

SEQ ID NO: 446457 - DNA, 1473 bp, Serratia marcescens
atgtacgccaagaaccgctggttgatcctgacaatggtcgccagcgccctgttcctgatcgtcatcgatatgacggtgttatataccgccctgccgcgcttaacccaggcgctggacgccagcgcctcgcaaaaactctggatcgtcaacgcctatccgctggtggtggccggcctgttgcccggcgccggcatgctgagcgatcgcatcggccataaacggctgtttctcgccggactgccggtgtttgccgtcgcgtcactgtgcgccgcgttctcgcccaccgccgagtggctgatcgccgcccgggtgttcctcgccgttggcgcggcgatgatgatgcccgccacgctgtccatcgtgcgccacgtctttaccgacgaacgcgaacgcgcgctggcgatcggcatctgggcctcggtggcctccggcggcgcggccatcggcccggtggtcggcggcctgctgctggagtatttctggtggggttcggtgttcctgatcaatgtgccggtcgtgctgctggtctggccgctggcgtggaaactgatcccgcgctgcggtggcgataacccgcgcccttcggacatcgtcggctcggtgcagattatgattggtctggtcggcgctatctatgcgctgaaggagctgagcaagccgacgcctgatgtgagtgccttgcttgtggcagccctgatcggcgtgttgttcctggccctgttcgtgcgtcgtcagcagcgcagcgcccacccgatgatcgatttctctctgttccgcaaccggctgttcgccggcggcatcggcgtggcgctgttgtcgatggtagcgctgatcggcatcgaactggtgctcagccaacgcctacagctggtgctcggcctcagcccgctgcaggcggcgctgtttattttgccgatcccgctggcctcggcgctggcggggcccgtagccggcctgctgttgccgcgctacggcgaacgcagcatcatcctcggcggttttgtcctgaccactctcggcatcgccggtcttgccgcgtcataccagagcggcatggcattgcaattggtcagcctggcgctggtgggctttggcctcggcggcgtgatcaccgccgcttccaccgccatcatgctgaacgcgccggaggaaaaatccggcatggcggcgtcgatcgaggacgtctcctacgaactgggcggcgtgctgggcgtgacgctgctcggcgggttgatgacggcggtttacagccatagcctggcgctgccggcggagctgccggtcaacccgctggcatacgacagcatcgacgaagccctgcgcctggcggccgggatggcggccgatcgcgcgcagcagctgacgcagctggcgcgtctggcctttgatcgcgcgtttattacggtactgatcgccgccgcgctgttaatggcgctgggcgccggggcggtaaaactggcgctgcgcaagtaa

SEQ ID NO: 446458 - DNA, 195 bp, Serratia marcescens
gtgatcggcggcaccagcatggccggcggcgtcggtacgctggtcggcaccttcttcggcgtgctgattatcggggtgatgaataacggcctcgatctgctcggcgtgcagtcgtattaccaacaaattatcaaaggcgcattgattgtccttgccgtcttgctcgacccctcgcgtaagcaacagcgcgattaa

SEQ ID NO: 446459 - DNA, 1104 bp, Serratia marcescens
atgacactccgtgatgtttttgacgaatatattaaactcatacacagcatggcatatgagaaatccaaatccattggaaaaatcattgatgaaccaagctttataagctcatttgttgaaaaccacaagacactggaagaacttttaaacaaaaatcactctcaaaagtactatataatcgacgcggtttatacccatcaaacgccaaaagtaacacctaccaaaagtaaaatatctgtagaaattgcagatctattaataattaatactcatcattctgcatcccagccgaatacggtaggcaatgcaatgttgtttcaggccaaacgacactcttcacctaagacaggttctcttgcggcagaaaatgagaaaacacaattccacctatataaggaatggcctacattcaccttcaaaacccgtaaattacattttaatggcccaggttgccaatggaatttcaatttaaaaaaagatacagacctagagcattcaaaatacattgtaatatacgatgacacaatatctaccaatcaaccaggtgaattgtgccaacaatttattaatgcgaaatttattgacaactccccttggaatagctcagcatgtgagggttcaaataaccaacccagtcaggggttaacctgcgaggaaagtttctcagcaacactagaaaaaataatatccgggactaatggtagacattttgatacaagtgaaaatgttgcaaacgaccattggtctaattttatacaaagaatgatggaattagcagtcggtggggtttatacgtacaaccttataagacaagacataaaaaaaagaaataggtttagtaaaatatcatcttctttcttatataacaccgctgagttagtcttaaggcatgagatcaatgagattcttaacctcactaattactccatagaaaataagccgtggttctattatactaatatagtgcttgattccatgaatagtagcaatagcatgccacctccagtaatcgatgatgacattgccgttatgatgccaccttctcacccgccaatgttaataatcaactcctttgataaagaagaactcgacagaaatgaataa

SEQ ID NO: 446460 - DNA, 915 bp, Serratia marcescens
atgctttacgtgaaagaaggcggtgttttgataaagcttgataattgggaacaagtttatacgcggccaaattatgttgtggatatcgattcaaaaggtaaagtattgaatgaggtctttggttattacaaaaacgaaccatcgagagcttgtggccttaaaaattgtcatgcgggccataaaaagggcttcattgtaagaactgaagatggtttagaaacatgcataggccatatatgcggtactactatttttgaagaaaaattcgaagtattggctcaaagaatggaaagtgaagtcaatctcgaaatctataaagaaacggttgctggcaaaaagcagaaagtctttgaatattggcaacaagcggccgagttaaccagtggcccgaacggaatactaaaattagcggaaaaaatagagcaaattaaagatccgcttgtcgtcggacgttacgccgcgactgagttatcgcgcatggcttccaaccgagacactaaggttttgagtccgcaatctgtacccaaggataaaaacgaatacaataaccccgccgaagatgcaccaattgaatacaaaacggtgtttgtagttattgggcagatacagcagatagagattttagcttccgataacagcttaagagaactgtatgagaaagagatatcgcaggttttgacggcacttgaaaatgtggacctaaatgcaatatctcggcgccaactcactaatatagggcgtcgagcttctatgctagatgcccgtatcgccagggcgaaagaactgcaggaatcggctattaaattcctgcgtaagaagaacctaaaacctctataccatcaaatgtttccaatggacaatgtgagtcgtaaggacttagggctctataacgattttataaactctctaaaataa

SEQ ID NO: 446461 - DNA, 513 bp, Serratia marcescens
  misc_feature (485)..(494): n is a, c, g, or t
gtgacgtcagtaggtgcatatttgcactggcgtgcatgtaatcaggatatcaaaaagagaataatcaggatgaaagctaaagaagcaaaattactcgattttctacgcacagccccgcagttagttatacctatctatcagcgtctttattcttggagtttgaaagagtgtgagcagttgtgggacgatattattcgctgcggtaaagatgaaagtaataacggtcattttatcggttcagtagtgtatattgagcatggcctttattctgttacgtcacagtctccgttactcataatcgatggacaacagcgtgttactacagcctctttgttaatcgcagccttagctgaggctgtaggacaagacgagtttatcgaggggtttaatcaggaacaactacgcggattttatttgaccaacccgctgttgtctggcgaaaaacgttataaattagtgttgtctcaaacggataatgcaacgtnnnnnnnnnncgttacgcgctattgttga

SEQ ID NO: 446462 - DNA, 333 bp, Serratia marcescens; identical to SEQ ID NO: 437725

SEQ ID NO: 446463 - DNA, 888 bp, Serratia marcescens
atggtatcgagaaagctgtatatcattggaaatggctttgacttgtggcatggagtgaagtctgccttttctaactttcgagattatgtatatcaacggaatgacctagtatatcgcgatgttgaggaatacttaggcgccggcgatgaatggggggacttagaggtagccctgggggagctggacattgaacatcttctttcaaataacgagtgccacctgctttctcctagcgatcctgaatggcgtgattcggctaaccatgacttccaatttgagattgagcgatgtgtgaatcacctttccttagaactgagaacgctattcattgagtggttgaagcagttaaacccaccggcccccatctatttgctaaaaagtttagacacttcgtctcaatacttaacgtttaactacactaagacattgaacacgctctatggtgtaccagactcaagcgttcttcacattcacggagaaatcagcaggccagaatctgttgtgctaggtcattcctggactcctgagcgctcactcaatgataggtttgacatagccgacatagataccaggcttatggaggccaacagcataatcgactcatacttcaccaaaacattcaaaccctcaatggagttgctcaacgccaacgctgcctttttcaaagaccttgtgggtgttaccgacgtgtatatcttaggtcattctatgtcgccagtggataagctttactacgaggccattatctcgacacttaataccgaacactgtcattggcatatagcctgccgcaacaaagatgacgatgcctcagctaaactggagcgactttctgagcttggagtctcgaaggaacgagtttctctttacctatggcatgaaatgtaa

SEQ ID NO: 446464 - DNA, 516 bp, Serratia marcescens
atgtcgcaatcaaagaaacacgaaccaactggtgctgaaatttccgaggctgggctgtacgcaatcgctgatgctatagataataacctaatttcccttgagactggtcgcctatgtgatgatatatatgtgcatgcggacacaccgcaaggtaaagtccgacttagctatgttatgttcagccctaccgttcaaaacgaggtcatagctatgagtgcatttgtggttaccggtcaaagcaatggcaagccacattttcaagtcgattgggctgttttgccaggctacagaggcaagggattcggtaaagccgtggcctcaaaagcgctaaatgaattcatcaatggaatgctcccgcactctgagaatggattgattgttgaagccgtagtagatgcgggaaatgaggcttctatttcagtagcgaggaagctgttaggcggagaggaagtttcaataaacccagatacagaaaagacaacccacagtttcctaaaggttttcttacctagctaa

SEQ ID NO: 446465 - DNA, 537 bp, Serratia marcescens
atgaacacctcattcagcttccgcacgatggcgatcgtcctgctgctgcaggcgctgattgtttccggcaggctggtgttttacttccacagcaacgcagtaaaggccggtgagcaggttaagcagctgcagagcgataacagcctgaaggcgaatataatcgccacacaggcgtttcagttccagcgcgccaacgaaatcagcaacgcagcgacaaagtacggcatcaataccgacgcagccacccaggggaaagaaattgaataccggacgatcctcaagaaacagccgacgtgcgatctggctgtgcctgccgctattgctggtgggctgctcgactacacgtacagtctacgttccagcgcaatgccagccaatcccgccattactgacacagccagtgctcgtacctctgccgccggcgaactgacatattgccaagcagttttgtggattgatccgcttcttgcggcgatcgacaaagctaacaaccaactcctagctatccgccagcttgatgaagatagaaaaaaatga

SEQ ID NO: 446466 - DNA, 198 bp, Serratia marcescens
atgagcgttgtactgacacaagaacaaattaaagaactggcccgattcgctgccgaagacggccagccggcctacacaattacaaccagcacaattccggcgtgggaagcggagaatggtgagcagattcctgaatacaacggtctgatcgcatactcggaatcagaagatcatggggtgttacagctggaagggtaa

SEQ ID NO: 446467 - DNA, 546 bp, Serratia marcescens
atggggaaccagaccacaagtgatgtaagtaacgcggacgtaatggcctgtacgtatcaggcggatatcacataccccggtcagaagaagtttgattgtgggaaagatgcagtgaatacctttgttcgcggttcactcaaaaaaaacgttgccgatgggaattgtgctgcaaagtcgctgatcgataagaacactggtgagttgatcgggatatgcagttttacagcgtttagcctggaaaaaacggcattgagcggggtagttaccggctctcttcctcgtgaagttggcgttgttcgactagtaatgcttggtgtagccactaagtatcaaaagcaaggctacggtttggatctgctgtgtgagttctttgagcagattaaaatcatccacaaggcattgcctataaaaggcgtctatctagacgctgacccagaagcgattggtttttacgctcgttatgggttcgtccagctgaacttgccgccgaacagtctgggtgctgtgcctatgttcttgggcattcagcatatactggcggcttga

SEQ ID NO: 446468 - DNA, 726 bp, Serratia marcescens
atggtcgcaggcacgctggaagtcttcaggaacgttctctttcatgaacaaccacaaatcgtcatcacggtttggacacatccagcaaagcgatgcgggtggcgttgggagtccgtaatcttcgacgcactgaatgcacatctgctttgtcatcatcatgtcgatgagtgggtaacggcggcgccattttccatcagtgactttcatgcggcgcgctgcctcttcgatgctgatccccatccacatgtctacaccgcgtgcagtcaggtatttctcgccgtatctgtcgttgagaaatctttgcacaacctcctgcttccatttaacgctgcagaatgttggcttcttgccggtacaccacccgtccttatcgcgtccgtttcgcgtggagaagtatcccggcaatggctcatcttcatctggcccgacgatgtcgtatgtggcgtaaaggcttttcggaacgatgtgatactcgatactcatttcatcgcaaagcgtcttgatgtgtttggcttgatacgcaaacacattgctcgcttctcgctcggtatcagacataacgatcacatctggctttggcagtgccccagcatgaatcaggcagatcatcgcattgctttgtgttccgccaccgctcgaaagcacattgaagcgatcggggttatgcttaaactggcgacgcggaatgaaggacttcatgaacctacccacgctccacctccctag

SEQ ID NO: 446469 - DNA, 669 bp, Serratia marcescens
atgatgaccccaaatcagaaacgaaaaaacaaacacaacgcatgggcgactgttgccggtatacctcgcaagaagtacctgggcaagtaccagcgcctgacccgcctacaaacattgtggatcacctctctacttaacgcctggggcgatatgtacggcggaaacaccgacgggaatttgaagtgcagcggcggcggtgtatgggggcaaatcgtgcctgagcagtgggatgacgaaagcgcggcgcgaattgtgaaggtgctgggcgacctgcgcaaaattgggtatcgcggggaagagcagttgaagaaggcaaagacaattctttggccgcaccgctcgcttgagtcgatgctggtggctgctgacgctggcgaggaatgcgacttcatggaaaaagcggtgctggcgtcgatgaagcacgataacccggtctacatcatcggcaagctgttctacacgggccgaaacaatacggtctcggtgctggggcgctatatgcaaaatcattacgccccctggctgacacgcgatcaggcggatgaccgtgtgcgctggtgcattgaaatattcaattctgcggtgttcgtcgccgttcgtgcggctatctgcatcgaaaatgaagaaaaatgcaaaaacagcttgaaaatagccaaagaaactgcataa

SEQ ID NO: 446470 - DNA, 237 bp, Serratia marcescens
atggctatcagcattcgtctcgacgaagacttcgtcagtgatgctaaagtttacgctgaagcttctagtagaagcatcccgaagcagattgagcactgggcaagaattggccgtatagccgaagaaaaccctgatttgccattcagtttcatcagcgaggccttgatagctcatagcgaatatcagaaccataaggcaattcactatgaacgcagaacaaaaagaaataggggttga

SEQ ID NO: 446471 - DNA, 330 bp, Serratia marcescens
atgaacgcagaacaaaaagaaataggggttgaagtttatcagagccgtcgatttgcaaagactctcgataaattacctgagcaactgcaagagatcgtagaagatgagattgatacgataattgcaaatcctgaaattggtgaacaaaaaaaaggagatttgtcttttctccgtgttcacaaatttcagctgaataaccgcgtaactctgctgggttacagctggatagaagataaagtggagctttacctattgaatatagggcctcatgaaaacttctaccaaaaccaaaaagatcaccgaaaagttgatttgaagcttatcgggtga

SEQ ID NO: 446472 - DNA, 123 bp, Serratia marcescens
atgttcatccaccgaaagctcgatgagcgaacggtatcgatcgatactgataatatctatctggtcgataagctcaataatgaaatcaagcaggcgcacttcttcatcgcagttaacgcctaa

SEQ ID NO: 446473 - DNA, 573 bp, Serratia marcescens
atgaaacagctacctctgcgagaagtgatgcgcaacctcggcttaaccgtcactgatgacggctatgaattaagcaatcctgctggcactgcgcgctatgaccttcatggcgtgcgtactacggtaagtggtatccctgaatacttcccgatcacgctgtcggtaaaaggtggctatgtgcctgccgtcggtgaccccgataatatcgataccgtcctcggaatcaatcagcccaagacagtcgagaacgtcagtaccataactatcggcatcaatgttgatagcgcatccctgactgcgctggagagccagcttacgcgcattgctgacctgtgtgagcgcatccagaagactcagcaccttggcgagcctgccgagtatgtgggccaatcaacctacacgatcagcgcgggccaggtgttcatccgtgatgcgcagattaaagagggcactatcaaccattccgacctcatgaaagaagtcaccatgcaggcaaagaaaaccgttgaggccgtaatcgaaagggagctgcaggctggtggtaagctctggcgtggttgtcgtgagcgctaa

SEQ ID NO: 446474 - DNA, 327 bp, Serratia marcescens
atgttagaactgagattggtgaaggagcattgccgcctggagcctgatttcaatgcggatgacaccctgatcggcgtctatatcggttcggcgaaaaagcatgttgagatgtacacccgccgcaccctttacgccagcgaatccgaccccggatacgatgccgacgaagatcacctgctgctggaggacgatgtgcgcaccgcaatgttactgcttatcgggcattggtatgcaaatagggaaacggtaaacatagggaatataacttcagagcttccctttgctacgcaagcattacttcaaccctatcggatttacggcttatga

SEQ ID NO: 446475 - DNA, 186 bp, Serratia marcescens; identical to SEQ ID NO: 127504

SEQ ID NO: 446476 - DNA, 750 bp, Serratia marcescens
  misc_feature (719)..(728): n is a, c, g, or t
atgattgtcacgattgccgataatatcgaaaccattctggtcgatttttttgatactgtagtcgagcgtagttgccaccctgaagtcgtgaaacgtaaatgggctgccgctctcgcggattcatatcgtatttgtctatccgtagaggatctatatgctctacgtttaagaatcgaagcgggattgtgcgccagtagtcaaatgcaaggcgatgacgctgaattccgttatgatgatatgtcgcttgccttgtattatgaacttcaacgtgcgcagattgcggctcgattgccagaaagtgacaccttccttgctttttgccgcgatctagagttggctattgagctatctgtgcaaaaaccaatagtagcaacgttggacatgctgagagctgaaaaagcgaaaggtagacgtatttatttggtttctgatttttatttagatcaacaatcaattgtttattttgccaaatgtcatgggtttgatgatatttttgatggattcttcgtttccagcgaaaataagcgaacgaagaaagaagggcgagcttatgatgtggttattgcaagattaggtttgaatgttaaaaagacgattatgttgggcgacaatgcacacagtgatgttgctatgtcgacagccagggggctgtttgcgcatcatttgcctgtggatcaacaccgatatgatgagagcctactggcggatcgtgagcgccnnnnnnnnnnttgcggtggagaacaaagttaa

SEQ ID NO: 446477 - DNA, 1038 bp, Serratia marcescens
  misc_feature (1020)..(1029): n is a, c, g, or t
gtgctcatcaactcctcgttttacagcgaagtaaaggacaacagcggcaaccttaatacattacctaactacgttaccgtgcttaaacactacgctgatgacgatattaccgtccacaagctggccgatttcaacgttaatttcgcccacggcgaaaactatcgcctgttaatggccgaacatgatatgagcttattcaaagtcgtcgtgcaggccgtagggcgaatcgagcgtcgcgacactctattgaaaacagaaatctttttaccccgcgatgtgttccgtaatgttgcattccagttcgccgctctcagtgaagatagcggtaacgaggtagtatcagaaagcatgtccttgcttaaccaccgcctaatggaggagtgcgaaaagctgagtcagaaccagtcatttagtgatgcagaacagcggtatgcgtttgaacaggctatcgtagaaaatggtcgccgcatcgatgctgttcataagcgagtcctgaaaaccgactggataaatcaggtacgcgccggcaaccttgaatatctcgaattgtgtaatttattccgcgattctgactcctttaccgatcccatgcgttggctggaaaaacttcaggctaattccttgtatgccgccaatcggcaaatgcaatcaatccaccacgccctgtttatcgaccgctatcagggcaaccaaactattttactttgccacaaacgcggcccggatggacttgtccacagagattattccgccctgtcggatttcgctggcggcgcaagagagtaccggcctgagctcaccctctttccgcagtatagaaacgatgtcgattttacccccggcaacctggtcggcgagttgattcgtgaatgtgacaacatccaggaaacggcattcaaaaaatgggtacccaaccccaggctagttccgttgctcaaaggcaatgtcggtgaatatctcttcgataaagtgctaaaaagctatggcgttaccccactttctgatcaacaggtgtttgannnnnnnnnncttcaataa

SEQ ID NO: 446478 - DNA, 762 bp, Serratia marcescens
  misc_feature (611)..(616): n is a, c, g, or t
atgatccctaatttgaatgaactgacggatactccgattgcccgaaccaatttgatcaagcttgaagaagatcagctgacgaccatccagcgtctattggcccctgtatctaatatctatacgatagactttatggttcagcgctttactaaagagcgaaaagaaaaatccgctgattactatgcgcgaattcatcaggaggtaaaatcttgcgtgcggcagaagcttggtctggaggccgggcaggaggtaaaatatgaactgcattgcttaccaaattaccatcacgtcttttttttcctggcgcctgcaactaacccgaacagtcaggctcataggacgttggcagaacgtattgaaacgctttgtcagcaactcaccgctgaaaatcatgacctatctcgcctgattcagggattatttagcctgcatttgaaaatggtaatgctggaaaaagccagtgagcgcttttcggtatcgccgacttacttcaactcaacgctttaccttaacgctcgcctgagtcagcccgtcacacaaaaaaaaggcaccggggtgatggaagcctttgagctcgacatttatgcctcagaatataatgaactcgcttnnnnnnatccctggacgataccagcgtgtggtttagcatcgataatcgtcggcttaaagctcggcgcaaacttgatgcccgtgatagcaaactggatttttttcgtgagcgcagcggttatggcgaatgccaggcctatacctataacgtag

SEQ ID NO: 446479 - DNA, 1242 bp, Serratia marcescens
atggataaacagaaagagtttattaatttcctgaaaaccacgaggaaacaccggatagaaaattactgggatgtttcattcgatcctaaaataagtctgagccttttctcaaactctgttttaactgattattgcgattccgatggtataaaaagagaagatagagtatcattttcaaataagaatgtgtcgatagaaaataacgaactgcgattagagggtataactccagataaaagcatctttgttgaaaaaactgattttaattgttgcgatttttatggcaataatggtggaaaaaaaataacaattaaggattgtaaattttacaaatgctacttctcatttagtgttttcaatgacgtgaatttcataaactgtcgctttgagtcatgttcatttgcccagtctaaattttttaggtgtatatttgattccagctgtacattttttggtatgtctatatcaggaggaaaaactaaatttataagaacagaaatcgatgcgataaagttatttaacaaaatacataaaccatttgagtcaaaagtagattattataaagataaagatataaataaagaaaattatttattagctagaagcgttgttaagttgtcacgtaatattcttgaatcaaaccaagcttgttcaaatgatgacttatattattcttcgctaaaaaatctttatctaggaaagttaaaggaaagaaagctttataatttaaagaaaatttcagacattaaagataatgtaaaaaggaaaaaaatagaatgtaatcatcgtgaagataaagaaagattatattcgttcaagaataaatgtaagataattcttctaaatttaaaaaaaccagcatttgtacttgaggaaaaaataatcaagacttttggttttatgaattcttggggggggagtttgcaacgcctatttctgataggtttctcgatacttattgcgtattgctttatatatatgtatatggataatggctcggtttactatgttagtgataatagcggtgctaccttaattcatactaaggattggtattactttatatcgtcattgataaaaagttttgatgtaacgttccttgctggttatacaaaacatatatccaattctgatggcttgctgaagcagtgtgtattgttgagtaatatgttagtcgggttattttggtatgcagttgctataccatcgctgatcaacaaaataagtgttacaagattatga

SEQ ID NO: 446480 - DNA, 1155 bp, Serratia marcescens
gtgtacgatctggcggataacctgctgggcgagcgcagcccgcagagcgacatcgacgcgcacctgccgctggcgccgatcgccgataaccggctgacgcactggcaaaaactgttttaccgttacgacgcctggggcaacctgatcagccggcgtaacggcctgtatgaacagcactaccgctacgacgccgacaagcggctggtgcaggcgcatggccgcggcccgcagggcgaattcgaggcgcagtaccattacgatgcgctgggccgccgcagccgcaaggcggtgcgctacaagggcaaaaccgaacagacgacccgtttcctgtggcagggctaccggttgctgcaggagcagcgcgacgacggcagccgccgcagctggagctacgatccggccagcccgtggagcccactggcggcgctggagcaggcgggcgacagccgctcggcagatatttactggtatcacaccgatctgaacagcgcgccgctggaggtgaccgacgcggcgggcaacctgtgctggtccgggcaatacgacaccttcggcaagctgcagggccagacggtggccggcgcggcgaagcggcagggtgcgcaataccagcagccgctgcgctacgccgggcaatatcaggacgacgaaagcggcctgcactacaacctgttccgctactacgaacccgaggtggggcgtttcaccacgcaggatccgatagggctgcgcggcgggttgaacctttatcagtatgcgccgaacccgctgatgtgggtggatccgttggggttgagtacgtgtggtgctgaaaaaaataaaaaaaccacatatattggcaccagtagaagagatgcttttagacaagctaagcgtgatgcaaaaatcagtaataaccaacatccaaaaatagatcgggttgacttattggatggtaaaggtaataagatacttgatgctaatggagcacctatacaggtcaggcaatatcactatacaaatagagacggggttcctattgtaatccaagagcatagtcttggtcatacaaaggcaactgcattacatggggcagaaccacattttaatgtgaggcctatcgacaatttaaatacagggagtgttcccgggacgcatggccactacaatttttaa

SEQ ID NO: 446481 - DNA, 363 bp, Serratia marcescens
atgaggcacagcgctcttatcattatcatgttgctgtcgatgctcatgatgcagggatgcgaacaaggtagggatctacaatcacaggattactttgaagggaagcagctggacatcgccaagatcatctacgagggtgacaggcaaaagctggataaggttttaccgacgataagcaaagaaacgttaaatcggccggccaaggcggagatgacgttattattctgggcgataaataacgccatctttgacaagaacacgccagagcggctcaagatcattacggatctggtcaaggcgggagcagacccactgcagccaagagctgagggggggggagtagcccagctgaatttgttatga

SEQ ID NO: 446482 - DNA, 777 bp, Serratia marcescens
gtgaatagtgtaaataaaattttattaccggaaagggattactatcctttaagtaaagtttcagaaaaactaggctgtgatattcaggatttattccactatgctgcaagaggacacttagtaattagccttatgatgccatttcttgttggagcaagagtctcagttcacggagatatgactttagatgttttaagtgatgttaatcttgagaaaatagaagaaaagcagatgcttgatgaggtgaagattactagcctttcaactatatatgacgtttcaataagttcagaatacggagggtgtttagccgctaccatcggaggggtatgggatttaaatatgggagcggctgagatgtttgaatgctttggttatgcgacaaccaaaaccataggtgcagtttatccgactggaattgataacagcattgatttttatgcacactttgaaagtgaacaagcaaaaataaaaaatgagtatctctgtgttactaaggaaagtctttcctttatctgtgggggcgaagtaaacaatcatattccaaataataaaaaaagaccgcatttgacagagtatcattctaaaaaaagagagtctgtcctgatggccgcagtttatatgaaagttcatcaccctgatttatgtggcaataatacgaagtgggctgaagcaataaatgattatgctcacaaattttgggaaaatggagagccgccactagctgtagacacgattactgatttactgggtaaagctcttgcaaattcaaagtaa

SEQ ID NO: 446483 - DNA, 195 bp, Serratia marcescens
atgcttaagtatttccaagtatcaggctacgccgtaaataagcgcggtaacaccatcggtattttttacgatgtgcaatcaaccagcgccgaacaggcaattatcaaagctgagcaaaacgccatagaagatgggttccgctatatccgcctgacaagaacgattttgcaggaggtgcgccatgaatcagcatga

SEQ ID NO: 446484 - DNA, 783 bp, Serratia marcescens
atgcaacaatcaacagctgtaaatgtagcaaagactgcgcatattgtcgatcctgatattttgccagttattgagttgaaaggcatgcgcgttgtgaccaccgagacgctggccaagggttatggtacggacgaagttaatatccgtgtcaatttgaagaatcaccgggaaaggttcatcgagggggttcacactttcactgtcgagggggccacccttagaaatttgcgagtaaacaacgttaacgcacaaatttcgagcaaagcacgcaccctaactctttggacggaaaagggcgctgcccgtatgtccaagatcgttgataccgatgaagcatggtcattcttcgaaaaactggaggattcatacttcagacctcgcgaatcccttggcttgccattggactacgagcacgcacttgaaaacctgctggcaaaggttaaagaaaatcgcatagttactgaacaacgcgatcgtgcaattaaggagcggcgctggattggagagaaacgcgaggccactgcgatggcaaccgcatcggtagctgtgcgggagaagaacaaacttgctgaacgtcttggagaaggaaagaattacgctgccattatcccggtggagaagaaaactggtgaaaagtttaaatggcagccgcttcgaaagtggtgcagagaaaacgacgccgtgccacacagcgtcgaagacccccggtttggtactgtcaaatcgtggccacgggaggcgtggatggcggtatatggggtagatctccgcaagctgttttaa

SEQ ID NO: 446485 - DNA, 630 bp, Serratia marcescens
atgatggtcttttgtaagggaagaaaagtcgaaacccggctgtgcgggaacacaaaccgggtctctttgtcggaaactttgggagaaaccaacgtgaatattatagcaaaatcagacctcaacttccaaggcaatgcaatcgtgccagtatctggcattactggcgtttggttgacgtctgctgatattgccaaagctttacagtacaaaagcgccaagtcgatcaccaatctgtttaatcaaaacagcgatgagtttaccagcgggatgactcaggtcattgaatcagtgacctcagggaactaccgcaaaaaagtacgtgttttctcccttcgcggtgcgcacctgattgcaatgtttgcccgcactcctgtagctaaagagttccgtcgctgggttctggatatattggatcgtgaggtagcccagacgccggagaactcacctcttcaccgatacttcgtgaaggtaatcatcagagataacgtgtttggtgctgatgttgagcttctgggaaaagcagacacgttcaaggcgatcgcgcgtgggctcgctacagacttgggctttgagccaacgggttttataagtcgcagaccagcgacggagaaaatgatgcggaagcattag

SEQ ID NO: 446486 - DNA, 300 bp, Serratia marcescens
atgaaagtaagagacatatctccgtacggggtaagaatgccagcagaactgaaggacaagcttcaggacatggcgaagcgaaacggtagatcgttaaattctgagattgttagaattcttgatgagtatgtgaactcaccaagcattgaagatattaaacctttgactgaagaagagatgtcttctcctgagaaggttcaaacatggttagcggacatcggtaaaaagttagctgcaattgaaaaggtggtaaataaaaactttcctattgacgagcatgaagaaaatgagcccacctaa

SEQ ID NO: 446487 - DNA, 1833 bp, Serratia marcescens
atggcgaattcgttcgattttgagctgacagcaagtgatcaggcatctgcgtctattcagcggattgaggaaattgtaaagcacctcaatccactgttggacagaacgcgcgatgcgttggcgttgggcggtcaggaatccagagataacctggacgatttgggcagccgttttgatgtgctggctaaaaatgccagaagcggcgtccagttcatcggcgatttggtccctccgctgaaaatggtcgggggcttaacgctgggattgggcggagccgcagtcgctatcaacgccgtcaaaaacaacctcaccaatttcgccaacgcgggataccgcatcgacaccatcgcaaaaaatatcagtatgaccactgacgcctttcaggaactgactggcgccatgatcgaaaacggtagtgagcgtgaggcggcagagagttcgattggtaatttgttcgaaagggcaaatgacgcggctcatgggcgaaataatgaatttctggccctccttcagcaagaaggtattgggattggactgaccaaagaaggtctggcagatgttggcaagctgattgatgatctcaaccgctccatgcaatctctacctgctggacagcaggcgctatttgccaacaaattgggcctttcgcctgatcttctcagctatttgcgcaacacgaccagtgaagtgcaacgcctcaaagatcaggcgcggcgagatggcctcatttttagcgacaaggatttgcagaacgcgctggcatttaaacagcagttgaaccagatcggcgcatcctatgatggcgtattgctgaaggcgcaggcgtggctgggtcaatctgatatgatgaaagctgatgttgagcagatatctcaggcaatgaagcatgggctggatagcacaacgatcggtacaatactcacctttaacagcggcgggaaacaggccgacttgcttcgccaggctcagggggatgaaaaatttaaggaaacgctttcatgggatgaaaagttggatttaaaattcagctatgcgtcagaagatctgatcaagaaactgaacaattattacaaacctgcttggcgtgctgagaaggtaggaaaacagctacaaagtgatttagaacaagtggtttatcctacgccccaaaatgttattaaccccattgaacaggctatggggaatacccctgaacatcagcatttatcccagttggaagcaaaaaacaatctaccaccggggttgctggatagggtatggaacgctgagtcgtctcgagggaaaaagcttttttcttccgctggtgctgagggaccatttcaatttatgccagcaacagggcgtgattatggactcaaaaatcgtgatgaacgcctggattttcacaaatcgagcgatgctgcggcaaggtatctttcagatttgcttaaaaggtttgatggggatgtgagcaaggcagttgctgcatacaattggggaccaaatcgagtaagtgataaagggcttgcaagagcaccgcgggaaactcgtgactatttgcaaaagattatgccaggattgccgatgttctaccctcagggtgaatcatcagatgctggcgattcccaggtatcaaaagacaacacctatcgaattttcagcgggccaggacgccagggggattcctcaggggtaaatcaagatttgttgtcagccataacatcgttaaataaaaccatgcaagacagcaagatgcagattgagttaacgctagttgatagtaaaactggcgagcggcgtactatcgttggtaacgatggggctcgggtatcaacctcaatgaacttccagtag

SEQ ID NO: 446488 - DNA, 411 bp, Serratia marcescens
atgacaagcatccagcggtttacccctgactacaaaatgcatgcagttcgcttcgagcctttcgcacgtgaagctgagcacggtgaatatgttcgatttgatgcccaccagcagacggtgagcgcgcttgaggctgagcgcgatgcgctggccgatcgagttaatgcgctggctgtggagagcaagacgctgtccgacgcgctttctttgatttcccgttgctacaaacattctccgcacattcaaagcatgtgtgttgttgaaaccccagccactgacgcagcactagcggctatcaagaagcaagccggtatcgaagccgttgaagaagccgcctattcactttacgggaaggggtacattttcgacacgattatggattacgccaccgagctgcgggaggccaaatga

SEQ ID NO: 446489 - DNA, 438 bp, Serratia marcescens
atgacacggacactgatgactgagcagctgaaacagattaaggccgacattgccgcacgcaaggcaatgccagaatatggcgaaagcgtcgaagggaatatcgagcggctgcgtgtgattggcgcaacgcgtagccacttctcaactgaaacggttgagatgctggtacgggcacttgaagaaaaaagcagagcccttgctgacgccgagcgtgagcgcgatgactgggttgaacacagccgaaaaatggagcgtcgagctattgaagctgaaagaaaattggcaacgccgatagtagcaccggatgacggattcgatgattgcatggaaatacggccggacagtaccaacgatttcgacactggctacaactttgggctttaccgttacgaacagaatattcgggcggctggcttcaagattgaaggagaagactaa

SEQ ID NO: 446490 - DNA, 906 bp, Serratia marcescens
atgctaacgctcgaacgccagcagtttgaaaaatggtgggaaaccgctatgcataatggctatccgccaagattcggctgggagcactggagagacggcgacggataccgcgatgatgatggtgagtttcaagggctatggcaagcgtggcaagcaagccgcgggttcctggctaaccgggaggcgcagccggtggcactggacgtcattgcgcgattcaaggagtggaacaccgggttcccagttgaaaatttcaaagctgactacgttattggctgggtgctggcaaactattacgccccgccagcgccagctaacgccgtggcatgggaaatgcgctactggaacagcggccacaactgctggcacgattgggagcgcatcacagcagaacagcacgcagagatgagcgcagaacacgcggcggacaacgattacgagttccgcgttttgtatgcagccccgccagcgccagcagtggtgaaactaccgacagagttctacagcgatgaggggatcgtggtgcgcctggaagaggttatggccgcattagcagtggtcggcgtccagtacgagcgtaaagcaaatgcaaaaacacgctgcgaatttccagcgccagcagtgccgaaagaaatgaccgtagagcaagcttatgaaaatgttcaaacatggcattacgccaatggctggaacgcctgccgcgccgcaatgctggctcaacctgtaagtcagcgttacacgttgccaccgcacgttttccgcgaactggtaaacagcctccgcgataccgcagtaaagtatcaaggcactcagcaattacgcgaacaacttagccgcacgttgacggataaaggtttgtcggcagcagcgcaggagggtgggaatgatcacgatgccggacgataa

SEQ ID NO: 446491 - DNA, 579 bp, Serratia marcescens
atgatcgttcatggttacctcgctacttcccctcccgcacccgatgaacctcacagcaaaggcgcagccacaccggcggagacttcggccagtacggtgctatcttcactgcgtgcttatcgagtaactgacggagggttaaattgtttgaaggggagtcgaaatctcttaaaagctctctggctgtactgcgtaggaggtttttcctggtggagtccatatcatgcaacgcctacctccatcgttatgccttttcctatgcgcaggagttcgtccctggatatggttgagaactggcaccgcggcttgataaatggtcgccagatgaatagcaggcttcctttgctgttgccgttcttccccggctttcccgttgcggaattaataaacgccaggcggccatcggtgataaagcggacttcatcgactgactgcagcgccaacgaaaaccagcctgttgacgtgtctgccggcaacagcatcacgatcgactggttctgcacgcggcattgctcagcagccttaagcacccacggggtgatgtcgctgtatggcggattgcaccagatggcgccgtaa

SEQ ID NO: 446492 - DNA, 417 bp, Serratia marcescens
atggcgcatcatctggggcaaatcatgttgacccaggcgctgcggatttacctgatgggggaggagagtgcggcgtccggctggctacccgctttgttcgatccgcgcatcggcgccgcgatgcaggcggtacatgccgatccggcccggcgctggacggtggcggcgttggccgacgcggcgagcgtttcccgttcgacgttggcgctgcgcttcaagcagaaagccggcatggcgccgctcgaatatgtgtcgcgctggcgcatgctgctggcggcgcgggcgctgcgtaccggcggcgaaccggtctccgctatcgcgcagcgtttggggtacgattccgatagcgctttcagccacgcgttcaaacgcgtgatggcgcgctcaccgcgcgactatcgccgggcgcaggcgtaa

SEQ ID NO: 446493 - DNA, 1050 bp, Serratia marcescens
atgctaagcgatagacttattgaaatactacgagataaaaaaatcccggaaaaattgataaatgatgtaatagattcaggctatatactcagaaattttcatgatccattctcaggctataaatggttgagtattagtgataagatgtatggcaacaaacagcattccagttcatttgacattgatgattttgttaaatacatccaaggagacaatgttttcgaaaaattacctagcttcacggaatttacagcgaaaaactataaggatatagaggaggttttatctgaaccaaggaggcagcactatattaatgaaggcacgctttcatttcgtggtcaagtatctcaatatacttataagcgaaaaatcccgaacccagtaagagcagatcaaaacggaagggaactatctatattccctggtttatatagacaaaaagaagaactgtactcattcaatattattcaagatgaaaaaaggagttccctcagtttccttcaagaactcgaacccaacaatccgaacgtgttctttgatagttcttattcatacgatattatgcgggtggagcagcattatgccactcaaacagctggtttagacatatcatttgatattgaaacagctatattttttgccacctataagtttcttttcaattcgcatggtaatgcatatcatagcaagattaaaaaaggcgaacataggggtgttatttatggatttcgctttagagatcctccagtaaaaaaaactgaatttctaattgaaaagtttgatttatttaaaacatataggcctgagagggttctaaggcaaaattgtgccttacccttatttagtgattatgaacgtaacattgcaatcactgatttggattttataatatatctcgataaagattttgactatgagggtaaaagagaacctagttatatgttcccaaatataaaggaagatcgattctatggaaaactgcttgaattgaaggatgcgcatccacatttacttgctaatgttatcgagtatcaaggtagccgagattaa

SEQ ID NO: 446494 - DNA, 684 bp, Serratia marcescens
atgagttttattaaatacatatattccagtaagacatctggactgactgaacttaccgagaaagagtacatggacatgttagtgaatatatgtcccgataaggcagaaaaagccttcgagaaggcatgggcaacaagaaactttgaaattgaaatgtattggaaaagagcaacatacttttgggcattcattgcaagtatatttgtaggttactttgctttaatttcatcggaaaattatgtcaaatatgatagatttaaccatgttgaagtttactttttgatatgtatcggttttgtgctttcgttagcctggcattttactaatataggcagtaagtcgtggcagaggcattgggaggttcatgttgatttacttgaagatgccttcacaggcccattgtataaaaccgttcatccccagctaacatattctgtttctaaaataaatgaaattgtaagttttgtttttgtttttatttggcttcttcttggcgtaaaatatttatttgaccaaaacctaattcgttctcttggagagactaaatctgtaaactggtttgttgttacaagcaccattatttcattactcgttgttttctctatgatttttggccatggccggggtcgttttggttcaaggccaataaaaatgtacagaagaaatgtttcttacaaaagttaa

SEQ ID NO: 446495 - DNA, 1359 bp, Serratia marcescens
atggctaagtataaggcgtatccggagtataaggattctggagttgaatggttgggtaaaatcccaaaagattgggacgttattaatattaaatacctcagccaagtaaaaagaggctcttcaccaagaccgattgatgagccaaaatttttcgacgaggatggagattatgcttgggtacgcatcgcagatgtgacggcttcggatacttatttattcgaaacgacgcaaaaaatgtcggtattggggagctctttaagtgtaaagcttgaacctcatcagcttttcttaagtattgctggcacagtagggaaaccatgtatcactgcaattaaatcatgtatacatgatgggttcgtatatttcccttatttgaaagtaccgagcaaattccttttctatgtttttgctggagagcaagcatataagggattgggaaaaatgggcactcagttaaaccttaatactgatacggtaggtggtattaaagttgcattgccatcgaataatgattttatttctaacattgtaaatttcctcgataacgaaaccgcaaaaatcgataatttgatcgagaagcaacagcaactgattgaactgctgaaagaaaaacgtcaggcggtgattagccatgccgtcaccaaagggttaaaccctgatgtgccgatgaaagattctggtattgagtggttgggggaagtgccggagcattggaccgtttcaacaattaagtatattgccacatttattgggacaggtagcacaccaaaaaactcagaatcgtttactgatggtgacggtattgattggctttcccctggagatttcaatgattcattaactctgcgaaatgctaagaagaaaatcactactcaggcggtaagtaatggtgatgcgaaaatttatcccaaaaattcgatagttgttataggcattggagcaactctgggaaaagttgcatttgtagagcatgaattttcatgtaatcagcaaattaatataattacacctagtgaaattgttgagcataagtatcttacatattctttactgaaccaagtagagcaaatgaaacaatcatcgaatgcatctactattgggattatgaatcaagaaaagacaaagaaaatatggattgttttccctcctaaagatgagcaaataaaaatcgcgagtgttctttatcagaaagaaattgaatttgattcgttgctaaataaatcagaaaatcagatattacttctccaagaacgccgcaccgcccttatctccgccgccgtcaccggtaaaattgacgtgcgcgactgggttgcacctgatatgcaagacgctgaggagccacaggagaccaccgtatga

SEQ ID NO: 446496 - DNA, 774 bp, Serratia marcescens
atgatcggtcgattcttaatcggtatgctcggcgttatgttctgttgcggtttcacctacggtgtcagaataatcgataaagacacaagggaaattatgatgatgggagaccgaataacggacgaaattaactgtgtatactcttttgtccataataacattgtacgggtagatataggattcgtagatggagacactatgtttaatggctgggtcgaccatactggaggcgttgtaccgcttacttctgatctttgtgctggctttcctgtgaacgaagcatacttgaatctgatacgttcacctataaaattgaaaaaaacccaactcagtactggtggtttgtcgacggggacggtgttagttacgatatatggtacgaattggtggggaacctttagagggcgagctacaacaataactccatcaccctcttgcactgcgacgaaacggggggatatagactacggcgcggtcactgtcacagagacgaacggaaagttggctcaaacggagattgagttgaagtgcacgcaagacgctaccgtaaaagtccaatttatgtcagctgcggggaccggaacgacccagctggcaaacggtttaactgtaacgtatcaggtgggcgtgtggccaggtgttggggggttcacctaccgcttacagggcggaataccgagtctcgcgaaggcgacgactgtactgggaggtagtatacccccgtccgcaggaccattctcgacgacaggcgtggtgcgcttgagctacgaataa

SEQ ID NO: 446497 - DNA, 780 bp, Serratia marcescens; identical to SEQ ID NO: 438332

SEQ ID NO: 446498 - DNA, 1263 bp, Serratia marcescens; identical to SEQ ID NO: 438331

SEQ ID NO: 446499 - DNA, 2310 bp, Serratia marcescens
atggagttaatgaagtttctggcggcgattttagtaatttacttgttgttttttagaaagaaaaaacgtaaatctccaaagtcttatgcttcaagccctgtgaaagcaccgccaaaagaatggctcgctgacatcaagaaaaaagaggcggttgtgcgaaatgatgatagtgaagacgataaccttgcaacttttacattgagcggtggccggggtgttgaagttcgggtgacaaccaatcattaccggaacacctccaaatcagcaggtgcactagctcgatgggtacttccgggtgagatgataactgtagctggtgtaacaattagcggtggccacatttacgtggggcaacgtatgaagccctccggtcaagaatcaggcggctattatgacgatggaagtgaggcatcattaattgatgacacatgtaagataaaacctacttcttatctttacgaggacagttcattaggatactggcccagtttttcatctctttccccagaagcacgcggtgcgtatgtcagttggcttgccagcgataggtctgatccatcgtgtcctatcggctatgtttttatctacctctatggcctggaaagaaaagcgctcgtagattccactgacccaaaattccctgatgctgagttccgtaatctgttcaatgaagtcgctcggttaagatcggtattcattgagaaccgctccttccgtggatattcgacccaattactcgaagccatgtctattctgcgcccgaacatgggcttagccactgagctcgatagcaattcaggtttcagcaacagcatgcaatttaagctggctctggcaaaaactgtacatgaaggagttcctgtatcagctgaaatggcgttgaactgggtaataaaccacaccgagtattcgctgcgtactccggctcgccgctgtgctaaagagtttgctgcgcttttcaaacggcgttacacccttaaatatggtgaagggatggtcgttaaggcgaataaaacgcgcctaaggttagattacacaccagcaagtcctagtttgcgaggtgttcgacttcctgttcccgacctgcctgatccaagtgcgttgaagagccctgtccagaaaattatggctcttgccgacatatgtacggatgaacttgatgcttatagtcgctaccttggtaggaaaggtacgtcagtcaatgatacggctgcaattatcttgctcccttcagagatcgttaatgaaagcgcagaaaaaatattaagctcattcaaacgctgggctgatgaggcgatcctcgtcaaggaggggttagtcccagttgctgacttttgggcacatatgaatgccagttgccccaataagatcaataaaaaagaggccgatttgatgcaggcctttgctctgaagatgggttatggtgtggcacctgacccgtattatcaccatgtgaaggcggatgttgatggtgtacttgttctattccccgccgccgaagatggacgcttctcaccttctcctgaatttatctcagccgtaatgacgctcagattaggggcgatggtcgccttgattgacgattatcttgatcaagctgaacagaaagtgcttgagaatgccatcaacaacaatcctggcttcaccgatgatgaaaaacgctctctacatgcgtatttaacgtggcaacttcataccccagccaatatgacaggaatgaaaagcaggattgagttgatgggggccgcggaaaaagctgctgtgggtaaggttatcattagtgttgcctgttcggatgggacgatagcgcctgccgaaatcaaacagcttgagaagatttattcaagtttggggctggatccctcatctgtctcgagcaatatccatcagcattccgcaactgaacatgatctcgtctcgtctgtaccaactgatcagacagcagcagggttcacactggatgctaatgtacttgcccgccacgaatctgccacggatgatgttcgtaaattgctgaacacaattttctccgaagaagaaccggaagagccagaaagcgctccagcctcatcaacggaggcggggggccttgattccgcacatagccagctttatcgcagtttgctggagaaagaacagtggtcccgaaaagaggcgacagaattgtgcggaaatttgaatttgatgctcggcggtgcgcttgaggtgatcaatgactggtcctatgcggtggttgatgctccagtactggacgatgccgatgatgatatctgggttgacctggaaattgccaaagaattagagggatag

SEQ ID NO: 446500 - DNA, 720 bp, Serratia marcescens
atgctcggccagcagttcggccttctcgctggcgctcatggctttcaggtcagcatcgctcagcgtgtcgaacgggctgggctgcggcggctggctaagcgcctggagctgggcgcgcgtggactcagcgccctgctgacagtagacgtcgttccagtcgccttccgtgggcggcaacgccgggacaccgccggtgcgtgtggccgcctcggcggcgcgggtctgcccggtgccgctgcggtcattatcggccgccagcagcagccgtgcgtccgggtagtggctgcgcagctgctctgccaccgccgccaggttgttggcgctgagcgccacgcacaccgtctcaccggtcaggcggtgcacggtgagaccggtagcgtagccttcggtgagccagataaccgcgttgtccggcccattcaaggtgtggcaggcggctttcacctgcccgcctgccagcatgcgcttgtcaccattggcgttaatcagctgcacgttaaccacctcgcccccggtattatgcagcggcaacagcaggtcaccgggttggaaggtgattccgccgacgcgcaacgactggccctgcaaggtcagggtttctacctccggccagcctttggcgctcaggtaggcgttgccggtctgaggccgggcagcggccaccagagtctgtgcctgtcgcgcggccttgcgctgagcctcggccttgtcttgtggtga

SEQ ID NO: 446501 - DNA, 681 bp, Serratia marcescens
atgatgatgggagaccgaataacggacgaaactcactgtttatatcctgcttttatgttatctaacgaagaaggtataagctttggattagtagatggagatacgtattatgttggcggcgtctaccatactgtaggctatggaaatgttggagcgggcctttgtcttggccatcctgtgggcgaaggattcttgaatctgatacgttcacctataacattgaaaaaaacactgaacggtatcggtggtgagtcgacggggtttgtgtctgcttcgattaaaagtcggaattggtatgggacctttagagggcgagctacaacaataggtccatcaccctcttgcacggcgacgaaacggggggatatagactacggcgcggtcactgtcacagagacgaacggaaagttggctcaaacggagattgagttgaagtgcacgcaagacgctaccgtaaaagtccaatttatgtcagctgcggggaccggaacgacccagctggcaaacggtttaactgtaacgtatcaggtgggcgtgtggccaggtgttggggggttcacctaccgcttacagggcggaataccgagtctcgcgaaggcgacgactgtactgggaggtagtatacccccgtccgcaggaccattctcgacgacaggcgtggtgcgcttgagctacgaataa

SEQ ID NO: 446502 - DNA, 192 bp, Serratia marcescens
atgtatcgtcgtattgtgctcttgtgcataggcgattgcctctcgatcaacatccaaccctgtgtaactgactacagcagggttagacaagacgataggtgccgaatatccgataccgcatgcacagtcaaccacaactcccttggcaaaactggcaacgtactgataacgctggtgatgttcttctcttaa

SEQ ID NO: 446503 - DNA, 225 bp, Serratia marcescens
atgaccatccatataaattcgttgtcgatgatctcccagcagaccaagagtcaaatctctctcccgttttttggcaagcaccatcaaggagtccagtacacctttcatcgtgtcctgcgactcatcaatcagtatgattggatgtcgatctttgagaatggattggagtgttggcttattttgaagcaaccaagctgtcgcatcgagtacgtaattgtgcggtag

SEQ ID NO: 446504 - DNA, 351 bp, Serratia marcescens
gtgaacagcgccaaatatatcggcatgaaccgaggcaccggccgcacgctgacggacatcgagcatattcgccagtccgtggcggacatcctgatcacgccgcagggttcgcgcccgatgcgccgggcttatggctcgttgctctctgagctgctcgaccagccgcagaacgacgcgctgcgcctgcagattatggccgcctgctacagcgcgattttggcgtgggagccgcgcgtcaagctgaccggcatcgcttttaataccacctatgacggcaagatggtgatcgacatcactggcacccgcaccgatgcccccggcgcgctgtcgctgtctgttcctgtgagctga

SEQ ID NO: 446505 - DNA, 282 bp, Serratia marcescens
atgtttagccgcaagcaggccaccgatgatgtgcgctttggtgagatggaaggcgccgtgatgaccgtggccgagcagttacaggaagcggacacccgctttaccgagacgttagccgtattgagtgagcaggttgccgacctcaggcaacaggtaaaaaccggcagcgatgcgttcagcgcgctgcaagcccagctttccacctcggaagatttcagccagcaggcccgcccggaggccaccggcggcaacagcgcgcaagacgtgctgaccgactgctaa

SEQ ID NO: 446506 - DNA, 1212 bp, Serratia marcescens
atgcgcaagcaaactcgttttaaatttaatgcttttttgtcccgccttgccgaactgaatggcgtcgctaccggcgatctggataaaaaattcagcgttgagccgtccgttacgcaaaccatcatgacccgcgtacaggattcctccacgttcctgacccgcatcaatatcctgccggttaaggaaatgaagggagagaaagttggtttaggtgtgagcggcaccatcgccagcaccaccgacaccgccggcggcgatgaacgcgaaacggccgactttgccacgctggacaccgatgactatttctgtcagcaggtgaactacgatttccacatccgctacaacactctcgacctgtgggcgcgttatcaggatttccagacccgcttacgcgatgcgattgttaaacgacaggcgctcgaccgcatcatgatcggctttaacggtacgcaccgcgccaaaacctccaaccgcgtcaagttcccgctgctgcaggacattgcgccgggctggttgcagaagtaccgcgagaacgcgccgggccgcgtgatgaataaaatcgtgggtatggacggcagcgtggtgtctgaaaacatccgcgtgggtgccggtggcgattacgccaacctcgacgcgctggtgatggatgccactaataccctgattgcaccgtggtatcaggaagatccggagctggtagtgatttgcggtcgtcagctgctggccgacaagtattttccgctggtcaatcaggaacagcccaacaccgaagcgctggccgccgatctgattatcagccagaagcgcatcggcaacctgcccgccgtgcgtgtgccgtacttcccggcggatgcgctgctgattacgcgcatggataacctgtcgatctactggcaggaagacacacaccgccgccatatggtggagaacgccaagcgcgaccgcatcgaaaactatgagtccatcaacgaggactatgtggtggaggattacgcctgcggctgtctggtggagaacatcgagctgttggccgtcaagccgaccgagccaaaaaccaaggccgcattgccgacctccggcgatgacattaaggcgctggccggtgccattgttgaagcggtgaaggttgccaccgctccagcggagccagtcgccgaagtgaaagacccggaggaagcaccggcagacgacaaagcgaaaggcggtaaataa

SEQ ID NO: 446507 - DNA, 648 bp, Serratia marcescens
  misc_feature (546)..(555): n is a, c, g, or t
atggcaaataaacagtggaaactgataccgctcttggtatcgatcagtgtaatcagcggttgtacaatcgtgcctggttctcacctttcaactagtgggaaagaggttgtaaaacagcaagatagtgatttcgatatcgacaatctggttaatgtctatccaatgacgcctggtttggttgagaaaatgaggcttaaacccgttgtcgcgcaaccaaactcgtcattagagcgtgaattgcaaaattacgaataccggattggtatcggcgacgtgttaatggtgactgtctgggatcaccctgaactgactacaccggcggggcaatatcgcagtgccagcgatacgggtaactgggtgaattcggacggtacaattttttatccgtatatcggtaagataaaagttgccggtaaaacgatgagccaagtcagaaatgagatcgcaggacgattggcgcaatacatcgaaagcccgcaggttgatgtgagtatcgccgctttccgttctcaaaaagcgtatgtgacgggggaagtagcaaggtcnnnnnnnnnngtcaggacagcaaccgatcacgaacgttccccttactgtgatggatgcaatcaatgcggctggcgggctttcagaaaatgcagactggcgtaa

SEQ ID NO: 446508 - DNA, 552 bp, Serratia marcescens
atggatgcaatcaatgcggctggcgggctttcagaaaatgcagactggcgtaatgtcattctgacacataatggaaaagaacagcgaatctccttgcaagctttgatgcaaaggggggatttgacgcaaaaccacctactttatccgggcgacatcctctacattcctcgtaatgacgatttgaaagttttcgttatgggggaagtgaaaaaacagactacgttgaaaatggatcgcagcggtatgacactaacggaagcattaggtaatgctgaaggaatggatcagaactttgccgatgcgacgggggtatttgttattagaccattacgtggtatggaaggtaaaaagctggccaatatctaccaacttaatgcgtctgatgctactgcgatggtaatggggactgagtttcaccttcagccatatgacattgtatacgtaactaccgtaccgattgctcgttggaatcgcgtcgtcagccaattgttaccgactatcgttggtttcaacaacctgaccgaaggtacacagcgtattcataattggtag

SEQ ID NO: 446509 - DNA, 198 bp, Serratia marcescens
atgaatatatcgaacaatcagctgactaatctgggacgtgccattgccgatggtttgcgtgtgttggtacgcccggtaccgatgactgcggttgaatgggcgaacgaatattattacttgccaaaagaatcttcttatcaggaaggccgttgggaaacgctgccattccaagtggcaattagcaacgcaacgggttga

SEQ ID NO: 446510 - DNA, 153 bp, Serratia marcescens
atggataagggccaaatcgtcttcatcaacgtaaactttgccatgatgctgaacggtgaaactttcgcaaacctgcgagcgcgcgttttcttcgccaataaacagttccggatgaatattcaagaactttttaaaatgcgaggtaaaacctga

SEQ ID NO: 446511 - DNA, 993 bp, Serratia marcescens
atgactcagcagcgtattaaaccggcctatgccaaattcgatcccgctcatgtgtttgacgggcttttcgtccccacgaaggggaagaagcgcgggcgactgtatgtgccgccgcgccgcttcggcgatagtgaaatcagctttcaagggttcgagcagcttggagctgatgaccaatcaatcttgcttgcagtaagcgcccagcttggcattgacggcttgatgatcgaggcaaaaccacccggcgaaataggccagcaattgcgccttgctttggactttgacaacgatgatggaaggccgctgaaaaccaagaaaaccagtttgcgcagcctgctgattgatgctggatatgacgacccagaaagcggggcggcacttgccagaatcaaggaaagcctgaaccgaatgggtaacgcgcagatacgggaaatcaatcacgctaccggctgggattaccgctgcaatctcctttcgagtcggttcaatcacaagactggggaaatctttgttgccgtcaatccgcgcctgaccggggcggtttttcgagagcaacacgtcaaggtttcgcttttcgagcgcaacgagctggagagtgaagccgccaagctgctgcactgttggctgtgctcaaacatccggcttggccgttcgcttggcaatggcaacggggcgcacatcgacacgctagcgccccacgtatggggcaaggcggcgtgggaagaagcatcaacgaaggttcgatcagtcaggcggggtcaactacgcgatgctttagacgaaatctcagaccgcacacgcggactgcaaggcggtatgggatgggccatcgaccagaccagcagcgggcttgtgctggtaagtcgtcccaaggaactgccgttccttgagggtgagcacgacatgcgccccagcgaataccacgacctcatgagccagccgccaatgcaagaaccagatttgttcgacccgcaggactggacgccggactga

SEQ ID NO: 446512 - DNA, 879 bp, Serratia marcescens; identical to SEQ ID NO: 243770

SEQ ID NO: 446513 - DNA, 327 bp, Serratia marcescens; identical to SEQ ID NO: 243769

SEQ ID NO: 446514 - DNA, 324 bp, Serratia marcescens; identical to SEQ ID NO: 243768

SEQ ID NO: 446515 - DNA, 225 bp, Serratia marcescens; identical to SEQ ID NO: 243767

SEQ ID NO: 446516 - DNA, 2673 bp, Serratia marcescens; identical to SEQ ID NO: 243766

SEQ ID NO: 446517 - DNA, 312 bp, Serratia marcescens; identical to SEQ ID NO: 243765

SEQ ID NO: 446518 - DNA, 357 bp, Serratia marcescens
atgaaatacacaacagagcagctagaggctatcgcttcaaagcttcgtgagatgccgccagtcgaaaagaagaagcaggagcacagcaagcaagaggccgtgcgcgtgctatccaaagagattgccgctttgcaaaagcgtggatacacgcttgaccagatttccgagacgctgcgcggcgaaggtctgagcatcgcaaccccaacgctcaagagctacttgcagagagcaaagccagcgaaaaaagccccggtgcaagcaccgggagacacacccccgccccgccccgccgataagaagcctgcggatacatcgaaggcgacattcaccccgaaacctgacagcgacgacatttaa

SEQ ID NO: 446519 - DNA, 684 bp, Serratia marcescens; identical to SEQ ID NO: 243763

SEQ ID NO: 446520 - DNA, 639 bp, Serratia marcescens; identical to SEQ ID NO: 243762

SEQ ID NO: 446521 - DNA, 753 bp, Serratia marcescens
atgagaatcaagatcaaaggagaaatcacggcagaacgcctagcggaagcactgcacgcagcagcagaaaaatacgaagctgtgaggccggggcacaaggtctatggggccaatctctacctaaccgccttcgatgctgatggtctgccgttcgatctggtagaccatcgcggcgaaccgctttcgatcaccatcgaggccaagtctggcgaactggtaaaaccagcactcacagcagagggtgaagcacaccgacagaaagccaaagaggaagcacgaaggcaagctgaagaagcggaagctgaagcacagcgcagacacaggcaaaccttagacgaatacgaacaggagcggcaaaaacgacggaaaaaggaagccgaagcaagaaagcaatttgaggacgcgaacgcaatcactgccgaactcttgaaaaccatgccggaacgcttcatcgacgaactgaacaaaaccgtgcaaggcgtttgggacgacctcaagccaaccgaaacgcaaggcaagaagaagggccagccgaaagcgctaccagtcttttccatccatgcggacgggctggtgctttccgtcgagacatggaagaacccgcgccgggttctcaatccgctttgcacactccagcacggcgaaatagccccattctggatgcacgaagcgtggttagaagccatgaggcggatagtcgatctgctggatacgctcaccgcagccccggcagaggccctagaaagccagtag

SEQ ID NO: 446522 - DNA, 231 bp, Serratia marcescens; identical to SEQ ID NO: 20732

SEQ ID NO: 446523 - DNA, 624 bp, Serratia marcescens
gtgctgctgttcctgctgggcgtgctgtgcgtagtggcttacgccatcatcaacagcccgggtcttggcctggtggccaagccgctgatgaacaccaccaacgccatcctgatcatcatgctgagcgtcgccacgctgaccaccctgctgtgccgcgtcgacaccgacatggtgctgaactccagcaccttcaaggccggcatgagcgcctgtatctgtatcctcggcgtcgcctggctgggcgataccttcgtgcaggccaacatcgactggatcaaagagacggccggcagcgtcattcaggcgcacccgtggctgctggcggtgatcttcttcttctgctcggcgctgctgtactcgcaggccgctaccgccaaggcgctgatgccgatggcgctggcgctgaacgtgtcgccgctgaccgccgtcgcctccttcgccgccgtctccggcctgttcatcctgccgacctacccgacgctggtcgccgcggtgcagatggacgataccggcaccacgcgcatcggccgcttcgtgttcaaccacccgttcttcattcccggcaccatgggcgtgattttcgccgtggtattcggcttcctgctcggcagcatcatgctgtaa

SEQ ID NO: 446524 - DNA, 420 bp, Serratia marcescens; identical to SEQ ID NO: 51548

SEQ ID NO: 446525 - DNA, 627 bp, Serratia marcescens
atgaaaatagagataggttcaatatctgactggataagctctttaagtactgccggtactttactcgttgcctatatggcatatcgtaaagcccctcaatggttaaaccaaagaatgcacgaagatgcattatctatggcaactaatttgatttttgatgactacgctaatcttaataggaaagtaattcaaactacagccatcattgaacatataaaagtaatgaatgaaattgtatcagataactttcgagactttttaaccgtagaggaatgtgagagatatcattctatcttcaatgaaactgatataacgccaactaaaataaatgacaaaatcagcaacttaaaaaaactaggctggtgccttaaagaaccagcaagcaaaaacaataatgaactacttaagtcgtatagaatgatacgcaagaattttatggttctatgtgtttcacttaaaaatctaattactgaagaagacgaaaatagtgccaaaactcattataatatatttttaaaagggattgagaaatttgatgataacacaataaaatttaaaacattgtatgatgagttacagagcaaacactcaaagatacctgattattttattgttaccgaaaaatag

SEQ ID NO: 446526 - DNA, 753 bp, Serratia marcescens
  misc_feature (701)..(710): n is a, c, g, or t
atgaaattagcaaatagaattattattggacttgttatagtactgcttattctggtagtactattattgatcagtactctctactacagcacggataagaaaatggaactaggttcattaacagattggattagtgcaggtgcaaacatctgtatggctggggctgctctttatgccggggctaaggctattaacttttttcaacaaaaagcttatgaccacgcacttgaaattatacaagaagttaacaaaatacaaatatcgataaaccatttcaatgttgaactattgattaaaacatctattaaagcaggtacttatacaccatcgaacttgccccctgattatgagaacaaaaatactccaaatgatttcgacacaccaattcatgaaatacaagaatttcactccaagttaagtgtaatatcagctgatataatgaatattatagtttcattgcgtagtacaaagccatttggttacgtaatgaatgatgattacttagagcctttatgcaaggcattatctcagtattcaaatgacgcaatcgtccatatcattttttataaaaatgatcatacctacatatcttccgcactaaacattgacatgccatttattagcagcgataaacatgtatcactgaatgagtcatatgaaactataaaaaatatatcttcaaaaatacgcacatcaagtcnnnnnnnnnnaagtctagatgaaatttttaacttcaatgtgaagagaaaatga

SEQ ID NO: 446527 - DNA, 576 bp, Serratia marcescens
gtgaaatggacaaatagaattattatcgggctagttatatcactattacttgcagtactgatactactaattactatactctgtgggtttgatacgaaaatgattactgattggattgttgctttttcaaccgctggaactactgccattgcctatatggcgtatcgtaaggctccacattggttcgagtcaaagcacaatgaagctcgctatgaccaatcatcaaagataatgagcctgcttgatgagtctctggataaactaattacagtgagttttgatgttatagcaattacagatagagataaatccaataaacaatgcttcgaacttggtagttctttgataaaggttagagagtttttgaatgcctgccctcgatataatatcgtccctaaacaagaattaaaagtgctagttgatgatatgcttaatcaaacatcagattatatcggtgttatcgtaggaattaaaagcctcacagatccatcaattcaagaaaagcttaactctatacgagatagacatcaaaaattgtcaagtactgaattgcgtactctattcaaatttgactaa

SEQ ID NO: 446528 - DNA, 234 bp, Serratia marcescens
atgactactattcatttatcaatacacactagcagtactaaacaaaaaaccgatgagtttgtgaacgcaattaaaaaggaactaagtgaatacaacgttatgttttcatttgaggacgtaattactaaaggggagaactacccaatagtagtaaaaaatattgtagcacccggtgatgtttatgatgacattgaacaacgaattgcaaaagtaagagcctctttgatagcataa

SEQ ID NO: 446529 - DNA, 324 bp, Serratia marcescens
atgttatcccatccctcgccgcagggcgtccgcggcatactggccgcactttctctgtgtatgctgctgtcatcgctcggcatcagcatcgccaacgtcgggctgccggcgctcgccaccgcattccatgcctcgttccaggcagtgcagtgggtgctgctctgctatttgctggccgtcaccacctgcatcatcggcatcggccgcttgggtgacagcctcaatcgccgccgcctgctgctggcgggcatcgcgctgtttaccgccgcttcgctggcttgtgcgttggctccgcagctgtggctgctgctggcggcgcgctga

SEQ ID NO: 446530 - DNA, 900 bp, Serratia marcescens
atgtcccaagaattgtctttatcctttacagaaaacatatattattcaaccaaagaacccgctagcatcaaagacgtaatcacatcccttcagggttgggagtcgatagcgaagcaatctgagggggttctgaaggagctgactggagcgaacattcttgatatatcggttcatgtatctcgcttagaagcaggtagtttgtatgaagatatcgtcatcaagcttctcttcggtagtcaggaagaaatggacaagtttcttgaaaatgctcacgcgaagattggaaatgggaagatgagaaacgctcttgttggggcagttattgttgggctcgttggctatggtcttgtattggccacgaaagctatggctccaaataacacctcccatttcgaagcaaataacaatactatcattaacatcggagctggagaggctaacatttctcctgatcgccttcagtcaatcatcgagagtactgtcacaaataagaaggctttggcaaaaggctctgtcaaaactcttgcgccggcaagaaatgatgacaatgcaactatggtaattggaactggtggtggctcagtgacgattcctgctgaaaccatcaaaaaagcacctaccgaagttgttttcacacctcaatcttacgctcaagactaccttgatgttgatgtagaaatacgagcattagatcttgataatccagagaaaggttgggccgctgttatacctggcctggtagatcgaagagtaaatatggttctgggtccaaatgtaaaaccatccgattttacaggtaaatttgcggttagagctgatatcacaataacatatgtgcttagagctaccgataacaagtatcaaccaaaagaagtttttataaaagaaatcataaagtaa

SEQ ID NO: 446531 - DNA, 366 bp, Serratia marcescens
atgaacgatcactcagaatccggtaccaagccggagaatcccgccatccagcagtggggactgaagcgtgatttaacaccgtgttttggcgcacgtctggttcaggagggcaaccatctgcattatctggctgaccgagcagggtttagcggggcgttcactgacgatgttgcaatgcgcctcgaccaggcatttccgctcatgatgaagcaacttgagctgatgctgaccagtggagagctcaaccctaggcacccgcacagcgtcacgctttaccacaacggactcacctgcgaagccaacacactcggctcctgtggctatgtcttcattgctatctatcctgagcagactgagccgcagtaa

SEQ ID NO: 446532 - DNA, 444 bp, Serratia marcescens
atggatacacacaaccctgagttcgctgagcaggcagcaattactgcctcggtggtccctgacgagctacgcatcgacttctggccgcagcactttggctccatcccgcaatggataacccttgcgcccagaatttttgcctggatggaccgcctgtgtatcgattatcacggtggtatctggcgcttttcgacgctcagcaacggcggcgcttttatggctcctgagacagagcaggacgagacttggacattgttcaacagtatgaatggtaacggcgcggaacttactggtgaagctgcagggatagtcgcctgtctgatggtatacagccatcatgcctgccgtaccgaatgtgacgcgatgacagagcactattatcgcttacgcgacttcgcgttaaaccatccagagtgcagtgccattatgtatctaatcgactaa

SEQ ID NO: 446533 - DNA, 876 bp, Serratia marcescens
atgcaaaagttggacggccttaaggcctttgagcaacccctggcttcactgccgcacccgcttcgaaaacttatccttgcacgtcttcgcagtcttacgcagtacgagccggtaatcggtatcatgggtaaaactggagtggggaagtcgtcgctctgtaatgccctgttccagggcgaagtcacaccggtcagcgatgtgaaagcctgcacacgtgatgtgctgcgctttcggctctgcaatggcaatcacagtctgatggttgttgatttacctggtgtgggcgaaagcgagcaacgcgacgaggaatatacagcactgtatcgtcacatcctgccggaactggatttagtgctgtgggttatcaaaaccgatgaccgtgcactgtcagtagatgaatacttctatcgcaaggtgatgctggcgtatcagcagagggttctgttcgtggttaatcaggctgacaaggccgaaccctgccatcagtggaataccaccagcaatacaccatctcatagccaacagtcgacaattgaggccaagcggagcgctgtacagcagctcttcctgccgcaccatccagtctgtgttgtatcggcccgaacgggttgggggctggatgcgatggtagaggcgatgatgcgtaatctgcctgatcgggccaccagcccattgacgacacaactgcatggaaggctctgcacaggttcactaaaaaaggaagcccgcgagcgatttagcaatgccgtagatgaaatgattggcactgtggaatcgtcatcttttctgcctgcgcctgtgaggtccgtgattcgaaccgtgcgggaagcggtggtgactgttgctcgtgctgtatgggactggattttcttctga

SEQ ID NO: 446534 - DNA, 609 bp, Serratia marcescens
  misc_feature (533)..(542): n is a, c, g, or t
atgaagcaagaagcaattgttcaaaaaatttggagtttgtgtaacatactgagaggggatgggattacctattatcagtatgtatctgaactcagttacctactgtttcttaagattgctcaggaaaatagttcagaaaaactgatacctgaaggctatcgatgggccgatttggagtcccatgaagaagaggggttattaggcttctatcaggagatgctcactcatttgggggcgaatgttgaaaatgaagttatcagggcaatttactcatttcctacaacagttttctcccattccgaaaatttaaaagctgttatagatggtatctcaaaaatagagtggcaccaagtaggaaaagatggatttggcgatctctatagtggtttaattgataagagtgctcaggatgttcgctcaggggctggacagtattttactccacgctctttagtcaatacaatagtaagattaatacagccagggcttggtgaactaattcaagatcctgcgacaggaagcggtggtttctnnnnnnnnnnaataccaaggggtagaaatagaaaaaaacactcgtcgaatttgtttgatgaatacttttttacataa

SEQ ID NO: 446535 - DNA, 138 bp, Serratia marcescens
atgggatgggatcggctagtggtggtgactctctggatttgtcgccggcgaaagccaacacagcaaaacttggtgatccaatccgtgaagttcttggaagagatcgtgtttatcctgattatctcgttcagccggtaa

SEQ ID NO: 446536 - DNA, 135 bp, Serratia marcescens
atgctcagcgactggatgatccggaaaccggccgcagcattgctgacaatatcgctgtgcgttggaatggtcgtgagtttaagcgtaatggaaacctggcctttcgaatcggtgtgctgcatggtgcagtactaa

SEQ ID NO: 446537 - DNA, 1119 bp, Serratia marcescens
ttggaagtagggagggccttaaatgaagtaatccaattatcattaagggaaataactaatacacaaaatgaaatcaataacaaaacggtgagaaccatacaggataaagaaagatgctttaaagctttttccatgatcggaatacaccctgagattagatttaatttggaattaaatgttgatagagtttgtaaaataaaggatgcgtacgagcgtcaggaattaaatgaacctagtcatgtctcagttgttcattccctctctagggagttcctttatctcgccaggatgaatcacattagttcaagtgatattgaagaatttttcaatttttatgattttattgacaataaaacaattagcttaggagagggtgttttacactttgattcccctagatatcagattctatcagaacagactaatactgacttattaagaatcggaatagcagtgggttttattgcccctgcaaaaataaaagttcagcgtgacaactctttgaaatgggtaagccatcatgaccttagttctggacaacaatctttacttttaaatgcaatactcatatctattttcgcgaaaaaaaattctttgatttgcattgatgaaccagaaaatagtcttcaccctgagtggcaaataaactatatgaagtttctagactgcttatgtccatcaaatctgcaaagtcatatttttattgcgacacactcgccacaaataatttcaggactacagagcaataatggttgcatagtgtctttgttaaatttaaatcctatgcataaaaataacagaaatcatatttcaacaactggggaaataatttcaacaaattggcaagagttacattcagcatcatcgtatagaagaaaatccgctgctcatcaactagtggatatttttaaaagccctggttttgataatgaggcaataataaataagttattattaattctcactaaacagacaaaaaaaattgagataaattatgaagatgaaaattttattgatggtgttcaaaatttaattagaaatgaaaaaatagatgactgcgatcctgtattggtaatgtacaaacaaattaaagctattgctaatttaaggggattttaa

SEQ ID NO: 446538 - DNA, 249 bp, Serratia marcescens
atgaaaaatgtcctgcgcaaaaccagtgccaaagactttaaccggcgttttccggtggggtcgcggtttcgctactaccccgttgtcggcgtgcctgactgcgaagaagtggtgacgcgctcggtggcctggcacctgcagaacggtaagaccgtggtgcgggtcgagggcaagattggcggcgtttccgtctaccgtctggagcctctggaggccttccatgaagtaccccaagggcagcgtggttaa

SEQ ID NO: 446539 - DNA, 321 bp, Serratia marcescens; identical to SEQ ID NO: 103996

SEQ ID NO: 446540 - DNA, 537 bp, Serratia marcescens
ttgattgaggccgaccccggctataccgcgttggtgctcctgcaggagctgtgcgaccgactgggtctcagcaagcgcggcaccatccatgagctgagcgagagctgcatcaccgcactgagcggcacaggacgtgctgtgcttatcgatgaggccgaaaacctgccgtaccgtgcgctggaggtcatccgccgcattcatgacaaggccggtgtcggcgtcgttctggccggtatgccgcgcttgatcctcaacctgaaaggcaagcgcggcgagtatgcacagctctatagccgcgttggctttgctctcgacttgcaggagaaactgccgcaggcagacctgcagcttatcctcaccaacatggtcgaggaagcgaacagcgacagtgttttttccgccttttacagggcatcaaagggtaatgcgcgccggttgttcaaattggcacgcggcaccatccgcgccagcgaaattaacgccacgccgattgatgaggcaatggttgataaagtcgccggcatgttaattagttaa

SEQ ID NO: 446541 - DNA, 1560 bp, Serratia marcescens
atggcggcggcagacctggccaacgcccgcaagggttcgcgggttggcattagccgcagcagcctgcaggagtgggtttccatttttcaggcgacccagcccggcctggagcgtctggccatgctggcaccagggcagaacaagcgcaaaaagcccgaggatgcatcatggttttacggcatgttctggcctcactacgccaataggaacggccccagcgtacgcgaggcttaccgctctttccgtcgggaatggcacgaggtctaccacgcggagccagccatgcgtaaagcgataccgtcttactacgccgttttgcgccgggttaaccagttgccgctgtgctctcgcgtccagggacgtgtttccggctcggccaagaaggcttacgaggtgtattccaagcgcgactgggcgcagatgccggtcaatggcatctggatcagcgatggtaaatccatggatatgaaggtggcccacccgattcacgggcgaccattcacgccagagctgaccatggttattgatggccggacacgttttgtcgtcggctggagtttatcgctgtcagagaacgcgatgggtgttgcggatgcataccgctttggtatgaagcatttcggtaagccgttatttgtttattcggataatggcggcggtcagaaaaacaaaatgctggacgccgatattaccgggatattcccgcgcctgggtattgagcatatgaccggtataccgggcaacccgcaggcgcgcggcatcatcgaacgcctcaacgccgtcattccggagcgtatcgccaaacggacgatgacctataacgggcgatcggttgacccgaatgccgccaggatacaagggaaaaatctcatcagcctgtcggatgccctgcgcaacggcaacgagctgactacccagcagcagcggacgttccgcgacctgccatcgtggcagtggttgatggatgctgtacaggacgaaattgataactacaacaatcaccatgaacacagtgagttaccaaaggttgacggcactcacatgacaccggcggcctatcgcgccctggtgttgcagcaggaaggcgatgaaatcgaatacatcaccgaaggcgagctgcgcgagatgtttatgccagaagttgagcgcgtagcgcagcgcggatgggtcagtgtcgggaataaccaatatttctccaaagaccttatcgaagtcgatcgccagtcagtgcgcgtgggtatggatattcacgacccggaggcagttattattcgccaaatggatggcacctatgtttgcacggccatttggaatggcaactctcattcccctgttcctcagtctcgcgttgagcaggccaaagagaaacgcgctaaacgcatgattaaacgggccggtaagattattcaagatgccaacgacgagctgcggccagtcttggaagttcaacggaatgactttagcagtctgtttgtggataccgcgccgcgagataacaaaccgctgttcttattagaaacagaacgcgaagaatattttaagaagaccaattcccgctga

SEQ ID NO: 446542 - DNA, 888 bp, Serratia marcescens
atgaactcaattattacagctaaggcattgtcagcaaagaaaaagttcgcaggccgtcaatggttctacgattttagagaactaactcagcgtattgatgaacaaaatgccaaaaaaattgcagatagcctttccattcgatattcaaaactaacaaagttttgggataaggaaaagaattcagaatggatgtgcagaatttatttatcggcaaaaatggtgatgaacgccacaatacagattaactctatggagtttgcaaaagaacgtaatatccgtatcacaactccttatttaacatattattccctcctttcacttcttcgaggaatcgtctacacattgccagaagtagaatgggagaatggaaagcttattgagatatcgcaccacaaagctataaatttggcattcgaccatctttctttatttaataatgacttatctgaagagtttaaaaatatcacgctcacagccaaggcatatcgtgaactaatttcgtatcgttccccaacgtcgggtgactctataattgaatcaataagcatcgaagaaatttccacattgctagctgaggtggctcaatttaattctgaaattttggagtcatctattattaagaaagcagatggcgtttcgtttgagtttcttagtaagtatataaaagagttatctggcattactatcgaaggtatcaatttcttcgatcaagaagatgcttataggctaaactatcttcgccgaaaataccctctacctccaaatattcttcatgtcatgacggaaggacatgtagaggatttttttggggtatggctacctagtgaagaaattgaaggcgcttttgacccagatgaaaataggggggttatttttgatatcccatag

SEQ ID NO: 446543 - DNA, 852 bp, Serratia marcescens
gtgaaaaagcttcctttacctgcggtaaatgatactcagaaaataacgaccacatctcaaagaggcaggcttcatagaacaagttatccgcatttgcgcaatgagttacagagcattttaaatggataccaagactatgacgctaatcatggtaacgcgctgtcagttgcgaacgtcaacattaccaatgatttatcaatagcattgaagaaacactatgcttcaccaccaactgacttaaagttcattgatgatttaagagcatcttcaccaaacgtttgcccaatgtgtggttcattaaaaacaggaacccttgatcacctgtttcctaaagatgactacccttgcttttctgtgtattcaaaaaatttagttccagcttgtgattgcaacagcaaacgaaaaacgaatttaacggatggaaataaaaggatactacatccttattatgacttttttcttaatcaaaggcttttgtcgtgtaacattactcgagaccctcaatttccaatagctaaaattgaaatagcttatgttttgccacagcacttagaaatagacagcattaaataccatacggagaaagttgttctcccatcaggaataattaattggctagaaggcgaatgggatacaacgacacaaaacccaagcttaaaaattcaaacattaccattagccaatattccaactattgaggaattttcgaggtatttgaatgatgcattaaatagatatgatcagtcgtacagcacaccgaacaactggttctcaatctttattcatgggattttaaactctcaaggtgtagtccagttcttatatgctaagcacaacttaatttatccatag

SEQ ID NO: 446544 - DNA, 153 bp, Serratia marcescens
atgatgggttgtcgtgcctttgtctttaatcccgtggctttcgcaatgttctacactttcgtcaaatatatctataaggttaagataactactaccaattttggcaatttgccctgccatatcactttttttacttttgccaacgtgcattaa

SEQ ID NO: 446545 - DNA, 504 bp, Serratia marcescens
atggcatacccgccagagacgcgcgaccggttacgccgggcctatgtattcgacggcctctcactggaggtggcggccgtacagtgcggtgtctcttacgggacggcgcaacgctggaagaacgacagcaaagccgccggcgacgattgggagacgctgcgcggcgcgcgtatgctcgccggcggtggcctggaagaactgaccctggccatgttcaccggcctggtggtgcagttcaaaaccaccatggacaagctggcctatgacgatgtggacattaagcccgaagaccgagtgaagctgctggccagcctgtcggatgcgttcaacaaagccgtggccagcagcaagcgggccatgccggaagtgtcccgcctggccatcgcgctggaagtgatccagctgctggcggcgtacatcaaagacaatcacccccagcagctgcagccgttcggcgacctgctggaggggttcggcaaagagatagagaggatttatggctag

SEQ ID NO: 446546 - DNA, 213 bp, Serratia marcescens
atgatccgcctggcaagcgaccattacgttgcctacagcgcaatcgacgatatgcacattgacagtaatcgccaggtcaaggtgctgttgagtgacggacgcattgcgttggctgaacagagtcacggacagaccgcctgggcgcgcctggcgcagttggtggatgaggtgaatatcgccagcgcgagtgatgcgcctggcacactgcagtaa

SEQ ID NO: 446547 - DNA, 1785 bp, Serratia marcescens
atgagcaaattaagcagcagggattttctcaaagagctggcgatgctcaagcatgtgttgcgtgccgatatccaggcgcacagcaccgggcttgacacctcgccgcaggccatcaacgcgcgccggcgcagggtgctgtccggcgacttcacgttttttgcctatacctatttcccgcatcacatccggggcgagcaatccctgtttcatgcgcatttttgcacgcgcttcccgcagctgctgacgcgccctggcggcgcagtcgaatggtggattgccccgcgtggtgaagccaaatcctcgctgctgaccaaaatcggcccggtctggtgcgccgttcagggactgcatcagcatgacgatgttcgcgcgtcgctcggtttgaccgatgagcggccggccttcatcaactacatcatcttgctcggtgcggagaccaaactgccgaccaagctgctggaggtggtcaaaaccgaactgaccatgaacgcggcgctgatgctggatttcccggaggtctgcggccgcagcggacaatggaagattggcgagttcaccacccgcaccggcgtgaaggtcgaggcgttcggtgccgagcaggctatccgtggtacgttccacggggccagccgtcccaaattgctgctgggcgatgacttgatcaccgatgccgaggccaagtccccgaccgagcgcgaaaaccgctggaactggatttcaaaagcgatcgagtacctggggccgccggacggctcggtaaaatacctgggtgtcggcacagtgcttaacaaagacgaccctatcagccgcgccaagcgcaccattggccatgtggttcaccacttccgcgctatcgtgacgctgcccacccacatggatttgtgggagcagtgccaggagaagatgctcaacgacgacaagcgcgccgaggaacaggcggccgagctgggccttgatcttccccaggacaagctgccgtcttacaagttctacctggcgcaccaggtacagatggatgatggcgcggtcaccagctggccggcggtgcgtaccctctactggttgatgcgccagcgcgccaagaacggcaaggcatttgccaccgaaatgcagggcgacccgcgcacggacgaagaccggacgtttatcaacatccagttctttacccagcgctggcgcgactggctgattttcggtgcctgtgacccctctatgggccagggtgagaccagcgacccctcggcaattcttgtgggcggctgggacaagcagcgcagccggctgcatgtgatggaggcggagatcaagcgccgtgtaccgtccaaactggaagccgacctgatagcgatgcagcggcaattcaggtgcctggctatcggctttgagaacaacaacgcctacgagcactcgcgctcgacgttcatcaaaaatgcgctgcgccagagcgtggcgctgccgttggtgggtgtgacggccaaagtgccgctggaagtgcgcgtcgaagggctggagccgtacatcaacgaccagctcaacccctctattttgttcaatccaggtctgacgctgttgctgtcggagctggaaacctggccagagccgcagaccggtcaccactatgacgggctgtcggcactgcagttactttggatgattgctgtcagccgtggtgcgggttcgttcgcctgggagccgataccgcgccgcgaggcgtcccggtacagcggcgatcattttcttgatgatgacgacgagccggactacggcggtcgcggtttatggtga

SEQ ID NO: 446548 - DNA, 1521 bp, Serratia marcescens
atggtgataaaaatggttcaaattgtcgatatcaacgggaaaccgatccgccgcgaggtgctgcgcgagccgcaatcctcacatgtggctgcactggccggcctgtatgccgagcaccccagccagcggttgacgccccaacgcctggagcaaattctcaacgaggccgagctgggcaacctgcaggcccaggccgacctgttcaccgatatggaagaacgggacgcccatttgtttgccgagatgcaaaagcgcaagcgcgcgttgctgaccattccgcacgaaattacgccgccgcccaatgccacaccggcagagcaagcggatgcggcctggctggcggagtacatcaccgagcaagacggctgggaggatttgatcatcgatatgctggacgccatcggccaggggttcagcaacatcgagatcgaatggcaacaactcggccgcgagtggttcccgaaggcgtttaaccaccggccggcgtcctggttcgaactggcgcgggacaatcaggatcaactgctgctgcgaaccgatgacggcatgggcgcgccgctgcagccgttcggctggatacagcaccgccacaagtcgcgcagcggctatgttgcgcgtgcggggctgctgcgtaccctgtcctggccgtatgtgtgccgcaatttcggcactcagagcctggctgagctgctggaaatttacggtatcccgctgcgtattggtaaatacccggagggcatcggcaagaaagagaaaaacgagctgatgcgggccgtcaccgaactgggacgctatgccggcggtattatccccaaggaaatggaaatcaccctgcatcaagcctctaacagctcgcatgagccgtttatggcgttggctgattgggcggaaaagtccatgtccaaggccattctgggcggtacgctgaccacgcaggccgacggcaagacctccaccaatgccctgggcgtgatccacaacgaagtgcgtcacgacctgctttcatctgacagccgccagttggccatgacgttgcgcagcgatctgttctggccgctgctggtgctcaaccgccgtgcgaacgccgaccctcgccgcacgccgcgcatcaagttcaaggtgccagaaccccaggcccccgaagccaccggcgcaagtcgcaccgtgcaggttaatttgggcgcaccggcagcgccgacgccggcacgcagttataattcccaggtcattgccgcgttagtggccgcgttgacccgcaaacccggtgcggatgacacgcaaacagggattgatgaggcattaacggcactgttaagcggcaataagcctgctgaggggctgattgccatgttgcagccggctatcgctgcgttgtccggggaactggacgaacaaagcctgttgggtgcgctggctgatgcgttccctcagctcgatccgaccttactgcaggctaacctcggtgatacgcagaccatcgcgcgcctgattggcctgtatgcccagcaggaggggcagtaa

SEQ ID NO: 446549 - DNA, 1236 bp, Serratia marcescens
atgccaatatcaaaggcagaaatcagcgcgctgttcggcatgaagccggaagccgcgctgcgttacctcgaaaacaagggattgcgcatccgaactgatgccgacgccatgcaggcggtggatcatgcgcacgcattcggctttgccaatctggcgcgcctggatattgcccaggatttggtgaacgggttgcgcgaaggcctggccgccggccagacgccggaatggttcgtcaagaatctggagccggtactgcgcaaaaagggttggtggggcagcgaggaacatatcgacgccgataccggcgaaatcaccacccgccagctcggcaatccggcccggctcaataccatctaccgcaccaacacccaggcggcctatatgtcggcgcgccatgaatccatgctggccaacgccgaataccgcccctactggcggtatgtggcggtgatggatgcgaagacccgccccagccatgcccgactgcataaccgcgtctttcattatctcgatccgatttggcagtacatcttcccgccgaacggctttaactgccgctgccgcgcagaagcgctgaccgagcaagaagtaaaacaaaggggctatgtgatttcgcgcaccgacagtgaagttgtccagcaggtgatgaccggcgaggacgagaacgggcgtccaaccttcaccccggtgaacggtgtgcggttcagtggcccggatggccaggcggtgaccttcttccctgacgtgggctttgatatcaaccccggcaaagaagtgtggaaagccaacctggacaagtacgatgtagagctgtcgcgcccctatgtcagcgcgggattggctggccctgagttgactcacatgcttagcgatgtaacccagggcaaccgcaccggcgagattctggccgctggcgtgctggatgccagcgaggtggcgacgctgggcaccaccggccgtaccgcctggctggcagagcaccagcttgccgcccaggccggtgccggcacgctaccgactcagcagcaatgggcaggcgttcagacggttatcgagtcatccaccgtcgcggtgcgtgccggcgagctgctgcacctgttccgtcagctcgatgaggggcaatggtggctggcgacgctggacgcgggcctggtggtcaacacctttgcgcctgtgcaggcgtcaaccctcgatgccacaatccgccgtggcacggtcttgaaggatgcacgctga

SEQ ID NO: 446550 - DNA, 582 bp, Serratia marcescens
atggccaatatcaaagtcaccgtcgatgacaaggcggtaagccaacgtctgcagcagctgctgcaggtggtcgagaagccccgaccgctgatgctgcgtgttgccgaaacgctccatgcccaaagcatggagatgttcgagcagcagggttttccggccaacagctggccctcactcaagcccagcaccatccgctcacgttcccgcgccggccactggccagggaaaatcctgcaggtgaccggccgcctggcggcatcggtcacgccggcatccggtgacgatttcgcgcagattggctctaacctggtgtacgccgccattcagcacctcggcggcaccatcaagcgccagggccaggtgcggctgcgcaccgaccgccagggcaatctgatgaagcgcggcaacctggcgacgttcgccaggcgcagccataagcaagccgtcgcgcgcgccgtcaattacagcatcgtgatccgcccgcgtccgttcctgccggtgacggataatcagcagctcaacaagccgacctttgaggcggtgatgggcgtgctgaatgatgcctttatgaagtcccgctaa

SEQ ID NO: 446551 - DNA, 1137 bp, Serratia marcescens
atgaaacgaaacgttgctgtcgcatccctggcctttgagctgaacctgaccggaaacacgatccagttgttcccggccggcgagttccgcgcaaatgatggccgccccgcagaatgtgccaactgggtactcaacgagagcctggcgcgccaggtcatcgagcacctgtcgtcacgccaaaacaaaatcgtcatcgactacgaacaccagaccctgcggactgaaagcaacggtcaaccggcccctgctgccggttggtggaaaggcagcgataccgtttggacggatgcgggcatgtttgcccaaaacgtccaatggacggaagccgcccgcaaaatgattgccggcgatgaatacctctatatcagccccgtctttgcctatgacaagaaaaccggtgcagtgctgcaattgttacatgcagcgctcaccaacaaccccgccctggacggcatgaatgaagtcgccctggcggccgcctctcgtctcatcgtgcaggcatcaactcaaccctccccggagaagaccatgaacgaagagctgttaaagctgctgcgcaagctgcttggccttgccgatgatgcaaccgaggccgatatcctggccgcgctgcagcaggcggccggcgatatgccgaaagaaaatgaaggtgatgcggctgccgcgagcctcagtaagttgctggaaatgtttaccgccctgacggcatcggttaaaggcaaggacgacaaaatcgccgcgctgacggtcgccgctacagccaacaaaggcactggggttgatccgaccaagtatgtgccgattgcggttgtcaccgacctgacgacccagttagccgcgctgaccgcgcgcgttgatggtggcgacttggacggtctgatcaccgaggcgctgtcctccgggaagctgctgccgaccatggaagaatgggcgcgcgagatgggcaagaaagacattgccgctctgcgcagctacatcaaggcggctgcgccgatcgcggcgctgaccactcagcaatccggtggtaaaaagcctgccggtgaaactcacgggttaaccgcaactgagcttgaagttgctgcgttgactggcctcacaccggctgaatacgccgccgccaagaaggaaatgcaataa

SEQ ID NO: 446552 - DNA, 927 bp, Serratia marcescens
atggctatcgtcactcctgcgctggtgaaatcgctttttgtcagctttaacaaggcattccaggacggcttaaaggtcgccgattctgactacaccaaaatcgccacggtcatcaaatcgaccacggcaaccaacatttacgcctggttggggcaattcccgcagatgcgtgaatgggtcggcgctcgcatcatcaaggatatgaaaaccgacggttacggcatcaccaacaagctgtatgaagccaccgtgggggtgcctcgcacggcgattgaagatgacagcgttggcgtctatctgcctgtgatgaccgaagccggccggtcagcgggggtttacccggatgagcatatctttgcgctgctcaaggccggtgagacctcactctgttacgacggccagaacttctttgataccgagcaccccgttgcggcgaacgtggacggcaccggcacgatcaccccggtcagcaacctgctgaaaccggcaggcactgacccggccagcccggccccgtggtatctgatgtgtaccaagcgcgcgttgaagccgctgattttccaggaacgcatcaagcccgatctcaaggctaaaaccagtgacgacaccagcgatcatgtcttcatgaacgatgagttcctgtatggcgtgcgtgcgcggtcggcggtgggcttcggtttctggcagttctgcgtcaagtccaccaagccgttgacggcggagaactaccaggaagcctatacgctgctgcgcaacatggtggcggatggcggtcgcccgctgaacatcaaaggcgatctgctcgttgttccgccgacccttgcggaagcggcgcgcaagattgttggtgtggccaccatcaacggcggcgaagacaacccgaactacaagctgtccgacatcctggacaccgcctggctgatttaa

SEQ ID NO: 446553 - DNA, 525 bp, Serratia marcescens
atggctaccccaacccaaaagaaagcggaagaaaaatacgtcaaggacgataaaaagccaggcgatggcaccgagaccgatgcgggttccgctgcaggtgatggcaccgagaccggcacgggttccgctgcaggcgatggcaccgagaccggcgcaggttccgctgttggtgacggcaccgagaccggcacgggttccgctgcaggcgatagcaccgagaccggcgcgggttccgctgtaggtgacggcaccgagaccggcacgggttccgctgcaggcaatagcaccgagaccggcgcgggttccgctgtaggtgatgacaccgaaaccggcaccgatgcgaaaccccattggttcaccgtccaggtggtgcgctcaccgagcgggcggcgtttccgtgctggtgttgagttcacctccgagccaaaaccttacgatttctcgctgtttagtgctgagcagctcaaagcactggctgcagatccgttcttgcgcataaagcggattgcgccggctgaggagtaa

SEQ ID NO: 446554 - DNA, 423 bp, Serratia marcescens; identical to SEQ ID NO: 423476

SEQ ID NO: 446555 - DNA, 468 bp, Serratia marcescens
gtggtaaccgactatctcttttgcgagccgttgttgattggccggctgcgtgatgctgtaccggagtttgttgaggtgaccggcgtcgccgggctgtctcagatgaacgatgacaacccggtttgtccgatggcgtatgtgatgtacctgggcgataccgtcaacacttcgacggccgccaccggtggcagccagcgccggctgcagttcgtgacgcagctctgggccgtggtggtctgcgtgtatttcgccgacggtcgcggcctcggcgctgatatcagcagcgaagccggcccgctgatgttgaaaaccgtcaaggccttggccggatggtcaccgctcgaaggggttacccggcagctggccaggagcaatcagagcctgccggcacagtacgagtccggctatggctattaccctctggtgtttcaggtggacgttcccgccgcgattggaggctatcaatga

SEQ ID NO: 446556 - DNA, 198 bp, Serratia marcescens
atgagcaggcgaattgtactgaccggcccgcacacccatcagggcgtggcgcttgctgccggcaccgagattgaagtggacgacgcaacggcgcagtggctgattgagcacgccggcgcgaaaaaagcgggcatgaaccgcaaaaccaaaaccgagaccggctccgccgactcaccgaccgaggaacaggaacaatga

SEQ ID NO: 446557 - DNA, 747 bp, Serratia marcescens
atgaccccagaaacttactactacggccagggcaaggtgttcctcggccgtcgcaatgcgcagggccaggcggtatcgctgcgctggattggtgacgtgggcgagctgcagattgcgctcaccacggactctttcacccacaaagagtcctatacgggccagcgtgcgcccgtgcgccgcatcagcaccggcaaggatggtacggtcaccgccacctggtatgagcattcgccggacaacctggccattctgctgtacggcgagaaagtggcagtcccggccggcaccatcaccggcgaagcgctgccggcaggcatccaggccggcgaacgtgtcacgctgaaccatcagaacgtcagtgccgtgacgattgccgatctggtcgaggggacggattacaagctcgatgccaagtttggcgcgctggagttcctgaccacgccagcgacacagccgcttagcgtcaactatacgcacgccagcagcgttaacacctcggtattcacccaaacgccagatgaattgttcctgcgctacgaggggatcaacctggcagagaacggcgcggccgtcgtcgttgagctgtatcgcgtgcaatacgacccggcgtcggcgttgagcctcatcaataccgacacctcgttgccagggctggaaaccaccgcgaccgtcctgttggacactgaacggccggatgacgcccagtttggccgttatgggcgcgtgatccacgtcgggagcgtctga

SEQ ID NO: 446558 - DNA, 519 bp, Serratia marcescens
atgacaccggcggcctatcgcgccctggtgttgcagcaggaaggcgatgaaatcgaatacatcaccgaaggcgagctgcgcgagatgtttatgccagaagttgagcgcgtagcgcagcgcggatgggtcagtgtcgggaataaccaatatttctccaaagaccttatcgaagtcgatcgccagtcagtgcgcgtgggtatggatattcacgacccggaggcagttattattcgccaaatggatggcacctatgtttgcacggccatttggaatggcaactctcattcccctgttcctcagtctcgcgttgagcaggccaaagagaaacgcgctaaacgcatgattaaacgggccggtaagattattcaagatgccaacgacgagctgcggccagtcttggaagttcaacggaatgactttagcagtctgtttgtggataccgcgccgcgagataacaaaccgctgttcttattagaaacagaacgcgaagaatattttaagaagaccaattcccgctga

SEQ ID NO: 446559 - DNA, 306 bp, Serratia marcescens
atgcaggcaggagtcggtctacttgtcgcggacgtgatgcctatatacatgatcatgcctagatattctcataactatgcgcttttctatcaattgctcgacagtaatttgttcacccaccgtaatacttatgctatcttgagagaagccactagtgaaacctatggcccccgggtctatctcttatcatatttgctttcaatctacttttatttgcatctttcattttccaatctatatcataaaaataccaaaaatatttatcttattatctctatcagatctcacttttgcaagtggccgtga

SEQ ID NO: 446560 - DNA, 147 bp, Serratia marcescens
atgaactataatatgcaagggatgacgaaaacgattcccgagctcttcgtgatgttgaaatcgacgaaggtagaaatcaagaaagagcatcaagtgttgatggttaacaagaccactagtttcaagaaaagggacaaaggaaaataa

SEQ ID NO: 446561 - DNA, 2277 bp, Serratia marcescens
atgggcatattggttaaacaacgaggtggtcaggaacaagacgttaatcccttgccgcgccagcgccgccgccaacgcctcggcttccgtcaacacttccggcgcaatgatcgccagactggcgccattcaacagggctccccacatttccagcgtgctggcgtcaaacgccggattggcggcgaaagcgaagcgatcgccgcgttcaaacgacgcaaaacgattgttgatcgccagccggaggatgccttggtgcgtcaccatgacgcctttaggcgtaccggtcgagcccgaggtatacatgatgtaggccggcgcgccgccggcgcgaggcaccgccggatcgtgggtcggattctgccgcagccgatcgatacgcaggcaggcgatctcgccggctatctcgcggtcgatatcgcgatcgcacaggatcaacgacgccccgctgtcgccgatgatccacgcctgccgcgctacgggcaggtgcggatcgagcggcacataagcgccccccgccttgaggatcgccagttgggcgatgaccagagaaacgctgcgttcaagcgacgtggccacgcgatcgcccgggcgcacgccctgcgcgatgagttggtgcgccagttggttggcgtgggcgttcaattgggcgtagctcaggctgtcccgatcgttcaccaccgcaacggcgtccggcgtacgctgcacccactgttcaaacaggacgtgggcactgctctgcgccggataaacttccgcggttcggttccagccgtacaacaacagttcgcgctcggcagccggcagcagatcgagatgcgacgcaggctgcgtagcatttgtcgccatcgcccgcagcacctgcaccaggtaaacgccgtaacgttcggcggtagcgcggtcgaacagcgccgtggcgaagttcagcgtcccgctgatttgctcgtcgcgctccgccagatcgagcgtcaaatcatacttggcgatctgatagcccaactcggcactctcggcctgcagcccaggcagcgagatatcgcgcaccgagccgtcctgccaggccaacatcacctggaacagcggggtataacccaggtggcgcggcggattgaccagctccaccacctgctcgaacggcagatcgcgattttcccgagccgccagcaccgcgtggcggatccgcgcgatcagcgtcggcagatccggatcgtcgcgaagatcgatgcgcagcgccagcgtgctgacgaagaagccgaccagcgattcggtttccagccggccacggttggcctccggcgtaccgatcaccagctcctgctgcctggccatgcgcgccagcaccaggctccaggccgccagcaccgtcatgaacaacgtgccgccatgctgccggctgaactgccgcagcgcctgcgtcagctcggcgtcgatcgcgatcggcacctccccgccgctgaaagactgcaccgtcggacgcggccggtcggtcggcagcgtcagcagcgccggcgcatcgctcagcgtttcgcgccagtattgcgcctgcgccgccagccgctccggcgtcagatagcgacgctgccaggcggcgtaatctgcgtattgcagcggcagcggcggcagcggatcggcatcgccgcgacgcaaagcgccgtacaacgcccccagttcacgcagcagaatgccggtcgaccaaccgtcggaaatgatgtgatgacaggtgagcaggaacagatgctcctcatccgccaggcggatcagcgcggcgcgcaccagcggcccctgcgtcaaatcgaaaggcgcctccgtcaggcgctgcgccagttgccgcgcctggctctgagcatcctgccgcccacgcagatcgtgcaccgtcaacggcagcgcgtctgccggcagaatgtgcgcctgcggctgcccctcgacggtgacaaaccggctgcgcaacgcttcgtggcgggcatagagcgcatccaggctctgccgccaggcgggcagatccagctcgccgcgcaggctcagcgccaggggaatatggtaagtttcactcaggccttccaactgcgtcaggaaccacaaacgctgctgagcaaacgacagcggcaacgcggcgccacgtggcatagcctcgatcggcggcagcgcctcatcggttctccgcagttgctgcgccaatgccagcagcgtcgggttggcgaacaggacctgcaacggcagctgccattccatctgctgcagacggttggtcagacgtaccgccagcagcgagtgccctcctag

SEQ ID NO: 446562 - DNA, 1431 bp, Serratia marcescens
  misc_feature (1419)..(1428): n is a, c, g, or t
atggctaacacaaatttctctcaaacggctgctttcatctgggcggttgccgatctgcttcgcggtgattttaaacaatcccagtacgggcgggtgatcctgccgtttacactgttgcgtcgccttgagtgtgtgctggcgggcaccaaagaagcggtgctggcagaggcggagaaactgaaggccagccctctaccggaagaagggcgagagaagtttctgttgcgtgcgaccaaagggctgtctttcttcaacacgtcgccgatggatctcggcaagatggggcagaacgacatcaaggccaacctagagaactacgtgcagtcgttctcgaaggatgcacgtgaaatctttgaacactttaaattcagtgagtttgttggcctgctggaagatgccaacttgctttacaaagtcgttaagaaatttgccaccaccgacctgagccctaaagcgatttctaaccatgatatgggcttggtgtttgaggagttaatccgtcgttttgcggagagctctaacgagacggcaggggagcactttaccccacgcgatatcgtgcgtttaaccacctcgttggtattcatggaagatgatgaggcactctctaaagagggcattatccgcaccatttacgaccctaccgccggcacggggggcttcctctcatcgggtatggaatacgtgcacgaactgaatcccaaagccgtgatgcgtgcctttggccaggaactgaaccccgagtcctacgctatctgtaaagccgacatgctgatcaaaggccaggatgtcagccgtatcaagttgggcaatacgctttctaacgatcagcttccgcaggagcagttcgactatatgctttcaaatccccccttcggcgtggattggaaaaagattgaaggtgagattaacgacgaacatcagcagaaaggttttaacgggcgttttggcccaggcctaccgcgtgtctctgatggttcgctgctgtttctgatgcacctgatcagcaaaatgcgcgacagtcataatgtggatggtagcgtaaacaatggtgggcgtatcgggatcatcctcaacggttcaccgctatttaccggcggggcaggcagtggtgagagtgagattcgccgctatattctggaagccgatttgctagaaggtatcgtcgcattgcctaccgatatgttctacaacaccggcattgcgacctacgtctggattttgtcgaacaagaaagcgcgggcgcgtaaaggtaaagtgcagctgattgatggcactaatctgtgcggcaagatgcgaaaatcgctgggttctaaacgtaatctgatgggcgaggacgatatcaagcttatcacccgtacctttggtgattttgaggcggtggatgccaccccgcttgaagaacttgggatggaaaannnnnnnnnntaa

SEQ ID NO: 446563 - DNA, 945 bp, Serratia marcescens
  misc_feature (35)..(44): n is a, c, g, or t
atgccaccccgcttgaagaacttgggatggaaaannnnnnnnnntaaaaccgaagggccgaaaaccttcgccagcaaaatctttaacagcaccgattttggttatcgtcgcctgaccattgagcgccctttgcgcttatctgcacaggtcaccgatgaagcgattgccacgctgcgctttgcaccgaagccgtttaacgctcccatggagcgtttgtacgaagagttttcggcacagtggcatgacggaaactatggcgatttctccgatatcgaagcagaagcccgaacgattatcaaagcagaatttgccgagctgaaggagaagcagattaaagatctgctcgacagcaagctgtggctggcacagcttgcattgatggctaaagctcagcaaattcaggcagcattaggcgctcaggccggtggaaaaacgctggtgagcaacgatttcaatcagttccagctgaccctgaaaggggcaatcaaaacggctggtgtgaagctggatgccaaagagaacaaacagtttatcgatgcgattaccactaagaacccggatgctgagccagtggtaaaaaaggttctgaaagaggctgtccagccgctgtacggcgcatttgagtacaaaggcaaagtggtggagtttgagcaggacggcgagctgcgtgataacgagaacgtaccgttaaatcccgccgtttccaccagtgaactgattgagagctacttcacagcagaagtgttgccgcacgtggccgatgcctggattaatgccgataagcgtgacgcgaaagacggtgaaattggcattgtcggttatgaaattccgtttaaccgccatttctacgtttatcaaccgccacgtccgctggaagaaattgatgccgatctcgacgccgttagtgccgagattatgaagctgttgcaggaggtccattcctga

SEQ ID NO: 446564 - DNA, 309 bp, Serratia marcescens
gtggtcaaggatctgctgaccaacatggccggcggcatgctgtcgggcgccaaccacagcgggcacgccgagggcacgacgaaggccggggttagcgaaggtacgctgatagtccgcgacaccggcaaacagcagcaggatgtggcgcagctgaactgggataccgagcatgccaacgacggcagcatcagcacgatattcaacaaggagaaggagcagaaccggctcaaacaggcgcagttgattggggagattggcggccaggcgatggatgtcattcccgcacgcagggagatatcgccgggctga

SEQ ID NO: 446565 - DNA, 513 bp, Serratia marcescens
atgaagctaacaaacgcaaacgaatgggcttctctcacaaaagaacaagcgtcattaataagaaagcatcagcttcaatttccaattgcagttggggctatagcaagagagttaggaattgttgtcaaaagatctactttagccgcagggatatctggcgaaataaaagaagaaaatggtagtgtggtaattagagtaaataggcatgatgttaaagaacgccagcgttttacacttgcacatgaaatagctcattttttacttcaccgagatcgtattggagatggtattactgatgatgtattatatcgttctaaactatctgatttcatggaagttcaagcaaatcgtttagctgcagacatacttatgccaggtcatctgattcaaaaaaaactggatgagtttacagaatctacaaagcttagagatgaagaaaaatatgaaaagctagctgaggctgcagaactatctacctgtctcttatacacatctccgagcccacgagactaa

SEQ ID NO: 446566 - DNA, 2277 bp, Serratia marcescens; identical to SEQ ID NO: 446561

SEQ ID NO: 446567 - DNA, 825 bp, Serratia marcescens
atgagttctcaactattagagaattcgctaaacaaaataagtaaaaccatctcaaataggaaatggatagcatattttgataacgaatatttatctggaaacaagaagtttctgcttaccggttcttaccctagagaagtgtttaatcaattggctgaattaagaaaaccaaatgatggatataaaaactggtacgaatttttaaaagaaattccagaagctataccaacagttttccttgatgatttatcacaacttgaaagtcagataacgcagctgtttaacctaataagaaaaacaaaagaaattattccatttgcaagagttgccatatcaggcacctcgtttccgtttaatttcgcaggttaccataaaggtgagaactcaatttatgaaaggctattatttaataaactaaagaactctattaatttttatcctattatatactctgatcgtggaagtgctcgaattgaaaaacaatcaggaggaggaaatcttccaccacctaggatagattatgcattaaagaacgattggcgttttattcgacgtgagttccgagatcctaaataccctgaggatggtgaaaaagaacatctttattttctttgtgccaatgagatcatgcagcaagactattggtctaagagcttacatttgtggggaactcagatgattgagttgacatcaaaaaaagaaaaattcgggataaatactccgcaaaaggcaacagcagttcgaataaaccttcacctatatactcaattacattatgactatgttcttgaggaaattgatactgatgaagattgggaagattga

SEQ ID NO: 446568 - DNA, 939 bp, Serratia marcescens
atgatgcggatctcattggttgttcctgtttttaatgaagaagcgacgataaacgaattctatcgggcggtcagggaatttacgccgctacacgactacgacgttgaaatcatttttgttaacgacggcagcagagatagcacggcagcgatcgtcgccacgctggcgaaaaacgatcgtctggtatccaaaatcaactttacacgcaacttcggtaaagaagcggcgctgttcgctggcctggagcacgcgtccggagatgttgtgatccccatcgacgtcgatctgcaagatccgatcgaagtcattcctctgttgctgcaacgttgggaaaaaggcgcagacatcgtgctggcgaaaaggcgtacccgcaaccgcgacggtcttttcaaacgcactatggcggaatggttctatttcttgcacaacaaaataagtaaaccgcggatcgaagaaaacgtgggcgacttccggctgctctcgcgccgcaccgtcgaaaacatccaaaagatgccggaacgcaaccttttcatgaaagggatcctctcctgggtgggcggtaaaactgatatcgtcgagtacgacagggcgccacgcagcgccggcacctcaaaattcaacggttggcgcctgtggaacctggcgcttgaaggcatcaccagcttctctaccgtgccgctgagggtatggtcttacatcggtttatccgtcgcaacgctgtcctttttgtatggcgcttatatgattatcgacaagcttatctgggacaacccggtaaaaggctacccttcattgctggtttccatcctctttctcggaggcgtgcaactaatcggcatcggcgtcctcggtgaatatatcggccggatctacatcgaaagcaaagggcggccccggtatattattgaagatgagccggatgataaggataagcaataa

SEQ ID NO: 446569 - DNA, 1482 bp, Serratia marcescens
atggatcaaatgacgcggaactatttattgctggccagctttttttgtttgttctataccttcccgctccttatttccgatggctattatatcgatgatctcggccgttccattcacggtttcgctcactggaccgctaacggccgccccgccgccgatatgataatgattctgttaaacgccggtatgccgctgaccgatacatcccctttaccccaattgatggcggtgatggtattcatcgttgtcggccggcatgtcggaaaaactttttttgatggcaacacgctgcttagcgcgttggcggcattgtcgttaatcgccagcccctacctgctggaaaatttgtcctatcgatttgacgcgttaaccatgagcctgagtatcgccctagcgatattctcagccacgttacaaacccgatacgccgccgccattgagatctcatttaaaaccgcgttgcttatattggtgctttcgctctaccaggcatcaatcaacatttatctcgcatttacagtgatcttgcttgttcatcaagccagagaaaatctggcgccaaaagtcatcttcagcaccctgctaaaatccttagcggcgctcgccctcggcgttttaatctattccaagctcatcgtgcgaaaaaccatctccggcagttacagcattgagcacagcgaagctacctttgacatacacaccttattcgccaactttacggcctataacgctcaagcgctgggcctgttcaaaaacgccggcttcttgtatctgtttgcactgtatttggcgctgatcgtcatcttggtaggcatcatcgccgtgcgttacctgaaaaacaacggcgcgggcatcgccacgctcgccatcgccggcgccatcctggcgtcgccgccgttgcttctgctcagcacctcgggcgttttgctgtttctcaaaatgccggttctttcaccacgcgtcttggtggggtttgtctccgtcatctttttcattctctacggcgtagcgagcctgttcgccaaacggtatcgttctgcggcgccgctgctggtgttgccgctgtttatgttgcttaccagtctggcctacagctattcagcggcgttgcagaaacagcgcgatctggaaacctacctcgcccggcgcatctctgaagatttatatacgctgaaatatgacgtcaaacgcgacaaagtgatcatcacgggcaaagccccctatgccgtggtcaccgctcattccatcgaaaaatttcccattctcgaagccttgattcaacggaacctgatacgttggatatggagttacacggcgcttgaacataacgtatttttgcagggaaccaaaatgccgccgcaacaagatttcaatctcgccctggcaggagtgacgcaggaaaatcaggttttggatcgggatatgtattcaatcaacgaggtcggcatttacaaagtcatttcgttgaaagagaaccgttga

SEQ ID NO: 446570 - DNA, 849 bp, Serratia marcescens
atgttgcaacaacttgtaaggcatctttataagcatgtcccggatacgctatatcataagatgaaatacgttattaattttaaacggctcccccatctttccaatccggttttttataatgaaaaaataatgaggcgaaagatttatccaagaaggatatacacgactttatcggataaatataaagtaagggaatttatcgccggactttggggtgagcattatctggttgacctgtatgcgcagggtactgaactgacctacgaaatgtaccagcgcttgccggacgctttcgtgcttaaggcgaatcacggctgcggatttaataagctggttttcgacaaacgccaggccagttacggcgagctttacgatctttcttcgggttggttgaacacgaatttttatgatcaggaacgagaaaaacactatcaggatattgagccgagaatattggctgagcggcttttgctggataatggcgatgtgcctaaagatttcaagttccactgcttcaaccgtgagggcgaggtatgcattttcattcaggtggactatcagcgttttggtgcccaccggcgtgacgtatttgacgctgattggaatagaacgaatattcgcattgatatcgaaaacagcgagataccggcgccgcggccagaatgttttgacgaaatgattcatttggcgaagctcaccgcgaagcaattttcctacatcagggtagatttttatcaagtggaagggcgggtgtatttcggcgagctgacttttaccccgggcgccggcctttgccatctcatgccactcagtgccgaaaaggaatggggaagttactttaaagattga

SEQ ID NO: 446571 - DNA, 1251 bp, Serratia marcescens
atgcttgaacgcctttctctcagcgtttcgggcattttcgtgtctatctatgtggcgcgttatctggggcctggccagttcggcgtcctgaattatctgttggcgaccattgcagtgttggtgccgctggctcagctcggcgccgacagcgtcattttcaatcgcattgcgcgccagccagccagcgggatgcacctgatgatggcctccatacggctcaggcggcgcgtgtttttgttgggtgcgttgcctgtgttggcatggcacgtgttctctcacaataataccgacgttttgatcctgttgctgatgctggcaagcgcctatttttcagtacaggacgtctacaaaatttattacgacgccaccttaaaatcgaaacgcaatacgctgataaacaactcggttttgcttttgtccatcgcattgcgcctgatgttggttcatgccgagctcagtctggcgtggttcgcgattccttacgttgtcagcagtgcgataccttatttcctgcgccgttggatgttccaccgtgaggtgcgcgggcgattggcgccggtcaaggggcggaagcgacaacgttatgagcgtcatttgttcagcgttggtttgccgctggcggtgtcgagtttgtcgattgtcatttatacgcgcatcgatcagatcatgttaggtggcatgcttggcgagcaggcggtcggttggtatagcgcggcgctgactctggcgcaggggtggtcttttgtgccgatggcgatgatcacctcgcttatgtcgggcattgctggctcgcgtcaagcggcggaacaggaatatcggatccgactgctttatgtcatcgtgatggcgctctctctaccggctctgttggtgtttatctattttccgtcgcagattataaacgtactgtacggcgatgaatatttgcccgctgccggcgtgttggccgtgtgctcattcacctctttggtgtccgtattgggcaccgtttcgtacagaagcatcgtcttgttttcaggataccgcttcatcgccatgaaaatgccgatggtggcggtgataaatatcctgctgaacctcctgttgattccccgctatgggttgatgggcgcggctgtttcaacgctatcggcggagttcatgtcggtctttgttctgaattattttttccaaaaaggcaagattacgcgcctgcagttaacggcgtttagctgcgtgcctgttttcatccgcagactcaagacaaaataa

SEQ ID NO: 446572 - DNA, 915 bp, Serratia marcescens
ttgaactttgagaaaaaaataaggattaggaatcttgacgtattaaatctctccgggcagaaatttcgcatgcgctggaaagagtctcagattctgtcactgcttatcgcgagatcgccagaattggttacacgaacggaaattatagaaaatatatggaaaggaacttactgctcagattcaactataaatcaaacaattaagtctatcaggcaaaaaattggcgatgtcgatcacaccattatcagaactattcccaggctcggttataaagttgaaaataaaagtattttccagtttacagaagacaccgaagaactaaataacgatgaaacctggaataatacatcgatagagaatgaatctcttcaagcggaatattctgaaaatacggaggagatcgaggaatcggataatgataaaatggctaaaagcgatgaggaaattaacgcagaagcagagcatgtcgcttcgtatctgatggcgaagaataaaacaaggaaaagacatttttctccacgtcgccgcgcttttgcgctcagcatgccgtcgcgcacgcttaaggttgcgatctgtctgttgatttctttatcgatactggctatttcgttgttctcttatatgttaggcaaccaggcaagactcatagcgaccaatgatatcaggaatgatacccgcgtggttctaacgctggtgttgaatgagcctggtgtaaacaacggaaaagtaatgatttgcgtgtatcagggcagcaaccacgatacggcgaaaatggagtgtgccgacgttaataatccgcaatttaagaaatcagtgagcggcgttccgctttctttatccgtaggccgggcggacgtgcttgatgcgaaatataggaaccttaaatatcaagtttattatgatgttggggattga

SEQ ID NO: 446573 - DNA, 2244 bp, Serratia marcescens
atggtaagtaagccagattatgaaaatgcaattaaacgtgcaggttttattcctgttaattcttttgaaggtggattcaccttaacgtcgtcggaacaagcgctctattcaagcgtaacaagagaatattttatttggaagggggcgcttccaaaagccgtagcggtcggcagttcgccggaaacatccggcggatttggccctgcagcgtgggcaaatgtgagttattctgcgcttggttcaacatcgggtgctgcccttgtagggcatggtcaaacaacattggataagattatttcagttgacgttcgtcaattcggtgcaaaaactatttctgaagattctatttttgattctcaacccgcatttcaggcggccattgattacgttaaatcaaaagggggcgggattgtaaaatttagcggagcgtatttaataaaaaacgccccgtatagctatacgttaccatttgatgacggcacagtatcaccaaacttcattaaggctggcgtagatgataacatcccagcagaacctcaactagccatgtcggtttgtttagagattccgagcaatgtacaactggttggcgacggtattaaaaacagctcgctgaattttggatgggataggaataacggtgtcattgactgtcatcaaaatatcggcattgtgtttcgcgtgcagggatatccatcatccaatcgcatgagtgcatatattaacaacgtcgccatttctggttttgctatttataacgcgtttatcggggccattgctgatggcgtgctatttgatgcgtcttacattggcgatatgcaatatcagaactgcgggatttcattcattgtccaaggggctgactctgttgaatggggtacgcaaattattgcaaattgctacgccggaattattattggtggcatgtggctaactcgtaataacgttcagttaggtggaatttgggtgccgccctacggtaataacgatatttattctcttggctggtgtgactatgttaaaataaaaaagattgccggcaccatgtccagcttgccctggtctgatcgccacgaggaaattgataagttctttgacttgcgtttctttaaaagcgccaataatgtacttacggtgaataagggacggttatcaaataccggcatggatttagttacgccatctgattatagcaaagttccattcagaggtatcgccagccgctactttgttaatctcagtagatataatcggggtaacgctaatctgcatattgaagatatgaaagtttatttctgctcacgtacgccagtgttgtctgcgtatggtcaggggagcgatttctatggccaggtgagcaatgcttttgttgaaatggttggtaagaaggctgtggggcctaacactgacgaaaataatttctataaatctggcattgatgagctcaaccgtgactatacccggctaccggcattggttgtcgaaggggctctgggggcggtaaaagtatctattgccaatacgttcttcgcagacccatcaacatccgccccaacgaccaataacaagctggttactcaacagtgggtgccgtcggttactgaagtgcaaaaaccgtctgcatatacttcaggcacggcgctgaggtaccattctgcatatgacggtaagatcgccgttattttagaaaggctctggcgagggcgctatgagacgcaaccgcttgttttcgattcgggagatgcaaataaccttcatacatggcgaactagaataaccggtaacgctcacgcgaatttctacgtcagaaacggcgccagtggggcagaaatttcagtaactaataaaagggcaagtctttattatcaaggggggcgtgttaaattttttatttcgttccaattcccgaataataccctcgactataccgattttttgactatatcaggacttccaactggcaacgccgacgcccatgattttggcagccagcagcctgagcttattgttcagcgagcggttatccgcgaaagagtgttttctgtacctggcggaacgttatctctgcctatgaatattatgtcggcccgtcttgactcgggggcagcctcgttctttgctgaccaaaattcaatctcagggtataaactgcgttgcagcgattttattgcgctttcaacattaacgcttagtctggaatataatacgacatgggggttatacaataatgatgaggggtattga

SEQ ID NO: 446574 - DNA, 360 bp, Serratia marcescens
atgaaagaactgtctgttatcgaaatgaatgaagtgtcaggtgcctattcctggaatttgaataatggaattgtcggtctcgttggcagcgctgtcacgaatgccgcggaagcggcttcgtcgctggttttaggtgcggctgctgccagtgccgctggtgcaattattggcggtcgtcacggcggcgacggtggcggcctgctgggcgtcggttctattggccaaggggtcggcatgatctacggcgctatccacggtggtattgtcggaggcattggcggtgctctggctggctgggaaacgaccctagagtactctaaaaaagctgccgaaggcgtcatcaatggcactttgatttaa

SEQ ID NO: 446575 - DNA, 1662 bp, Serratia marcescens
atggctgaaaattataccgtagctgattaccttctcgatcgcttggcccagatcggcatccgccatgtatttggagtaccgggtgattacaatttgcagtttctcgatcatgtgagcgctcatcgacagatctcttgggtaggctgcgccaacgagttgaatgcggcttatgctgccgatggttacgcgcgctgcaagccggcggctgcattgctgacaaccttcggcgtgggtgagctcagcgctgtcaacggcattgccggcagctatgccgaatatgtgccggtgatccatgtggtcggtgcgccggctctgcgcgttcagcaagctggctgcttgcttcatcattcgctgggggatggcgacttcgggcattttgtccgcatggcgaaggaagtgaccgtggcgcaggcctgtctcactgccgacaatgccgaagctgaaatcgatcgtttgttgacgacggcgttgtttgaacgccgcccggtgcacctggtgcttccctgtgacgtagcggaaacaccgttagcctcacggccattgtcgctggtattgcgtcaggcagagttgtcggaagcctcattacaggggtttattgcggcggcgggcgacaaactgcaagcagcgcgccgggtttcggtattggcggggggcatgactgaacgcttcaacgccgcggaaacgttgaggctgtggatggatgaggttaaggtgccgcatgctgtcctattgtcaggtaaaggtgtggcggatgaaacccacatcgagttcatcggcacctatgccggcgaggctagccttccgcaggtcaaacagtgggtagaagaggcggacatcgtgatcaacgtcggcgtgctgttcactgatatcgtcacggcggggtttagtcactcccttcccgtggagaaatgcatcagtattcacccgtttgaagcgcgcgtcgggcaacaagttttcagccaggttcccatgcctgtcgccgttagcgcactacgccaactgagtttaccgctggcgaaacagtggcaatcacccagaatgaaccgcccgatgccgctgagttttgaacaggagcgtctcgatcagaatgtcttgtggcggcaaattcagggcttcttgcggcctggagatattgtcttcgcagatcaaggaacggcctgttttggcgccgcgacgttgagattgcctcaggggtgcaaatttattgtccaatctctgtgggcatcggtgggttatacgttggcggccgctttgggcgtgcaaaccgctgagcctgggcgtcgagtggtggtgctgatcggcgacggttccgcccagtttaccgcgcaagagttgggggcgatggtgcgtgacggtttgaaccccatcatcttcttattgaataacgaggggtacaccgttgagcgggcaatccatagaccagagcagcgttaccatgatattgcccagtggaattggacgcttttgctgcaggcatttgcgggcgaacattcggtgcaggtgatgcgtgttaccgaagcggcgcagttgcaacaggccatgagcgcagtggcagacagcccgcaattagcctttatcgaggtggtgttgcccaaaatggatatcccagaactgttgaacgccgtttcacgcgctattcgggtgaacaacagtaggtcatga

SEQ ID NO: 446576 - DNA, 741 bp, Serratia marcescens
atggggaacgtttctggcaaggtggttgttattacgggagccagcagtgggttgggggctgccaccgcccgccatctggcttctcttggtgcgacggtggtgttggcggcgcgccgtaaggaacgtctcgatctgttggccagtgaatgcattgccgcagggggcaaagccttggcgctacaggtcgatgttacacaacgcgatgaggtgagcgccctgatgtctaccgctgtcatgcaatttggccgtattgacgtcttgattaacaatgccgggctgatggctatcgcaccgatgaatatgacgaaagttgatgaatgggagcggatgatcgacatcaatattaaaggggtgttgtacggcattgccgcagcgctaccgattttcgaaaaacaaaatgaggggcatttcattaatatcgcttcggttgccgggataaaagttttcagccccggcggcaccgtttatagcgggacgaaatttgccgtacgtgcgatttcggaggggctgcgtcatgaagccggtgcgcatattcgaaccacaaccctttgtccgggcgcggtggattcagaattgaagttcggcagctcggacgcagagagcgcccattttatacaggcgttttatcagcaggctatcccggctgattccgtggcaagggccattgcctatgcaattgagcaacctgccgatgtggacatcaatgaaatcgttctgcgcccaacacaagaagtcttttga

SEQ ID NO: 446577 - DNA, 1032 bp, Serratia marcescens
atggaaagtaatcgcaatggtatttccgagcgtgatgcggcggcagtccaccttctggagcaatcaatggggatgacctaccaggccgcgttgcgggccgcgacggttttaggtatcgcggattatctcaaggcgggcgccagatcggcaaatgaactcggtcgagaagttaatgtcgatgggcagaagctgtaccgcatcatgcgcatgctcgcatcgagacaaatctttgaagaagtggaaggggggcgtttttcactgacgccggctgcagagtttctttgttcggatgcccctcaatcgctgcgttcagcggtgcttatgctgactgatgaaacattttggtcaccgttgggtaatcttgttgacagcctgcgcagcgactctgcctttaaaaatgcatacggcatgtctttctatgaatattggtcaaatgataaaaataaaagagaagggtatgattttcataccggtatgtcctcgatgtcttcggtggaaaacctattcttgataaatggttataatttccctgaacatacaacggtggtggatattgccggggggatgggcgggcttttactgaacgttttacgccataatcccacgctgcacggcattctttttgatcggcccgaagtcttggcgcgaaaccgtctgtgggagttgggcgatgattcacgctggcaaactcaggcaggcagtttctttgagtcttgccctacggccgatttttatttgttgaaatacatcaccatggactggcctgatgagcaggcgatgacgatattacgctcttgtcgtaatgccatgtacgaaaattcaaaactgctgattatggaacccgtgatcccgaaaggtaatgcctggcatggggggaatgaaattgatttattgttgctggcaagttttgacggcgggcaaacccgctctgaagaaaagttgcgcgccttgctggctggcgccgatttaaaactgaatcgtatcatcaatactggctgttatgtctctatcgtcgaagctgtcatcgattaa

SEQ ID NO: 446578 - DNA, 276 bp, Serratia marcescens
atggacgataaaaaaccatatctatatttaaacgcgtttttggtaaaaagtgagtacgcctcaataaaatattcagactttcttaaagcatcgtctcaagtgaatgcttacgagttagataataaacataagcttgacggaatgttattcataaaaataccggaagaaaaaaagccaaataatttcatgtggttactgtggagaaatcagataaagcaaagcctgagtcgccggggaaattgctgggataacagctcgatggaacgttttttttag

SEQ ID NO: 446579 - DNA, 1224 bp, Serratia marcescens
atgagtacttcgccttcattaaacacggcaagaaccggccccaaaattacttcgtcctggcttaccctgctactcgcaagcgcctgtggattgattgctgccaatatatattatgcacagccattggcagggccaatcagtgacgcactcggaatgtcgccgtcaaccacaggactgatcgtgactttgacacagattggctatggactgggtttgctgctcatcgtgccattgggggacttgattgaaaatcgtaaattaacgctgctcctcttggcggttgctgcattgtcactcgccggggcgggattgtcggcccatcccttgccctttctgctgtcggcgttgggcatcggtgttggaacggttgccgttcaggttcttgttccttacgctgcacatatggctccagaggcaagccgcggacgggtcgtaggcaacgtgatgagtggcttgatgctgggtatcatgctggctcgtccggtatcaagtttcctcactcagctttactcctggcatatggtttttttcgcctccgcctccgtcatggtcgtgttggcggccgtactttcattaaaactaccgccgcgcatcccttctgggaagttaaactacagtgaactgttgatatccatggttcatttagcacgccgtacgccagaattgcgccgacgcgcactttaccacgctgcacttttcgccgctttcagccttttctggacgactacgccgctgttgttggcaggacccctttttaatttgtcgcagggtgggatcgccttatttgcactcgcgggtgttgctggtgccgttgctgcccccattgcaggacgcgttgcagaccggggattgagccaaccggctactgcactggccatgctggccgtggcggcggcctttatttttacccacatagcaacaccggggtcatcctggtcgcttggactattggtactggcggccattgtgctcgactttggtgtatcagccaatatgacgcttgggcagagaaaaatcttcgaactgggcgcggaagttcgcgcccggctcaatggtctctacatgaccacctttttcatcggtggtgcggtaggctcggcattagggggctgggcttatgcgaatgggggatggatgttggcatcgtggatagggtttgcgctgccggttcttgctttggcgtattttttaacggaacgcataactgtcaagtcaacgacgtaa

SEQ ID NO: 446580 - DNA, 624 bp, Serratia marcescens
atgccttctccccaggataaatcgtcaactacctcacgcagtcgtggccgcccccgtgaattcgatatggataaggcactgggcaaagcggtaagagtattttgtgaacgtgggtaccacgccacttccatctcagacctgacttctgcaatggaattggcctcagggagtgtctacaaggctttcaaggataagcgcgcggtatttctggcagcttttgatcattataaagcagagcgcgatacgcaattgcataacgcaatcgaacagggaaaaagcggccgcgagcgcctgcataatgcccttgttttcttcgccgaatcctcgtccggtcctcaaggacagctgggatgcctggtcattagtggagcggccgatttgagtacattcgacgccgagataagccaacgcgtgactggagcactgacacgcagtgaaacgatgctcaaaagactaataatcgaagggcaggcagatagctcgatttcctctgaactaaacagccaggacgttgcgcgcctgatgctttgcgtgctgcaaggtatgcgtgtgattggcaaaacgggtcgcggtaagcaagacatgaaagcggtggccgatgccgcgatgaaatgctttagttga

SEQ ID NO: 446581 - DNA, 969 bp, Serratia marcescens
atgcctaaacgtataaaaaacagtcgctggtcaggttacgacccccgctacatctattctctcgtcgtccgacgttactttgtcgagatgaagaccaaaactgagatcgctgaagaacttgagatttcgaggtttaaagcggcgcgtcttatcgatgaggcaattaaggaagagtatgtgaagtttctctttccaaagcagcaactgcttgacgaagagatcgcacttaatctctgcggaaagtatggtctgcagaaggcaatcgtgctttccgtgtcagaatcctggtccaatcaggaagaactgaatgagaagctgggtggtatcactgcaagttatctcaacaataatctcgctgagggaatgaaggttggtattgcctggggacgcgttttatccagcacagtgagtcaactcaccagcttgccggcattagatgttgtgcagctatctggtgttcatccgggcattgaatttagccagggcccgatcgaccttatccacagactgtcgactatctctcagggcaaggcacatcctatgtatgtgccgatgtgggtggatgatgaaagcctggcccaaaaactggccagtgatccggctgtggtggatacccaacaatattattctcagctggatgttgtcatcaccggtattggcgcctggaaaacaggctcatccagtttgtgtgatatttttcccgagtcgtggcaaaaaaatctgtttgagaaagatatcgctgctgatgtctgcataacgctcgtcaacagtaaaggtgagatccttgatagcccaatgagccgtctagggtttggtatttccactgagcaattgcgtaacacgaaaaccgtgattggtgtggcgggaggggagcagaaatatgaaggcatagtcgcttctctgaagtcaggccttcttgatgtgctaatcacagatttcgatacggctgtgaagcttgtcaattcctga

SEQ ID NO: 446582 - DNA, 201 bp, Serratia marcescens
atgcccataaaacaagtccataattttagcgaggcccaagacattataggtgccggaaaagtaaagaaaattgaattagcattcgatatcagtgcggatgaattcttcaaaattgccaatttatcaatcgtatatggggggaggatttcaaaacccgagcattactttgtgatcacgctaaagaaacctgacgcgagttag

SEQ ID NO: 446583 - DNA, 2202 bp, Serratia marcescens
atgactgaaaagcgtaactatataatcggtaaggcggaagttttagcgtctcatacacccccgccgaaaataaatcctaagtctgatccgatttacacttttcgcgaggtaatagagaggttaaaacctcagtttgagcacacggtcagtaagctgaatacattggataataggctctgccctaaagattttgcagtggctgccattactctacatccatcttacattgccaaaggccattttccacgagctctttttaaagaaatggccgtacgctcgataggtagtaaaagcgtagatgtactccctgatcgttggactcgcacggggcccccagtaaagtcgccgacaacaagaatctttgtggcgggcaagcgcgatcggctaaccgagtttagtaaagagctggagcagtttaccgaaaaaagccgtggtgcctctgacctgttccgggtctggagcatttcagaacctgacaatagtgaaaaaattaagcacaacaccgatgccttcgaaggctactgggaagttggattgcaactgatgcctgtaggcagtaatgaattcatcaaaacggcattcattaattatgcccatgagctgggatttgaagtgaaggagcagatggctattgaagtgggtaatctttggttcatgccggttgcgggtgcagaaaatcagctcaccctgctcgcatctttctcgttcctgcgtgtagttaggccattgccagccatgcggtcctttcggccggtcaccaggggaatgccggttggcgctaacataaatctgcctgacgtccagccctatgcctcagatgtccgtgtcgctattctggatggtggtctgcctgataagcatgtactggaaccttgggttaccaactactcgcacgctgactctgcagcagacgatcaccctgacggtccttctcatgggctgggtgttacctcggcatttcttttcggccccctttggccgggagaaatagccagtcgccctttctcgtacgttgaccatcaccgcatccttgatagtaacattgacggtgaagatccttatgagctttatcgcaccctgtcacatctcgaagacattctgctttcccgtcagtatgagtttctgaacttgagccttggccctgcactgcctattgacgatgatgaaattcacccatggacgtcactcattgatacctacctcgccgacggagatacattccttacgattgcggccggcaataatggcgacagcgagagttcactcggtcttaaccgcattcaggtgccatcggactgtgtaaatgcattgtctgtaggtgctactgatcaagttgaagctggatggaaacgcgcaccatacagtgctgtcggcccaggacgttcaccgggattggtcaaacccgatcttgttgcatttggcggtgccccacgccagtattttcatgtgccaagcgctctggatcctgacaagctagtgccgacctgcggaaccagcttttcggccccttatttgttgcgctatgccgtgggtattcgtgccatccttggccatgacatctcgccgctcgcaatcaaagcgctactgatcaatgctgcagatcgcgctgagcatgaaaaaggtagtgtaggctggggcaaggtacctgactcaatcagtcagatcatcgaatcgccagatggtaccgcacgcatactttatcagggcgagcttacccccggaaaatacttgcgcgttccgctgccaattcctgagaccggtattaatggcaaagtgaaaattcgggcaacttgctgtttttcaagccctgtcgatcctcaggatacttcaatgtacacgcgtgcaggcgtggaaattaccttccgccccgatccggaaaaaacgcagtccttcttcaagcagaaaactgtcgcgacggaagctgagctgcgcgcggatgcgggtaagtgggaatccgttcttagcgcggagctgaataaaatcggcagtaccttagtccgtccctgttttgagattcattacatggcacgcgaagggggagatcaaattgatggggccaaagctgctagtatccgctatgcattcgtagtttcactcgagtcaccaaaaacaccgaatattttttccggcatccttcagtctgatgcacgtctgattgaaatacagcctcgtattccggtaccaattccgatcacgctttag

SEQ ID NO: 446584 - DNA, 1116 bp, Serratia marcescens
atggaactagatttagtcagtgtaattaggctgtcccttgaagggaatgagaaagacttaagactctatctggctaagcatgttcgctccctgagaaagagcgatccgcagctggcgttgaaaattgaggagttgcttaaacttaatcctgctcgctctcatgatgtcatgcgtaaagagtcgtcttcgttcgagtttccgggtaatacaactgaagataccgtgcctcaaacgttgttgaaagtttcacagacaatgaacaatacagacgggccgcttttacaagggcaggtcaaaaagcaacttgagcaggttctgctggagcgagagaagagcgaactgctggcccgccatggcctgatgccggctaagtctttaattttcagtggtccgccaggagtgggtaaaaccatgacggcccagtggttgtctcaaaaactagggcttccactttatacactggatctgactaccgtgatgagcagcttcttgggcaggaccggcagcaatcttcgcagtgtcattgattttgccaaatcgcacccatccatattgttgctggatgagattgatgcgatagccaaaaaacgtacagatgagacagatgttggtgagctgaaacgccttgtcactattatgctgcaggaattggaagactggccctccagcggtttactggtcgcagccaccaaccatccagagctagtggatccggctctatggcggcgctttgatctggaagtcacctttcaactgccagacgatgcgcaagtggcagaagcggtgcgtcttttcgcgggagattattttgacgttctggccccttggtatgacctccttaaggagagcctgcggggtcagtcgtacagcaacataaagcgcgagatttatcaattgcgcagactttatattcttcgcccagagcattttgagacagacttgattgcacagctcgatttcgacgccgtaggcaaaacaaaggctgaaaaaataagcttcgcagttagactagttcgtcagtatggtttcactcagcaaaaagccgcaaaaatcgcgaatgtcagtagggacacaattcgaaaacgactggtgggaaaggagataatcaatgactga

SEQ ID NO: 446585 - DNA, 531 bp, Serratia marcescens
atgtttcatcagcctaattatgttgtcgtcgctacccgctttttgtcagcgatactcagagtcctgttggtctggccaggtgtggttctggcgatttttggcttcatgttttttatgtcaacactcggtgatgacggcgggcagcgggcggcatcacggatggccgagactgctcagagttaccgtacagcgcctgtaggcatggtgataattcagccatgcccgcatccggacgcccctgagtcaaaactattcttggcaccttcggtggtggcggttgaaaaacaggactgtcgaccttacccgaagatgtttactgacattgcagcgaaggagcgacggattattctcggcattgggggcaccttgctcgcatttggtgtgttggtcgagctgtgttcattgctgatcagacgccgccagaatagccggagtgctgttcactatggaggtatcaatgcgcgaggggagagcagcatgctcttccaatatgacaaacccgcgaatgataaggaaggtcgcaatgagtaa

SEQ ID NO: 446586 - DNA, 666 bp, Serratia marcescens
atgaacattgaacaattagtgacctttcttaacgagctgcgcgaattagccgcacctgccccctggcaggttcttgagctctacagcgatgcagtcactgtcgtggatgccaacggctttgagcatctggaaatccctaacgttgcgattattcctgattgggaaaagctcggcctggagcactggtcggaagagggcggaagccgtgatgtgggtcttgaggagcaacgggctagtggttatctggccgccgctgcaccacagctcctggcttacgtcaatgtgcttaaccgtaatttggaaaccacggagaatgcgctgcgccgcatgctgaaaatgcatgagttgatgatggctaaagccaatcacgcagccagtttctatgacgctgaatgcttgcaggaaatggccgaggctccgtatgaggcagccgcggtgcttgagcacatctgcggcgccgatgatgagaaaacgcacctaaaagaggcaacttgtgtagggtgcggttgtacagatagccatgcctgccttgacgaaaatcacacaccctgcagttggcttaaggtcaaccgtaaaacaggaatgggtgtgtgttcttcctgcccgacttttctggagagcccgctgacaacgggcagtgaagagcaggaggttcgccatgactga

SEQ ID NO: 446587 - DNA, 3027 bp, Serratia marcescens
atggcatctttaaactttcaaaaagaagccgttgcccttacatacgcggtgctcggcgtaaaactcgatgctgcgacttatgactccgtcggcagcagcattgagaaaaatcaactgtcggccgaagactatgtcggcgcattgctgaaatctcccgctggcgccgagaagtacgcaggccaaagtgatttggatattttgagcagcatttacgccgatacctacggtaaaccggcgccggaaggttatctggacgacatgctggcgcaaaatggcctggaaggcgcgatcgcgtcggtcatcaccgatctgctgaactacaatggcgtcgacgccgacatgttggcgactcaggagcattacgaccagcagctggatgagatcctttatccgtcttataccgtcgccggcggcgccgatggcgtctccgacattctggcgctgtactacctggtcggcatcgacccggtgatgggcaccgtcaattcgctgggcagccaaatcaatagtggcgccctgacgtttgaacaggcggcgtccaagttcatcaacgatcgcccggcgctgtcgtcgatggcgaacgacgcgttcgtcaacacactgttcgccgaagcctacggccgcgagccgactgcggcagagtttgaacagtacacgacgtacctgaacaacggcggcgataaaggccaggtgctggtcgatatgatcaacgatctgcgcggtaccgtctcctctgacgacgcggcggcgcagcagcagttcctgaacgacaccaccccgcatgcgccgggcgagatcgccgatctggcgacgctggaaatcgtggcgtcgatcttcctggcgatcccgcagcgcaacgttgacgcgcagggcctggacgactggagcagttacctggaacgcgaagggaactcgatgagctcgctgacggcgaagctgatcacctccgccgagttccagaaaaaaggcgcctcgctgaacggcgacgagttcattcagcacgtgtacactgcggtgcacggcgtgccggccaatgcatcccagctgcagaagtacgcgcaattcggttccgacaagacgaaaatcaccgtctctatcatcaacgatctgcgcaactcgaccgcgaccgataacgcgaccgtgagccagcagcatgcgtttgagcacgatatcggcaccagcctggcgtataaaacctcggctctgctgtccgcttcttcaacggacggcaacgccaccggcaccgtcaacaccggcaagggccacgtgctgagcaatgcggaaaccgcggtgctggtgaatgcggtgttggacgccaacgcggacaccaccgtcaacctgaagttcgccgatcatctggctaacctgaccatcaacggcggcaacgccaccacggtcaacctgtcggacaacggcgtcaataagggtgtggacatcatcgtcaacaacggcaatgtgatcctgaacgccggctcaggcgacgatcacgtgctggtgacctccgtggccaacatcgccgaaggcaccgggaaattcaacctgggtgccggcaacgacgtgctgaaatgggccggcaacgccaccaatggcgtaaacgtggtcagcaaagacattagcgccaacggcggcgacggcgtggacaccatctccgccaacttcatcaccaaacagctgaccactacctccagctccaactggctgggaacgtcttacaaaaccaccatcaccaccaacgccggccagttcagcaactttgagaagatcgatctgggcggctatgtcggcggtaccggcgcgacgctgaacggcggttatgtgggcgttgataccggccaccagttcgatttcggcgtgatcaacggcaaggcgacggcggatgagatcaagaacgttggcaagctgaccaacgtttccgcttcttcatcactaggcacgcagggcttcgtgctgtcgagcatggcggacaacgtcagggtgattaacatcgccagcaccaaaggcggcaacgcggcgcagctggaagtgaccggcaacgccaccgccgccagcagcctgggctttacgttcctggagaatgcgaccagcaagttcgacattaacttcaccgctaaaagcgacagcgatgtcaacgccggctccatctcgctgaacagcagcagcagcttgctgttcggcacggcgctggagacggtgaacattaactccagcggcaccggcgatttcagcaacatcctgaacctggcgagcagcaatcaggtgaagacggtgaaaatttccggcgatcactatctggatctgcacgtcagcgccgataacggcagcttgcgtaacatcgatgcgtcttccaactcagccggggtgaccatcacctccgaagtggcgggaacgggccagggcttcattctggacttcctggatctgctgccgttcagctcgctgaccaagacgatcgccgcgatgtttggcctgaagcgggatgacgtgcatgtcactggctccagtcaggacgacgtgatcagcgtgatgggcaacaccaacgtgaccggcggcgcggggcatgacaccttcaaactgctcagcagcaccaccgaggcggcggtgactatcaaggacttcaacatgtatgaagataccctggtggatacgcagtccggcatgacgatgtccggcaagggcgacatcaacgccaacaacggcacccaggtggcggattacggttccgtgtccggcgcggccagctggattgccggcattctgggcggcatcattaccggcgccattgtgggcgtgaccaacatcatcaaccagatcctggggctggataagcagccgttgtcagaggtcggcatcgtcagcgcggacggcggcagctatgtgatcgtcgataagaatggcgacggcaagctggataaaggcgataccttcgtcttcctggatggcgttgatcataatgaagcgatgaagctgtactacgcgaatgacatcagcctcaacggcgtggcatctcagtcaaccgaatttgcctga

SEQ ID NO: 446588 - DNA, 1338 bp, Serratia marcescens
atgagtacttcaccttcaacaccatcgcgccaactccgtctcggcctgttcgttcaggctctggggcaccacatcgggggatggcgcgcagaaggcgccagcggttcaccgaccgatatcgactggttcacctggatcgcaaaaaaagccgaagaaggcactttcgatatgttcttcgtcggcgacgcgttggcaaccagcgtgcaccgcctgccctcgacgatgtcacgcctggagccgctgacgctgctcgcggcgctggcggtcaacacccgccatatcgggctggcggcgaccgcctccaccacgttcgatcaacccttccacctggcacgcgccatggcctccatcgaccatatcagccacggccgcgccgcctggaacgtagtgacctctttctccagcgatgcggcgcgcaacttcagccgtgaagatctgccgtcgcacgccgaacgctatgaagtggcgcgggaattcctcgaggccagctacaaactgtgggacggctgggaaaaagacgccatcgtgcgcgacaagcaaaatggcgtgtacgccatcgacgagaaaatccacgccgccaaccataagggcaagcatttctcggtgcagggcccgctgaacatttcccgctcgccgcaaggacggccggtgatcattgaggccggctcttccccggccggccagcagctggcggcggaaaccgccgaagtggtgttcaccgccgccgccagcctggaagaaggacaagctttctaccgcagtcagaaaaaatacgtggccgacgccggccgcaacccggaccacctgctgatcctgccaggtgtgatgccgattgtcgggcgtaccaaagaagaagcgaaggaaacctggtatcagctgaatcaactggtggatatcgataacggcattgagcagctgtcggcgcgctttggtttcgatttgagcgattatccgctggacggcccggtgccgaacgtgggcgccaccgaaggcggccaaagccgcgtgaaattgctgaccgatctggccgcgcgggaaaacctgacgctgcgtgagctggcggccgtcgcggccggttcgcgcggccaccgcgtggtggtaggcaccgccgaagagatcgccgacgacttccagctgtggctggaacagcaaggcgcagacggcttcaacatcatgccggcggtattgcccaaccagctggaactgttcgtcgagcaggtgatcccggagctgcgtcgccgtggcctgttccgtgaagagtatcagcatgcaaccctgcgtgaaaacctgggtctgccggaaccggcaatcaacttcgctaacgtaaaatcggcttaa

SEQ ID NO: 446589 - DNA, 171 bp, Serratia marcescens
atggaaagggaagagcgtggacgttcggggaattctgaaaaacatactttcagtgttttcgacgaagcctactgcggtatgattaaagaggacggatgttatgaagacaacatttaccaatgttgtctttctaaaacgctaagtggcagtaatttaatggtttttttgtaa

SEQ ID NO: 446590 - DNA, 288 bp, Serratia marcescens
atgcgtattaaattaatgaaagaccttaaactctccctcgtataccgtggtgttgtcatgggggaggttaacgcatcaaaagaaatttccgtcacggtcgatatgctgacgtttttcggtaatacggggaatatcgccacgtctatcaaatttgatgatgggcaggtcgcaccgggtagtagttatgaattctctccgaccgcaggggggaaaatcccggtcgagcaggcgtatgactatctcatgacgctcgatgagttctcaggcgctgagcttgtggttgattaa

SEQ ID NO: 446591 - DNA, 801 bp, Serratia marcescens
atggcgaagaatgactttaggccgtttgccatcggtgagtatgcgaacgtgctatcacagaatgaatatgaagcgctccccgccgtgggggcgggattcacctctgggattgctaaaagcgaagaattaaataaagtttggcgacagtcttcagtaatggcatcagtccttggtgaatttatcgcaaataactccggtgatgatgtgcttgacgatgggaataccagtaggctattaacttcattaacaagagccctggcaaaacccattattgacgttagccatccggttggggttgtcgcatggtttgcacaaaataaaaacccgaatacgcttttccaaggcacatcatggaactatatcggtgagaacagaacaattcggcttggcaagcaagatggcagtgacattttgtctacgggggggaatgactcggtaacaatgacaataagtaacctgccaaagcataagttttcggtttcgggaaatacaagcacactccctggaaaacaagtgataagcagccaggcaggcgctcacgcccacgatataggtgtttccggtaaaaatgccagaaatggttcggtaggagtgccgccggattatggatataaaggttcggataacgcaaatgaagccagcgtcccactaacaagcagcgcgccggatcatacgcacattgttgatattccagagcactctcatactgtaacgggtgaaacaaatgagatcggcagtggtgtcgctatcaatgtcaaaaacagctacatcacattgatgggctggtatcgtatcgcataa

SEQ ID NO: 446592 - DNA, 159 bp, Serratia marcescens
atgagtgaaggtaataaaccaagcgagaacaatgaaagtgagcagttcaatgatcaagaatatgaaaatgctgtgattagtagctctcctcttggtgacgtaagacatgcatttgagaattatgacttaatgaaagatatccttgataaggataagtaa

SEQ ID NO: 446593 - DNA, 528 bp, Serratia marcescens
atggaaaataataaaaaagagtatcttgatgcttatgaagtttgcacatattacaaagaacgatatgaagaagcgaaaacctcctatcgaaggcttgaagacaaagtgaactatcttcttgctgcacttgcaatggaggtatcagttatcattgctatttgtggaattattacaaattcatcagcaaggcttgagggggtgtggggatttttattgctatcttctgctctctcttgctttttattcgttattttggcatcattttttttagttaaatcttggaggttagtgtcagttcctagaatgccagcaccaagcgaaggaaaaatgcacaatgcaatgcttaggaactgggataaggttgatgcatgtagagcgtttatagttttatactctaaggtaataaaaaaaatagataaaattcacgaaattaaagcttgtgctgtagagaatctttttaaggcactgtccttatcatacgtatttttaattatttcaattcttttaattgcattaaggaagttatga

SEQ ID NO: 446594 - DNA, 675 bp, Serratia marcescens
atgaagatgctcgcggtaattgtaatggtttctcctgtttttttgagttcatgcagctgggatcctaatggtattaatgtacagagggagtggattgctcaaaaagagaaggagaggtctgaatatgaaaagcgagttgctaatgatcaagtggaaagaattaaaagacagaaagatgaaagtgagcacttcgaaaagtctcaccctgaagttttgatagataaaattgatgttgactcggcggattttgatgaaaaaggattcgcatctgcacttaataaactggattttgttacgcgttacccaggcacacaaactattgataactcatatgttaaagttggaacgtataaccttacggttaggcgctttcaggtggcagtagaagggtattctaatgaatgtaaaaggatttcagcctataacaatactgactataaatccttgtgcatttctagcttaaccaagggggttaatgattttgcagctatgctaaaaaacgggagcataccagacaaaaccaaggttgctgctttaaatgatgcttcatatgggaattatatagattttgaacatgcagctagacttgcagtaatgcattttaaattatgccagcagaagggtaatgttggttatgttgagatggtgacttccgctgtcccatgtagtgggtag

SEQ ID NO: 446595 - DNA, 780 bp, Serratia marcescens
atgcttaccccttcacctttgactatttttagaaaaaatgatattcctctatggtgttgtccatcctgtttaaatgaaacgctcgaattggtatcaggaagtttttttagtgagaacacaagtcagacaactttggcgttgggtgaagattggttcgaaccagaacattacaaaatggtcttcagttgcatgttaaaatgttctcggaattcatgcaatgagcatgtagccgtatcaggtaaaggttgggtaagcgaaacattcaatgatgaaatgactgaacgatgttatgaggacgtttttcaagccactcacttctatccaccattgccgattgttattcctccagaggattgtcctgaggaagtatgcataggattgagtaatatctctgctcttttgcctgtcagtttaaatgctggcgttaatgctatgcgaagcacattggaattattgcttgatgatttgaatattcctcggcaagaacctcgtgagggtaaagacccgctggtttttacattgcacaagaggatagagaaatatgaaagtgatttgggcgagtattatcctattttcatggcattaaaatggcttgggaattatggaagccattttgaaaaaaaacgtaagaccgtaagaaaagaagatatagaagatgcttgcgagattcttgataatcttataagtaaaatttatcggcgtcaaaaagacatatcagataaggttgcgcgtattcaaaaatactacgcgccagcgcagcttgataaaaaggatgattga

SEQ ID NO: 446596 - DNA, 1338 bp, Serratia marcescens
gtgcgcgcaatttccggcattttcactattcttttcatcacgttcgccatgttgggaacaataaaggtttatataggtggcaacctgaactggttgattcagttagcgttgctggcggttgccgtcatcagctcactgaaggcttctccactttccgtgatgcaaacggtgcgtgcgcggctgagccacctccgcaactataaactcatcgtgttaggctggctcctgtttgccgccggcatcaccatagccgcggtaatgaaccacggtgcagggctgtatacgctggcgaaatacggcgccttcatcttcgtgtttctctgcctgctgcttatttctcctctctcatcggctttgctggaaaaagcgcttggcgtcactctcatcgtgtctttagtgccgctgatttttttggcgctgttccgccaacttgacgccatggtggttctgggtgacggccgcatgggttggctggccagctggccgggtgtcatctggaaaattggcgcgtttgtttggcccttcgccgtttggcgctgtttaaagaagccaagcgctatcaatgtgctgctggcttttggcgccgtgttgaccatcgcgctcgacggcagccgcacctccatgctgtggttggcattggtgtggatctcgctggcgatcgtcgccatcgccggccgcgtgccgactaaaccgttgcgcgctcatatcagcttgttgctggtgacgctgctgtcgttttctttcatccagcccgtgctcctgggctgggtttatgggcattacgaccagctgatagtccaactgatggagaaaaaaaccgagcaaaacagcaaccaattcggcgcggacgccagtggtggcatcagcttcgggcatgcgcttgaagcaacgctggccacgacgcccaaggaaaccacctcagaacgtttggtcaaaggcgacaacagcatacgtttacaaatgctacataccggttggcaacaaaccgtggataaatttccttggggaggcggctttggcagcgcacgagtcgacgacttcggtactagcagcgtgatccacatgacctatctgcaactcttggcggatgagggtatattgtcgtttatcggttacctgctgtttctattgacccctttatactgcggcctgaaattcgtcttcgagaaacgcgagctgtttgtcgaacgcttcgaacagatgctgtgtcctttatccgtattggcgttgttcctgtttatgggctgtttccacccactcagcaatgagttgaccgaatgggcgatcgttttaaccgccgttgctatcgtggtaagccatgtcccgcgtcgcgactaa

SEQ ID NO: 446597 - DNA, 753 bp, Serratia marcescens
atgcagccggaactggcgatagacgatctgatttaccatcaaatgccggtcaatggcggccctggccctgcacgcatgaaaggtttggagttggcccgcgcaccctgggttttgatattcgacgatgacgatacgctcgaaccggatgcagccgagtatttagctgcccacttgcctgagcctgaacattccgattatccggtatatcaattcgtcaccaataaggggacgcaggaaggggattttcgtctgattacccttgatgactacgtgcataaagtcataaccggtgatttcaccccggttttcaaccgtgcgcaatttttaagcacgggcctgcaatatccccaaaaccgcgccggcggcgaacatctgctgtggtggaaggtggcggagacgttcggtctcccttcgtacaaccgcccgctggtaaaaatgtccgatgatgcggcaacacgcctgacacacttcccgtcccaggtctccaacgccgtttatcatcaacagttggcggaaatgacgttggcggattttggcgagcaactgcaatgcaactaccctgacgaatatcgccgagtacggctggcgcatattacttacagcatgcttaacaatcagtgcgcaaaggcgcgtcaatcgctgaaagatcccttgcttggcggtaaactgaaaatggctttatggacgatcagctggctgccgaattccctgatcaaacagctgttccttttataccgtcaacgccagggataa

SEQ ID NO: 446598 - DNA, 1089 bp, Serratia marcescens
atgcgtatcgattacgtgattaccggtttgggagtcggaggcgccgaatatcaggtcgtttccttgctcgagcaattagccctgcgcggccaccaactacgggtaatctccctgacctcgcctgccgcggcagtatttaccgagcgcctggccaccgccgggatccccattgtttttctgggaatgcactcgggaaaagacttaccattggcgctgctacgcttgcgtaaaacgctgttgcgttcacggccggatatcgtacacagccatatggtgcatgcgaacctcctgacacgtctggtcaggttatttgtgccttcgctgaaaatcgtctgcaccgcgcacaatacgcatgaaggcggcaaaatgcgcgattgggcctatcgcctgacaaatttcctctgtcaagtgaacaccaccatcagcgaggccgccacgcgccgattcgttggggaacgtgttttccccgcgcgcaatacgctcactattcccaatgggatagacacggataaatttcacccttcgccaacgccgtcaagttcgtctgccccgcccttccgctggttggccgtcggacgtttagctgaacagaaagattaccctacgctgattgcggccttcggcaaactcgcagacagccgtttgcacatcgccggccaaggcccgttgcttgagtctttactgcgccaggtgaaacaagctgggttggaggaacgcgttgaatttttaggtgtccgcaacgatattgaccagctctatcatcaggccgacggttttgtcttgtcatccgaatgggaaggctatggcctggtggttgccgaagcgatggcttcagagctaccggtcgtcgttaccaatagcggtggtccaggagaaatcgtcggcgcctccggtgagaacggcttggtcgtgccgataaaaaatcccgaagcgctggccgccgcgatgatctcgatcgaagcgacgccacagcgggaaaggcagttgatgggacagcgagctcgtcaaaaaataagagataaatattctttacatcaaatagttacacaatgggaacacgtttacacagagctacaaaacaataactaa

SEQ ID NO: 446599 - DNA, 1101 bp, Serratia marcescens
gtgattggtttcagagccgatctgattaagtcattgcatcagttggggcacacggtttacgccctagcgttgaattacgatgacgatactcgcgaacaggtcaaaaatctgggcgccatcccggtggattataaattcagccggacgggactcaatccgctcaaggattttctggataccttcgcgctcagtaagcagctaaaatcgctcagccccgatctggtcttgtcctacttttccaagccctgcatcttcggtactctggcggccgtcatcgcgggcgtaaaaaaacgctacgccatgctggaaggattaggctatctgttcaccgagcagccgcaaggcgtgagctggaaagtgaagctgctgaaaaagatccaggttacgctctatcgctgcattttcccgaagctggatgcgcttatcctacttaaccccgacgatcgccacgatttgctggttaactgcaacatcaaggtcaaacaggcgcatattttaggcgggatcggtttgaatatggcagactaccctttcactccgcctcctgagcctcccgtctctttcatttttatcgcccgcctgctggccgaaaaaggggtacacgagtatgtcgccgccgccagagcggtgaaagcgcgccatccggagacgctcttttatatgcttggaaccctggacaagcaaaatccgggtagtctgacggaagagaacctggccgacctaattgaagacgacatcatcatcgctccgggccatgtttccaacgtggcggaatggattgcgaaatccagcgtattcgttttgccttcatatcgcgaggggcttccgcgcagcacgcaggaagcgatggccatgggacgcgcaattttaagcaccgacgtgcccggctgccgggaaacggtagtgcaaggcgttaatggttatctggtcaaacgttggtcgcacgaggaactggcggaaaaaatgtgtgagctgattgaagatccgaaaaagactgtggaaatggggctcgccagctatcaattagcacaagagcgatttgacgcgcagaaagtcaataatcgtctgttggaaatactgaaaattacgcaaaaaagttga

SEQ ID NO: 446600 - DNA, 1017 bp, Serratia marcescens
atggcgattttggtaacaggcggtgcgggttatatcggttctcatacggtgctggcgcttttggcgcgcggcgatgatgtggtggtgttggataacctgagcaactcgtctgcagagtcattgcatcgcgtggagcagttggcgggcaaagctgccgtttttatcgagggggatattcaggatcggcactgtttgagccagttgtttgaacaccaccgagtcacgtccgtcatccactttgccggtttgaaggccgtcggtgagtcgactcgcaaaccgattgaatattatcaaaacaatgtcgccggcacgttgactctgcttgaggaaatgcgtcgtgctggagtacacaaatttatcttcagctcttccgccacggtgtacggcacgccggagcatgttcctcttacggaggcatcgagggtgggggggacgacgaacccttacggcacgtctaaactgatggtcgaacagattttgcaagacgtggcaaaggctgagccgcaattttccatcacggcactgcgctacttcaatccggtcggggcgcatgagtccggcatgattggtgaagatcccaatggcattcctaataacttgctgccttatattgcgcaggtggccatcggtaaattagaaaaattatcgatctttggcgatgattacccaactgcagacggcacagggatccgtgattacattcatgtcatggatcttgcggaaggccatctcaaagcgatcgaccatatcgacgataagaaagggtttagcgtctataacttggggacgggagtcggttattccgtactggaaatgctgcatgcttttgaaaaggcttccggtcgcaacgtaccttatcagattgtgccgcggcgggaaggggacatcgccgaatgttggtcggcacctggcttggcgagcgaagaactgggctggaaagcaacgcgtaatctggatgccatgatgcgtgatacctggcactggcaaaagaacaaccctaacggctatcgcagctga

SEQ ID NO: 446601 - DNA, 147 bp, Serratia marcescens
atgagcacaaacattcacgatggtatagcgactctgaactatgcacagaacgccgtgagtggagaaaaaatcaacgttaatgatttagccgcaggcagcatcctgtcaatctgcctcgagtacaatacgagctggtcaatgaaataa

SEQ ID NO: 446602 - DNA, 3006 bp, Serratia marcescens
atggcttctctcgtgtatcaaaaagaggcggcggcgcttcttttagcagtgcttgggcaaaatgcctcgccaagtgtatttgatagtgttggcaaccaaatagagaaggggcagactaccgcccaggcgtacattacaagtctgttaaactccagcgccggtcaggcgctgtacgcgtctaaaaccgacgtggagatcctgcagaccatttacacgtcagtctatggcagctcgccgagcaccgcggaacttcaggctattctgagcggcagctcgttgaccaatgccatctccgatgccgtgacgtccttgttaaactacaacgggttcgattcgggcacgttgacgtctcaaaacaacttcgacgcacagctgaataacgtgttgtatccgggcaccagcgccgccggttccggccctggcgtatcggacgccttggcgctgtattacctggcggggatcgatccggttaccagcacggtcattactctggggacacaaatcaacacctcggcacagacttttgcgcaggttgccaataagtttgtcaccgatcgcgcggcgctgaactcgctgtccaacgccgatttcatcaacaaagtgttcaccgaagcgtatgagcgcgcaccaaacagcaccgaactctccgctctgaacgcgatcctcagcggcggcggcaccaaaggcgacgtgttggtcaatattatcaccgggctgcgcggcacggttggcgccggcgatacggcggcgcagcagttcttcttgaacgagacggcgccggacaacgcaggacaattggcggggctggccgcacgtgaacaagttgcatcgatcttcctcgccgtgccacagcgcgatgtcgatgcgcagggtctggacgactggagcaactaccttggcaagcacggtaataccttcagttcgctgaccaccaaattgttgacctccgtcgagttccagaaaaaaggcgctcaactgaccggcactgacttcatccagcatgtgtataccggcgttcacggcgttgccgcgacaccggcgcaactggcgctctatagcgggttgaccgacaaggccgcgattaccaccgctattatcaacgatcttcgcaactcgacggcgacggacaacaccacggttgctcagcagcacgcgtttgaatacgacatcggcaccagcctggtttacaaaacggcggcgactctgaccactactgctgcgggcggcaacgccaccggtaccgtcaacaccaacagcagccatgtgttgagcaacgccgaaacggcggttctgaccaatattcaactgaacgccaacgctgcggcgacggtgaatctggcgtttgccgatcatctggccaacctgacgatcaacggcaccgccgcttccatcgtgtcgctgtcgaccgatggcgttaaccctggggtcggcatcaccgtcaataacggcaacgtggtgctgaacggcagctccggcaacgacaaggcggcggtcacttcgactgccaatctggcgaccggcgcggcgaagttcaacctgggcgacggcaatgacagcctgacctgggtgggcaatgccgcggcaggtgccgcgaacattgtcaactccggcgtgcaggctaacggcggcaacggcatcgacaccatctccgccaacttcatcaccaaaaacgtgactacggtggcatccggcatcggcggcctgggccgcaccacaaccttcacgaccaatgccagtaatttcaccagcttcgagaaaattgatctgggcggttatatcggcaaagcaaccgcgaccgaccgcggtaatgccgtcgcgactgcggatcatactttcgacttcggtatcctgaccggcaacgcgaccacggaaagcagcgtcaatgccggtactctggttcaggcgggaacctccaatatcggttcgcaaggctttgtgttgtccggtttggccagcgcagtcaaggtgattaacgccgccggcggcgactctgctcagcttgaggtgacaggaaacgccaccgcagccagcagcgtggacatcaccttccggcaaaacgccaccgatcacttcaatgtgaacttcaccgcgtcgggcaccaccgatattaatgccggttcattgagcctgaacagcagcagctctgttctgttccctactgcgctgtccacgatcaatatcgcctccggcggcaccggcgatcacggcaatatcttgaatctggctggttccaactcgcaggtcagttcgattttcgttaccggcgatcatcatctggatctgaccgtggcgtcgggctacaacaacctgttgacgctggatgcttccgccaataccggtggcattgatgtggtgctcaaccagggcggcaccgggcagggcgtgttgtataacctgctggcgctgctgccgctgggcagcaccctggccaacctgctgggactgggcggcacgaacttcgcgctgaccggttctagcgccgccgacagtttcactgtgctgggcaacaccaccatcaccggcggcacgggcgccaacgattatcacctggtcagcagcaccacggcggcgggcgtgacgatcaatgacttcaacagtgcgcaggacagcattgtcgatggcctctccgggttgaccatttccgctaccgccggcatcaacaatatcgccgactatggcgtccgtaccgaaagcgtgctggcgaacgcggtcagcgcactgctgggtgggatccttaccggtgcgattggcgctctgggggccttgctgggcatcggcggcaacgactcgctgggaagcaaagtgggcgtagttggggttgaacgttcgggcggcaccgattcatacatcattatcgataacaatgatgaccataaattggatgccaacgatagcgtgatctacctgaaaaataccgatcacctgaacctggtcgatacgctgcattacgcatcgacggtgacgctgaacggtatcgctcatgcgcctgtggctgaagtcgcttga

SEQ ID NO: 446603 - DNA, 1116 bp, Serratia marcescens
atgaaaagtaaaaaaatattgattcttacttcatacatgtcagggaatggcggtatcgaacgtgtcactcagcgcatgaacgatcttcttgctgatgaaaaaggggtcgatcttacggttgtttctctgtccggcggtgataagaacatcggtgaagataacaaaaaacccggatttcaccgcggtaaggaagagtggttggaaccgcttaaggcctaccgtttcccgttcggtttttccagccggctggttaatttctttattcacatcacctacatgttcttctttttgctattccgccgctttgattacgtcatatgcactggcccggcacaagctttgtatttaagcaaatttaagcggtttttccggtttagattcgagattttcgcctggccgcacttttccctgacctctggtttcggtgatttccgcttgtgcaaacacgcggattactgtcttggtatcagcaaagagatctgccagcagttggaggaaatcggagttcctaaagatcgcatcatattattcccgaacccgtttgaacggcagccgttagttaaacccaaaacgcccaacagcggtgaaagccacttcgtttatatcgggcgtttgatctttgaggggcaaaagcgcgtcaaggacattattgatgcttctctgctggtttcaggcaactttaaggtgcacttgattggcgccggcgcagattacgacatcattaatgattatgttaaaaccaacggagccgatgaaaagatcgttatccacgaaggttggcacgccaatccatggggcgtagtggaaaggcctgacgttctgctgttgtcatcctcctttgagggattgccgaccgtgttgggggaagcgatgtcgcgcggcatcgtgtgcattagttctgattgtaaaaccggcccgcgtgatttcatcaccgaccgggaaaatggctacctctacccggttggcgacactgcggcgcttgcggcgtcaatgcagctcattgtgaatggcgagtgcgcattcgagccggccaagatcagcgcggcgatggagttttactatacggacagctatatcgaacgttttaaccgcattttcctgaataactctctttga

SEQ ID NO: 446604 - DNA, 1398 bp, Serratia marcescens
atggttggttttaactccaaatatcattctaaaacgaacgcatcattgatttccatggtgcaaagaattactgatatttttattattgtattcagtctttatgttgtctgtctggttcattcgcaaaagtttacctccggccatttactgatttttctgatctccatcgtcgttttccaaatgattggcggcataacggatttctatcgatcgtggcgtggcgtaaaactgtccagtgagctgttgcttgtattaaaaaattggacattaagtatcatcatctcttccggcatcgtttttctgctggacttaagcgacgttgaaatttacgttttcttgcagtggtatttttgcgcctttattggtgtcattatttcacgctgctcaattcggttcgtcgccagaatcgtccgcaatctgggttacaacacgcgtactgtcgctatcgtgggggcgttgcccgttgggataaatctggctaaagggtttaacgatcaaccttggctgggcttcattgtcaccggcatttacaacgataccccggtaacggtgggggaagagatcccatacgcgggtgattttgaaaaattggttgaagacgccaaatgcggaaaaatcgatcgcgtctatatttcgatggccatgagcgatgagttgaagataaaagaaattgtcgcttcgttagccgataccacttgttccgtcatgctgatccccgacgtctttactttcaacattctccaggcgcgaaccgaagaagtaaatggcgtacctgtcgtaccgctgttcgaaacaccaatcagcgggatgaacatggtgctgaagcgattggaggatattatcctttccgcctcaattttagtcttcatctctccggttctggtatgcatctctcttgcggtgaaattgacctctcccgggcctattatcttccggcaacagcggtatggcattggcggtaagccgattaacgtatggaaattccggtcgatgaaagtgatggaaaatggcggcgatgtggtgcaggcaaccaagcaagacagccgcgtcacgcccgtgggcagattcctgcgccgaacttcactggatgagctgccgcagttcatcaacgtactgcgtggggaaatgtctatcgtagggccgcgcccccatgcggtttctcacaatgaacaatatagaaagcttatcgatggctatatgctgcgccataaggttaagcccgggataacgggatgggcacaaatcaatggctggcgcggtgaaacggatgaactggagaaaatgcaaaagcggattgagttcgatcttgaatatatccgtaattggagcgtgtggttcgatataaaaattgtatttctgactatctttaaaggttttgtgcataagtcagcctattga

SEQ ID NO: 446605 - DNA, 1158 bp, Serratia marcescens
atgtcttgcagcgatttaagcattggaattgtttctgattggctggtcaccaagggcggtgctgaaagtgtgattaaagagtttatcggcctttttcctcattctgaactttacgcggtgattgattttctatccgatattgatagagaagagtttttaggtaagcgtgctgaaacgactttcatacagcgtttaccaatggttaaaaaatattatcaaatgtatttgccattgatgccgttcgccgttgaacagttggatttgaaatcgcatgacatcgttatttccagcagccatgcggtcgccaaaggcgtgctgaccgggccggatcaattgcatatcagctatgtccattcacctatgcgctatgcttgggacttgcagcatcattatctcagggagtcagggttgagcaaagggttgaagggggggatcgccaggtggtttttgcaccacattcgcctgtgggatcaccgcacggcgaatggcgccgatcatttggtggccaactcgaaatttatcgcgaggcgcatccagaaggtttatgggcgccgcgcggaggtgatttatccccctgttgacatcgagaggttctcgatgtcagaaaagaaggaaaatttctatcttacggcctctcgaatcgttccgtacaagcgtattgatttgatcgtagaagcgttctccgccatgcctgacaagaaattggtagtcattggagatggttcggaactgaataaaataaaagcaaaagccagtgctaatgtggaaattttaggctatcagaataatgatgtgctcgaacgctatatgagcaaggcaaaagcgtttatctttgccgcagaagaggacttcggcatcgttcccgtcgagtctcaggcgtgcggcactcctgtgatcgcttacggcagaggcggagcgctggagacagtaagaccttatggtgttgagcgagcaaccgggcttttctttgagcaccaaactatcgcgtcgttgatcgacgccgtaggtcgatttgaacggatcgcggaagaaattttgccccaagattgtcatgctaatgcgctaaagttttccagggagaggttcagaaatgagttcagtcattatgttaataataaatggcgggcattttacgcggaaaagaagattcactattga

SEQ ID NO: 446606 - DNA, 1071 bp, Serratia marcescens
atgatatatgtgaactcaagatttttttcgcaggacatcactggagttcaacgttttggcattgagcttagcggaaaactccatgagctgcgtgatgacattgttttcctggctcccaaaaatatcagatccaatgacataacccggcggcttaacgtcgaagtcattggttcgcgaacgggccatgcgtgggagcagcttgatctgccggcatacctgagaacgaagggggggcctttgctggtcaacctgtgtaatacggctccgatattttataggaataaaatcattacgctgcatgatgcggcctacaagagatttcctgcaagctattctttcaaattcaggcaggcatacaatttactcattccgcggctggttgcaaccagccgcgccgtgcttaccgtaagccaattcgcgaaaagtgagcttgcgcattttttcaatctgcgccgcgtgcaatgccacgtgatctataatgccgcgagcgatactttccattatgaaaacggcgatgtgcagcgcgagcagtgctttccgacgtattttttagccgtggcgtctcaacagcaccacaaaaattttgaaggcctgatcgaggctttcgccagtttacctgaagaaatacaggcgatggtcaggcttaagattgtcggttcgcgacataaaaactatcaaggtgcggacagcattttatcgagtgcggcgaccgctaaaaatgttgagttcctggggcgtgttgatgatgacgcgttgtccgccttgtatcgtggagctgcagcattcgttttcccctctttctatgaaggattcggtattccgccgatcgaggcgcaagcctctggctgcccggttatcgcctcatcggcaggtgctatgccggaagttttgcaggatagcgtgatttattttgatccctatgacagaaattcgttggtcgatgcactacgctttgtgatagagaatccgttagctcgggagaattatgtggcagcaggttataaaaacatcgcgcgcttttcttgggaaaagtcggctttacgcctgagcggcatcattgataatctttag

SEQ ID NO: 446607 - DNA, 873 bp, Serratia marcescens
atgtttattagagagtatataaagaaggcatcgaaaaaactgccgtggtacatccaagatatttgcgtttatctattaaagtttggttctctccctaatattaaaaaacctgagacctttaatgaaaaggtgctttacagaaaaaatttcaagatggagtcgccgattttcagccggttggcggacaagtatcgcgttaggcactatgtatcggaacgtataggcgatcgttatctgattcctttgctctttttcacacatgctgcggacgagcttcgttcgtttgactggcgagagcaaaaggtgatcgtcaagccgaatcatggcgcagggatgtataagatagtcacatcgtcattatcctccacagaattaaatgatcttgtcgcaatctgccgaaagtggttggcaacggatttttcccatgttcaaagggaaatccattatcgtaatattccgccgatgatactggtggagaaattattaggcgacggtaaatctgcgctaaccgattacaagtttcacctttttaagaatgcgaagggcgaattcgatttcgttcttcaggtgattaatgagcgtttcagcggtaagcttgtccggcacttctatctcaataatttcactgaacggttcggccaggctcccggggcggattcagtcgtttcgctcgatgtcgagaatttacgtctcgcgctgacgctgagtaagcggctcgccgcagatttcagctatgtgcgagttgattggtacattcatcaaggctgtctttactttggcgagataacgttcacgccggttgccgggttcggtacagggtatggaaaagcgttagacgccgttatgggggatctctggtgggattggcgttag

SEQ ID NO: 446608 - DNA, 1062 bp, Serratia marcescens
  misc_feature (1050)..(1059): n is a, c, g, or t
atgaaaaagttaagtccggaaattgatccgtcatatatacctgattctttggtcatgtttgactcagttgtttttttagtgtttttatttttgggggggggcgcgctatatatctttaatagtagatatagacttggcgttaatttgacgatttttttgttggtttacatcattttttcatactcgtcatataatttaatggtgatgccgattcatgatttcaatatccccgtcgccagaaattttatctatcactttaagattatctctgtcctgtcgccttctgacgttataattttatttttcgttgtgcttatgggggcagcatgcattttcaatactgcctggcgtccttcggctgcggctatcgatggcggagtgctgatattagtgaaaaccgtcgccgtccagggcggagtgatatttgttatttccactatcggttatttgctgtatagccatgccggcggtgtaagcagtctcaataaccaggcaatgtacatccgtggtattatgtattttagcgttttggttttccttttttaccgttgtgccaatgagaacaatgccattggtttttctacgttgttgctcatattttgcaccctggatttcattaattttttgtcggggcttattggcaccttcatctacacggattatgtgtgggaacgctatggtgtaaaagtaacgatcatagaccaagacaaaatatacaattatttcacactctatgtctttattctcgcttctgtatttttcgccgccagaaaaagaattactttaacgatggggctgattgtcgtcattgccgtttgcatgttgctaaatgtttataagttcttgtttgccgttgtggctctttacttggtttacgatgtcattgtcagggctataagccgcaccttgccgttgaaaagatttctgctgctcctgattattggcggcgtattggttcagccagcgatgaaaatattcaccagcaagccaatcagtactcgcgctagtcagttgcatgactattgggaatacactgggcagtttatcccnnnnnnnnnntga

SEQ ID NO: 446609 - DNA, 156 bp, Serratia marcescens
atgctggataacggattcgccgtgttcgggtttagcgattttccctacccggtcaataatctcgaggtgaatcagttctttctcgccgcacaccgttattcatgcattgtgttatcgaccatgatggtgattcatgtatcggccgtggccgcatga

SEQ ID NO: 446610 - DNA, 303 bp, Serratia marcescens
atgagactttttggcacggatattcaggaagttatcaatacggtcaacaaaaaactgggcaaaaccatcattatcaattcggcggtaaaaggtaaggtggtcgtgtgcagctatgagcggctcaatgagctgcagtgctatcaattcttgctgaacgttctggatgtgtatgactatgcagtgatcggtatgccgaataacgtgctgaaagtgattgtggccaaaaacatctccccgatcctgatggccgttgatggccgttcgtttcgcctggcgtttttacctgcctgcggctccctatag

SEQ ID NO: 446611 - DNA, 3045 bp, Serratia marcescens
atggcgtccttaaattatcaaaagctggcggcaacgttgttttatgcggtccgcggaaaaaatatgagcgtcgcagattatgacgcgctgggcgatcgtctggaaaaaggcgagctgtccgcagttgattatattaacttcctgctggcatcttccactggggggccgccgcttgtgaaggccgtcgatttttacactctcagcaagatctaccagaacatccatggcgaaaacgcctcgctgccctctcatatttatgatattgcgacggagcagggattggcgccggcggtagcgcagattgccgatgatgtgctgaattaccgcggggctgatgttgaagtgatcgccgcgcaaaacagcttcgaccagcagttgaatacgatactttatcctgctcatagcgccgccaatggccctgaaggggtttctgatattttagcgttgtattatctggtcggcatcgatccggtgacgaatacggtcaacaccctgggggctttaatcaattcaggcgcccaaactttcgagcaggtgtccgccaaattcgtcaacgatcgcgtcgcgttgaaaacgttgtccaatgacgctttcatcactctgatattcgaaaaaggttacgaacgcgcgccgaccgatacggaatggaacgcctatacggaattcttgaacagcggcggcgatcgaggccagctgctggtggatgtgatcaccggcctgcgcgctgaggttaatgacggcgacaaggcggcgcaagggtatttcctgcatgacacgacgccgcatgcgcctggcgaaatggccgatctggcgttgcaggaacaggttgcctctatttatttggcgatcccacagcgcaacgtcgacgcccaggggctggatgactggagcacctacctggagcggcataacaagacattcatcacgctgaccaaaaagctgcttggttcggttgagtttcagaaaaaaggcgcgcagctgaatggcaacgactttattcaacatgtttataccgccgtgcataacgcgccggccactgacgaacagttggcattttacgcgcagctgagcaatgacaaagcgctgatcacggcggcgatcatcaacgatctgcgcaacgccgccgccggcgatgagatcacgctgagccaacagcatgcgttcgaatatgatatcggcaccagcctggcttataaggcatcggcagaactttccaccacccctggcggcggcaacgccaccggcacggtcaatagcggcaaaagccatgcgctcagcaatgcggaaacctcggttttggtgagtgccatcctggatgcgaatgccgaaaccgccgtcgacctgacgtttgccgaccacttatcgcaattgacgatcaatggtaatgccgcgaccaccgtcaatctttcggtcaatggcgtcggcgtcatgattaccaaccacaatgaaaatatcattcttaacgccggtgcaggtgatgacgttgttttcttgggctaccctgaagctaacgtcgccaacagcaatgcgcaatatcacctcggtaaaggcaacgatcggctgaagtggtttggggattccagcggttggccagacgtgaaaatcagccccactctgcatgcggacggcggagaaggcgtcgacatcatatccgccaatttcttcaccaaaactctggtgaccaccggtctcaacggcgttacgcagaccatgattgtcactaatgccgaccaattcgttaatttcgaaaagctcgatctgaccaattaccggggaaacaccacggcgacgctgaatggagaaccggtaaggatcgttggggataaccaatataacctttttgattacggcattctcaccggccaggcaaccgccaatgaaatcagcaatgccggcatcgtcaccaacaccgtgccttctcccacattcgggcatcaagggtttgtcgtcggtaagggcataagttccagcaacgttcgcgtcattaatatggtcggaggcgatatggcgcagttggaaattatcgacaaagcgactgttgtcggcaggttcgagtttgtatttatcaaagattctgcggataaatttacggttaatttcaactcgacggcagatagcccggtctcaaactcgacgactgctgctctgagtctggtgagcagcagcagccagcagggcggtaccgcgttaacgcacgttaatgtcatttccggcggcgtgggtgatgtaaaaaatggcttggatctctacctggcgaattccgaggtaaatacgatcgatgtttcaggcgatcactatatccgcgtgagcgctcgcggctttgctccagacttaacgctgatcgatgcctcggccaatacggctggcgtctctttgagcgcggataaacaaaccagcggcgatagcattgccatcaacttcttgaaggcgctgccgtttacagcgttggcggaagagactatcagcgcgatggcgttgcaaaatgacgatctgaaaattatcggcaccagccagaatgacgagctgacggcaaataccggcaataccgtgacgggtggcgccggcgcggatgctttcggcgtgctcaatttctttacgaccattaccgacttcaacctgcatgaagatacgctgggcacgaatctttttcgctattactttcactggcggctcaatgataagacggtgggcactcaggtcgccgattacggttaccgtacggatgatgagctacagaatttgctaagcggttttacggtcaacagcacgctcaccgattttttcggcaagactctcgatctgcaaaaccccgataaaccgttgcaatatattggcgtcgtgggtacgagcgtgggcagttttgtgattgtggatcatctggattatgccgacgaggggaagtatgttcataacggcgttttggacaagctcgataccgttgtatttttacagggggcgtcgtatgccgacatcaggcagatgtattatgaaacgcccgaagtcgtcaccagcggcatccctgctcaggagatggcgctcgcttaa

SEQ ID NO: 446612 - DNA, 330 bp, Serratia marcescens
atgtttttgttagggaaattattcggcggcagggataacgccaaggtacgggcgattaagatgttgccagaggtttatgttgatatggttggcgaggccggccgctgtcgtttgaaacacctgcgggcggaaatcggtttttttgaattgcatttttctggcgccgatggcgaaaaatacgcctgccagatgaccgcctgtgtgacggggatcgatctggtgttctccactcacaaccgctccgtgctggtttcatcgccgtttaccgcggaaaagttgcgtccggtgctggagcttgccgttgcccacagcccaatcccgctcgtttag

SEQ ID NO: 446613 - DNA, 261 bp, Serratia marcescens
atggcaaagattagctggtcacgcaaagcacttaaacaattgatgacgctgcctgctcagaatcggttggccattgcggcaaaggttgaacaattaggcgctttcccggcggtccgactggacattaaaaaactgcacgatgctgataaccagtaccgcctgcgcgtaggaaactaccgcatcatttttgagatcgtcgatgaagaacctattgtttgtctgattcagcaggtaaaacgcagaacatcgacaacttattga

SEQ ID NO: 446614 - DNA, 2187 bp, Serratia marcescens
atggaaagacgctcggtgttgaaaagattgcttgcggctggtattgccggcgcgtcgctgcctgctatagccgcgaatatcagtcggaaggataaaagcgttcctactcctgactcatcctccgccactaacgcagacattgccacaatgtcagatgtggctccggttcaacttcgtaatagtttgtttggccctgatggagcaaagttcattggtatcggtaagactaaaatagaccaattattggaagtgcatgtcaaacaatttggcgctcacgagtggactgaaccgggttacgaaaattttgacagtgctccggcgttccgcgaggcaatagcttatgcagctcaaaatggcatcggttctgttaatgcggaggggaaatataaactgctgtccgctgggccgacaatgtatacattaccttatgatgacggcaccgtttctcctgaattcattaaagggggcactgaccataatatagatgcggagaagagggttacgatgccagttgtgctcgacgtgcccagctatgtacgtttgaaaggcggccatataaccaatacctattgggattttggttggagccggcaacgtgaccctatcaacattaagcagcatatcggcatcgtttttcgcgtctccggttaccccaaaaaagatcgcatggttgcatatgttaaaggtattggtatttccaatgtctccatatcccgcgcttttattggcattgtttcggatggggtcatgttctatcacaccgagttcaacaatgttaactacaacaattgtggcattcctttcattgctcagggggccgactcgatgaaatttggtgggacgacatcgctggaaaattgcctggctggcattgtcattggcggtatgtggcttaccaggaataatacatggcgagggggaaaatgggtcccaccgtatgtggatggcactgatatttatgccatggggtggtgcgacgctttgaaagtggagaatatcaccgcttcatatggtgattcgctgtttggcgctcgtcatttggcaattgataagtttttcgatacctatttttataagtccgccaatagcagacgcacggctgatggtggacgaatgacgaatgttgatgctggcgggaggaataccgattattcaaaagagccttatcgaggcattagccaccgtgccttcataaatttttcacgttatgggcggggtaactgtaatatcgagataaaagactcgaaaatatggggcacctcgcgaattcctttctatggtgcgaacctggttggcgatgactattatgggcacattgataacatctacgcggaaaatgtcggatttttagatccaaccaagccttggagtgacgaaaacaacttttataagtcgggcattgatccttataaccgagatcgggatgacctgttgtgggtggccgctgaagggaagttcggggtagataaaatgacgatccaggggacgcgctggcgtgagacctctcaggcgacgcgtccttttaatggacgacaaaagttggttatctatgcgcgaaaaatggcagatttgttcaccggtggtgcgcctatttcgatgttaaaaagtttgcgtttaacggcgatctatactgacaaagaagaatggatggatgttgaacgcttggctgcggatcgctatgaaatcccgccgattgcttttgatcgtagcgatgctgactcaactcatttgttcagacataggattgtacccactcagcttaaattacaccaaaataatcaatttgttggagaaattaaggcttccgctgtatacaccgcgggcaaggttgagttgtattgtgaaatgactatccctgccgacgccgccagtcttactggcgatatgaacattcgttggatcccgattattgaagagaagcttaattatggctcttcggaaatgggcatcatggtgttcaattgcaatattatttcccatcaacagtgcgccgtgcatgataaaaacggcaaagcaattggcaatgcttttattcccaagttgttgatcgccgcatcggggacaaaccagacattgaggctattctccgaccaccaaaagacaatgccactaagcattgcagatttcgctcctggctctcttcttaattttaaggtcgaatacaacagcacctggaaactatggtga

SEQ ID NO: 446615 - DNA, 972 bp, Serratia marcescens
atgattcacactctgtctgactcccccttctatagcaaacgacgcatcagcagtatgacagcgctatcaaaaacgctgaacatctctcctgtcgaactccttaatctagccaatcgagcggaccatatgtaccgactcgccagctcgatcactaagcctgacggaagtacgcgccagacttgggatgcatatgcacctctaaaaaaagtacaacgcaatatcaggagcaatattcttgattacgttgtttatccagcatatttgacaggtagtctgaagggttgtgattataaaaccaatgcaactttacacgctggttctatgattgttattaatgaagatatcacgcgttttttcccgtcaacttcagacacaatagtgcataacatatggcaacatttctttggcttcgataatgaagtagctgaatgtttgaccaagttgacgacccggcagggggagctacctcagggtgccatcactagttcatttctggctaacttggcgttttggacagatgaaccggcactgcaagccagttttcgagcaagaggaataatttattcccgctacgttgatgatatcgccgtctcttcagtaaactttcttgataaaccggctaaaacgaatgtgatagcctcgatttatggcatgctttctaggcacggttaccagcctaaacgagctaaacatgaaatcagaacatctgggcaacggatggaagttaccaagctttcggtgaattcaaaacctggtctctcttccgccaagcaaagtcagatacgatcggcagttcatcatttggagcaagccattcttaggggcgaaattatcgagttcgataagggcccttatgcacaaacattgggactagttcatttattggccagattccatcctggcaaagcaaaaaaacttaaacagcgcttgcttgctcttaagagtgcggcgcgcatgaatatatatacatag

SEQ ID NO: 446616 - DNA, 294 bp, Serratia marcescens
atgattgaactttctcagaaggaaattgagcaggtaacgggcgccggtctgctgagcagcattgtaggcaataatattttacaggcggttgatctgaccaatgcgttttttaacgccgtagcgccgatcgggcaggcgttgaacgtcattcctttcgttgcgccagtgcatgaattgggcgacacgctgattggtgtaggtctgaaagtcagcgctggcgtaggtaaagcgttgggtgcgacttatgaattgagccaaccttatcatgtgactgccgaatggggccgcggctaa

SEQ ID NO: 446617 - DNA, 1494 bp, Serratia marcescens
atgactcaaaacagtgatgttttggtgacgtttaccgaagaacaatccaaaaaattggctgaattgcgtgacacggggcaatatgccgatggctatcgttatattcgcgatatcgtccatgaagcgcgtgtcgcttataccggtaatttgccaccgaccgccgtgtacttgttcggcgatgagcacgccaaagagctgattaaattggaaacctggatcagcgacgtggtgggcatcaacgcttccgacaattcggcctatagcgaattcgtccgcggttccaccaagattgcctcgttgctgcagggtaaaccgatttctgaagccactttccaacaggcgtctgacgcactggcaatcacggtgatcaacgatgcattgtctcacggcggtatgcaatccgccggtgatgtggtgaacacggatgtcagccaggcgctggaaaacctggggctgccgccggccggctgggcgggggtattgggggacgtgtttccgccgccgctcggcttcggcgacaactatgtgcaggtttccgatccggctgacggcctgctgccgttcttgggcggattagcgacggcgttgacggccaatctggtcggcggggtcggccgtctggcggtggatatcgtgttgaacaaaaacgggctggtgacgaacacgctggatctgctgctgaccggcattctcgatccggttcatgaagcccgaacggtcaaaggcagcatcttctccgatcatctgtatggcggctacggcaacgaccatatttccggcggaagaggcaacgattggctgtacggaaaagacggcgacgatatcctcgacggcggagccggagcagacaaaatgtacggcggcgggaataacgacacctacattgtcgacgatattcgcgatgaagtgcatgaaaactacggtgagggcctggataccgtgaaatcctccgtcagttatactctggccaagaacgtcgaatatttggtgcttaccggcaaagataatattatcggcaccggcaatgaactgaacaactttatcgccggcaatgacggcagcaacgttctgaaaggcgaagccggcaacgatatcctgtccggcggcgccggaaacgacatgctgtttggcgggacaggcaacgatatcctcattggcgggctcggcatcgatcggttgtccggcggagaaggcgccgatacctttgtattcaatagctatgatgaatcgcgggcggcgacgccggattggatcactgactttgtcagcggcgtagacaagatcgatttgtcggtgttcaacaccggcgaaggggcgcaaaaggtcgcctttgtcgatgctttcagcggtcgtgcgggtgaggccatgctgacctatgatcaagcgagcaacgtcagcgatctggccatcaatatgggcggtgatttcaccggtacggatttcctggtgaaaatcgtcggccatccgctgcaacaagtcgactttattgtttaa

SEQ ID NO: 446618 - DNA, 2121 bp, Serratia marcescens
atgaataaaacgccatttgaaaccattaccagcaggctgaatctggccctgagaaaaaaagtgccgcagatcctgcaaacggaagcggcggaatgcggcttggccagcctggcgatggtgtgcggttattacggcatgaacgtcgacctgttcaatctgcggcagaaatacggcatctcttcccgcggcgcgacgctgagcgcactgattgatatcgcgacttcgctcaatttgaaaacgcgggcgctttctctcagcatcgatgaaatcaaagagttgaaaacgccgtgcattctgcattgggatatgaaccatttcgtggtgctggtcggcgtgcgcggtaaccgcattaccattcacgatcccgcgtttggccgccgggtggtcgggctgcaagagctctcgctgcattttaccggcgtggcgttggaagcctggccgggcagcgaattcacgcccgttacgcaacagagcaaactgcatattcgcacgttgctgcgtaacgtcagcggtttgaagagcgcgctgataaaaatcttctgcctgtccgtggtgattgaggcgatcaacttgctgatgccggtcggcacccagctggttatggaccatgtgatacaggcgggcgaccacgacctgctggcgctgatctgcatcgggctgctgttctttatcctgttccgcacctgcgtcgggatgctgcgttcgtggacttcgatcgtgatgggttcgctgattgatgtgcaatggaaagcggggttgttcgatcacctgatgaaattgccgttggcgtatttcgaaaagcgcaagctgggggatattcagtcgcgtttcggctcgctggacaccattcgcagcacctttaccaacagtatcgtcagcagcatcatcgacggcatcatgtcggtcggcgtatttatcatgatgttgatgtacggcggatggctggtttgggtggtgctgggctttaccgctatctacgtcgtgctgcgcctgtcgacctatcagcgctatcgtcaggcgtcggaagaaaagctggtcaaaggcgccaaggcgggttcgcacttcatggagacgctgtacggcgtcggcaccctgaaggcgctcggcctggcgggcactcgctcgcaatactggcttaacctgaatatcgacaccacgaacgccggcattcgactgaccaagctggatatgatgtttggcggcgtcaatacgctgatcagcacctgcgatcaggtgatcatcttgtggttgggcgcttcgctggtgatcgataaccagatgacgctggggatgtttgtggcgttcaacgcctaccgcgggcagttttccgaccgcgcctccaatctgatcgacatggtgcttcagctccgcatgttgagcttgcataacgagagggtggcggacatcgtgctgtcggagccggagaaacagatgccggcgcgtcagctgttcgcccccaacgaagcggcgtcgtttgaagtgcgggatctctattatcaatacgacaatctgtcaaaaccggtgattgccgggatcagtttaagcattgaagcgggtgacagcgttgcgattgttgggccgtccggcattggtaaaaccacgctgatgaaactgatgagcggtttgctggatccgaccagcggcgcgctattcatcaatgggttgaatattcatgatattggcatcaacaactatcgccaatgcatcgcctgtgtgctgcaagacgataagctgttctccggttcgatcgcggagaatatcgccggtttcgatcctacgccgaatctggagctgattgtggcttgcaccagccattgcaatattcacgacgacattatgcggatgccgatgggttatgaaacgctggtcggcgaattgggcggtagcttgtccggggggcaaaaacagcgcctgctgattgcccgggcgctatatcgccggcccaatattctgtttatggacgaagcgaccagtcatttggacctggccaatgaagcgcatatcaataacgctatcgccgcgttaaaaattacgcgcatcatcatcgcgcatcggccttccaccatcgcttccgccaatcgggtcatcgagttgagccctgtgggcgcacatcaggcttaa

SEQ ID NO: 446619 - DNA, 1293 bp, Serratia marcescens
atggaccaaagggaattgtttcggcaagaggctgtaaatcatcagcgctctaaatgggcgggtaaagcactgcttatttcaggtttgcctgcgtgggcaattgcttgtgtttctgctgcttttattatcgctttacttatttttcttatattcggcaactacacccggcgtatcaatgtctccggtgaagtcaccacgttgccgcgctcggtgaatattttcgccgcccagcaaggatttatttcacaacgttttgttaacgtcggcgatcaggtgaaaaaggggcagcgtctctatcaaatcgatgtcagccgcgtgacggattccggcgtcgtcagcgccaatacccggcaggctattgaaagccaagtggcgcagatcgacaatatcatccagaaattgcaggctaacaagcgcgcgacggtagacaatctttcagcgcaaaaggcgcagtatgagatagcacataagcaatcgcagcaattggtggaaaattctcgccgcggtgtggaatccatgcgtcgcactatggatagctatggtgaataccagcgtcgcggcttgatcaacaaagaccagctgaataaccaaagctatctgtattatcaacaacaaagcgcatttcaaaatctgtacagtcaaagtattcaggaatctttgcaaatcgccaacctgggcagcgatatcgtcactcgcgccgccgattttgataatcaaatctcgcaatatgaactccaacgcgaagatctgcaaaggcgcctttccgaagcggacgccagcggcgcgctgataatcaatgcgccaaccgatgggcgtgtggaatcgctcagcgtgacgccggggcaaatggtgaatatcggcgacagcctggcgcaattaatcccaagcaacaaggccgtgtattatttggtgctgtggctgccaaacagcagcgtgccttatgtcaatgtcggcgataacatcaatattcgttatgacgctttcccgtttgagaaatttggtcagttcccgggaagaatcgagaccatttcttatcttccggcctccacgcaagaaatgtccacctacagcagttcgcctattcgccagtccaccgagatcactgagtcctattacaaagtgttggtggcgctggataatacgcaatttggctaccaggggaaaacgctgcgtctgtcgagcggcatgaaatcgcaaaccaccctgttcctggagaagcgcccaatttatcagtggatgttctcgccgttctacgacctgaagaaaagtttaatggggccgatccatgaataa

SEQ ID NO: 446620 - DNA, 171 bp, Serratia marcescens
atgaaagaagcggatgccgaacaatggtcaaggacgctaaagatgcattaccccaatgccaacgtggtggcggtcttacccaaaggacgcgggtttcacgttgtgtgctcaaatggtattttcactctccaatcttttttacgaaaaaacactatccatagaaaaagttga

SEQ ID NO: 446621 - DNA, 666 bp, Serratia marcescens
gtgtcattgataaaggatgttaaaagccccctgaaatcagtaaagaaagtggctattttcgaaccgcaatcactgatatcaaacgttctgatcgatatgttactcgacataccgcaggtaagcaccgtttatgacaccgaatcgctggaaacattacaggagatcataaaatccaatgatatggatatggttttcatggacctgatggataagaacaacgatcttttttcggggttgtcatttataaaaaaaaataaaaaaacatggaaaaaagtcggcctcgtcattttcacctctatcactagcggatatgtcatcagtttctctgagaaaatgggcgccatttcatttatttacaagaacgaaacggttaaaaacatcacagataagatagcgcaggtcttcacaacagagttgcacgtccacgaacaaaagttgaagcaaaggctcgttaagacagatgaaaatcaggatttcaccaagagtgaggccatggttatctacctcttctctcacgggatgagtctgcgagagatcgcaaaaaaaatcggcataagctacaaaacggcgcaaacgcacaaaggcaacgcgatgagaaaaatgaacatcaagagcacgcacgactttcatcgcgtattaaaattcataaaagaaataaactggtag

SEQ ID NO: 446622 - DNA, 291 bp, Serratia marcescens
atgcgtgaacttaacgtgcaagaagttgaagtagtcaacggcgcaacacttgacggcgctatctggggcatcgttgacggcgcagccaccggcatgtccatcggcggcaaatggggcggcgccggcggctggggcttcggcgcgctgtcgcagctggtcggcatcatcgttccgaccgctatgggcgctgtagccggcggcgtgaccggtttgctgaccgaccgcgaaaccactgcagatctgatgcagaactaccgcgaaaccttcgggccaggttcaacgacccactaa

SEQ ID NO: 446623 - DNA, 303 bp, Serratia marcescens
atgcgtgaacttaatgtgcaagaagttgaagtagtcaatggcgcaactctcgacggcgctatctggggcatcgttgacggcgcagccaccggcatgtccatcggcggcaaatggggcggcgctggcggctggggcttcggtgcactgtcgcagctggtcggcatcatcgttccgaccgcaatgggcgccgtagccggcggcgtgaccggtttgctgaccgaccgcgaaaccgctgcggacatgatccaaagctatcgcgaaaccttcgggccaggctccaccaacaacggttcgctgatctaa

SEQ ID NO: 446624 - DNA, 294 bp, Serratia marcescens
atgcgtgaacttaatgtgcaggaagttgaagtagtcaacggcgcaacgctcgacggtgccatttggggcatcgttgacggcgcagccaccggcatgtccatcggcggcaaatggggcggcgccggcggctttggcttcggcgcgctttcccaactggtcggcatcatcgtgccaaccacattgggtgccatcgccggcggtgtgaccggcctggtgacagaccgcgaaaccgtggctgatttagcgcaaagctaccgcgaaaccttcgggccaggttccaccaacaacggttaa

SEQ ID NO: 446625 - DNA, 2466 bp, Serratia marcescens
atgtcctcattatcctatcaatatcaagcgacaggcatttataccgctatttttgataagacctggagcgaaaaaggcacggctgggaacggctttgattattacggcaatcagcttgaaaagaacgtcatgagttcagctgatctggtgaaaacatttttagacagcagtgaaggccgcgccatttacggcggcatgagcgacacgcagattttctcgacgatatatgcgaacgcatatggaaaatcacccgatcagaacgctatcgatcactatatggccaatggcctctatgacgggatatccggtgctttaaccgatttgatggaatattccggcccggatctgcagttgctgagcgcttatcaagccttcgatgctacggtcaacgacagcctgtttcccgccgtggtctccgatagcaacgaacaaaccgtcgccgccctctacttttcgctcggacgcgtcctggatgaagtaggctccccgttttggtctgctgaattagatgccggtaaaagcacgctcgaggtcgccaacggcatcgtggccagcaacaaaaaaatctccgctatgaataatagcgatttcgtcaaccatgtcttcaacagcgtttaccaacgcgacgcgacagccgctgagctgaaccactacctgacggaaatcaccgccggcgctcaacgcggccaggtcatgatcgacgtgctgcaatcggtggctacatcttccgacgtcaacgcccaggcggcgctggcggaagcgacacggttagagagcgacggcgcgctcgtcgataccgtgagccgcgaagaggcggcttcggtatacctggccgtgcctaaccgcgacgtcgacgcacttggcctgcaatattggggcaagcacgatgcggtctttggcttcgatgatctggtggggaaaatcatctacaccgatgagttcaacaagaaggccaccaacaagccgctcaacgagtacattgcgcaggtttaccagggtgtatacggtaagcagccttccgccgaagagctggcgcattacatcagcattggcgacaaggcgaaaatcacgacggaaatcattgagtctctacgcaacagcgactcacatgaccaaaacatcatcatccaaaagcatctgttcgaaaaagacatcgcgcagagcctgaactatgcgcaaagcgccaagatcagcgtatccaacgacatcctgcagtcggatatcaacgacaccaaagtgcacgatttaacatctgcggaactgaccacgttaaaatcgatctatctgacgattgcgcagtaccaaaacgccaagctcgactatgcggacagcctcaactacctgaccgtcaattcaaaggatacggtaaacctggtatacggggacgcctccattcctgacgtcagcgccaataccgccaacattttctttaactctccctttgtggacggtaaagaaatcatgtttgacgtgctgtcttccagcctgaaaatcacgctctcttcgatgggcatcgattatgattccttcggcgcgggcaaaatcaatctgtccacggatgacggccgcaacgccaacgtcagcaaactgacgattgactccatcggcagcgaacttggcgaaaacagcgtcgcactcaccgggcataatgaaaaaatcggccgcattgacgtcgcgggcgataagaccgtcagcctgtctgtcaccgacgagtttacccacttgtcgaaaatcgatctgagcaaagccaccgacggtgtcaagttgacctatgacatttcgcagtcggatcaatttgggctgagcaaaatcctgtatagcctgttgcaatctgaaacgccggatcgcgcggcggaagtctacatcggttcgatgggtcaatccccatcagaccaggatcatacgattatcggcgcgcgcgtcagcaacagtgaaatcaacattggcggcaacgttgaatacgtcgcgaacaaaggctctgtctcgtccatcaatatcatcgagagcaacctcaatcgcggcgtgagcgtcgataactttgatgacaatgccgccaacacgctgacgctggcgaaatccgggatcacagtcagtatggacaagagccagggacaagccgtgaaaacggaaaaagtcagctattatcagtttgaaaccaacgtcaacaatgtgctgaaccattactaccctcacaacgaggaagggctggccaagctgtttggcgacctgacgcaaatcggcaagttcagcttcgattccagcaacgtcggggcgatcagcttccaaaacagcacgctgctgtttgttgatgacaacaataacaagcagttcgacagttcagatacgttggtatttttgaacggcgtcggccgaagcgatcatttatatttctcgcaggctgacggcaataatattcagttggttggcgtcaatgacgttcatggcgacgcgctggccgtagcgtaa

SEQ ID NO: 446626 - DNA, 447 bp, Serratia marcescens
atggaagcggcgaaaattcgccgtctgaccggcgtcaccgccagccttgagctgaccattacgctagccggtgaaccgctgcatttgcatctggtggggcgccgcgtcaaccgtctcgaatgggcggacaccgcttccgccttcagcgacacccaatccgtggcgcgcgatctggtgcacagtctatccttcgccgaacaaatggtatccgaagccaactcggtgatcgtaatcgtcgatcagcacggccgtattcagcgtttcaaccggctgagcgaggagtacgccgggctgcacgaacacgaggcgatcggcaaaaacgttttccagctatttatgagcccggaagaagccgccgcctcggcggcgacgaatttctggtgctggcgccgcagaccgatcgcgagcgcctgcaaacgctggcgcagcgcattatcgacaggttga

SEQ ID NO: 446627 - DNA, 513 bp, Serratia marcescens
ttgaagacccctttccgcatcggcttgattgaggtgtataccggctgttcgatcggcatcgcgctgtgcccggagcacggcaaacgcacctataccgtcttttcgccggagatgaacaaacgcgtcgccgagtacatgtggctggacaccaatctgcgcaaagggctggagcaaaatcagctggtgttgtattaccagcctaaaatcgacgcgcgcagcggcgaagtgcacagcgtggaaacgctggtgcgctgggattcgccggagcgcggcctgatcccgccgctgcagttcatctcctacgccgaggagtccggcctgatcggcccgctgggccaatgggtgctgcagaccgccgccggccaggcggcgcagtggcaagagcagggattgaacctgcgggtagcggtcaacctctccgcccggcagctggccgacgacggcatcgtcaacgatctgctcgcggtgctgcgccgccatcgcatggcccctgcctgctggacttcgagctga

SEQ ID NO: 446628 - DNA, 2175 bp, Serratia marcescens
atgctagaaagaaatcgagtaaatactccagccaaacagagctctgatgaaattgacattggacgttttatcggtgagctgattgatcatcgctggttagttattggcgtaaccgccgcgtgcttaacgctttccattctctacgccattttttccaccccgatttataacgctgacgctttagttcaggttgagcagaaaagcgccaactccatattgggcgatataaacaagatgttgccggacagccagccgcagtcggcgccggaaattgagcttttgcaatcaagaatggtgttgggaaaaaccgtcgaagacatgaatctttccacggtggtggagcaggactatttcccgatttttggtcgcggctacaatcgcttgatcggcaataagccgggcgtgcttgaagtcacgcagttcgccctgccggaaagttgggaaagccagtccgtcacgctacaaatagacagcgataaaacctacagccttctgcaagatggcaaattgctgttgaaaggcaatgtaggcatgtcggcgaataaagatggcgtcagcattttggttacgtcgatgattgccgaaccaggcaccacgtttaccgtctcccatcgttcgcagcaaaaagcgataaccgcgctttccaaaagcttgaacgtggccgatcggggcaagaatactggtgtgcttgagctggatttgaccggtgaagatccggttagaatcagcgcgattcttaacaatattgttggcaactatctgcagcaaaatattgcgcgcaaatcggaagaagatgcaaaaagcctagcgtttttgcagactcaattgccagaaacgcgcaccgagttggatgccgccgagaacaaattaaatcaattccgccagaagaatgattctgttgacctgccgttagaagcaaaatctgttctggattctctggtgtcggtcgatactcaactgaacgagctgacattcaaagaagcggatatctccaagctttacaccaaagagcacccggcatatcgggcgttgatggaaaaaagaaagacgctggaagaggaaaaaggccggttgaataagaaagtcaatctgatgcctaaaacccaacaggaaatcgtgcgcctcagccgcgacgtgcagtctgggcaagaggtttatatgcagctgctgaacagacagcaggagctgcagatttctaaagccagcaccgtcggttatgtgcgcatcatcgattcggcggttacgcaagataagccagtcaaaccgcgaaagatgatcgtgttggcgttcggcattctgattggcctgttcctttcatgtggctacgttctgttgaaagcattcttactgcgtcgcattgaaagccctgaacagctggaagaattgggcattaatgtttacgccagcattcctctttcagaatggcagcggaaaaaagaccgggagttgttggtccggaacaagcggcagaagattaagtccagcaataccaacgcggacaatctgctggtggtcggcaatccggccgatctggcgattgaagcgattcgcagcctgcgtactagtctgcacttcgccatgatggaagcaaaaaacaacatcctgatgattaccggcgccagcccggggatcggtaaaacgtttgtaagcgcgaacctggctggcgttgtggcacaagcgggaatcagagttctgtttattgacagtgacatgcgtaaaggttatgcgcacgaattgattggtgtcgacggcattgaaggcctgtcggacattttgtctggaaaactcgcgccagagcatgcgattaagcagacgcagattagcaactttgatttcatcagccgcggcaaagtgccgccaaacccatccgaactgttgatgcacaaccgtttcaaggaactgctggactggtcaagtaagcattatgatctggttctggtggatactccgccgatcctggcggtaacggatgcggcgatcattggtaaaaatgcgggaacaacgctgatggtggcccggttcggcgtcaacacgccgaaagaagttgatgtatccatcagaaggcttgagcagaatgggattgatgttaagggggttatcattaacgccatcatcaagaaaacatcaggctactacacctatgggtataatagttacgactatacctataagtaa

SEQ ID NO: 446629 - DNA, 1041 bp, Serratia marcescens
atgggaaaagacgttgtcaagcaggaagatagcgactttaacttggatgagttggttaatatttacccaatgacgcctgtgctgattgagaaaatgcggccaaagagcgtggtcgcgcagaataaccttccgctggaacgggagctgaagaactatgaatatcgtatcggcgttggcgatgttctgatggtgacggtctgggaccaccctgaactgacgacgcctgccggccaatatcgcagcgccagtgataccggcaactgggtcaattccgatggttctatcttctatccgtatatcggcaaagttcgcgttgaaggtaaaacactgagccaggtacgcgcggatatcgccgggcgattggctcaatttatcgagagcccgcaggttgatgtcagcgttgcggcattccgctcgcagaaagcttatatcaccggcgaggtcagcaaatcgggccagcagccgatcaccaacgtgccgttaacggtgatggatgcgattaacgccgccggcggactgacagaaaatgccgattggcgcaacgtggtgctgacacacaatggcaaagagagaaaaatctccctgcaggcgttgatgcagaaaggtgatctgacccaaaaccaactgctgtatcctggcgacattctctacgtaccgcgtaacgatgacctgaaagtctttgtgatgggtgaagtgaagcagcaaaacactctgaaaatggatcgcagtggcatgaccctgaccgaggcgttgggcaatgcgcaagggatggatcaaaccgcgtccgacgcgaccggcgtgtttgtcattcgtccgctgcgcggtaccgaaggcaagaaaatcgccaatatctatcagttgaacgccaaagacgcttccgcgctggtcatggggactgaattccaattgcagccgtatgatatcgtttatgtgactacggctccgttggtgcgctggaatcgtgtgatcggtcagctgattccgacgatcagcggtgtgcatgacatgactgaaaacgttcgctatatccaccagtggtaa

SEQ ID NO: 446630 - DNA, 894 bp, Serratia marcescens
atgactaagttaaaggctgttattcctgttgccggtctggggatgcatatgctgccggcgacgaaggcgattcccaaagagatgttgccgattgtcgataagccgctgattcaatatatcgttaatgagtgcgtagctgccgggatcaaagacatcattctggtgacgcactcttccaagaatgcgatcgaaaaccactttgacacgtcgttcgagctggaagccatgttggaagcacgcgtgaagcgccaattgcttgatgaagtgaaatccatcacgccgaaaggggtgaccctgatgcacattcggcaggggcaacccaaagggctcgggcatgccatcctgtgcgccaagcccctgatcggcgatgcaccttttgttgttctgctgcccgacattttgctggatgacgccaagagcgatctcaagaaagacaacctggcgcatatgatttcccggtttgaacaaaccgggttgagccaggtgctggtgcagtctgcagatgaaaatgtgctctatgattattcggtcgtcgagtgcgagactgatgtcttgcatccgggcgcaagcgccagaatgacatcgatcatcgagaagccgagccgcgagcttcagcttaaatccaattattctgccgtggggcgctatgtgctgtcggcggatatctggcctatcttggaaaaaaccgaacccggtgcctggggcagaattcagctgaccgacgccatcgccgaattgttgaaacacaacaccgttgaggcgagggagctggtgggtgaatctttcaactgcggtgaaaaaatgggttaccttcatgccttcgtgacctatggattgcgtcatcctactcagggcgaagcctttagagaatgggccaagcggttgtcgttgtaa

SEQ ID NO: 446631 - DNA, 657 bp, Serratia marcescens
atgaattggtattttttgacctttttcggcgacagcatgttgctgctgccttccggcattattgttttcgctatcctgattttttcctaccccagcttgaaacagacgacccaatgggcgctgctgttcggcggtatcggcgccatcgtctgcgcctccaaactggcttttatgggctggggcatcggcattcgcgagctggattttaccggcttcagcgggcattccgctctttccgccagcatttggcctgtgatgatgtggctattgaccggccgtttttccgccgccgtgcgcaaaacggcggtgctgagcggttacgcgttggcgctgctgatcggttattcccgcttggccatccacgtgcattcggtgtcggaagtcgtcagcggcctcgtcttgggtttttgcgccagcagcgcattcttgtggttgcagcgcaacgtcgccccacctgccctgtcgtaccgtaaaatcgccgccgccctgctgctgccgatcgtgttgatcaataacggcacgatagccccgacgcagggtttgctggagtttatcgccgtcagcatcgcgccgatagataagcctttcacgcgtgaagatatgcacgccaacgcgccggtcgcttataacaccttcaattccggctccgcccaataa

SEQ ID NO: 446632 - DNA, 171 bp, Serratia marcescens
atgtcgcattatgatttgcgttatcgtaaaagtatcatttgtgttgactttgtctcgctgaagttgctaaatatgcccctgagtgtggaggcctgcgatgccgaactgaagcttctaagcgttatgcttatctcctttcggaatgagcataacgctcaggtgatgctatag

SEQ ID NO: 446633 - DNA, 777 bp, Serratia marcescens
atggttttctcgccggatgagaaaaatcttaaagtccaggataaagacgaaagcgttttggagctttccaaccaggccacccgtctgttgcttgagttgataaagcacaataaagaaacagcgttacgcaacgagctgattgctcgggtgtggtttgattacggttttacaggttcaaataatagtctaaatgtcgcgatcagtgagttacgcaaagcctttgagacattcggtcacgatccgcaacttatcactaccatccctaaagtcggttttattttcaatgctcgggtcgaagcaattttaaaagaagctcccgttctcgaggagaacattcctgaaacgttaccgattacagaaatgcctattaccgataacgaaccaggcaaagatgcgccgtcccctattctcgccgtcagcgccattattgcctgcttagcgtttatcgtgtcatttctctatgtactcacgcagaacaaagatccggttatttatacggaaacgcctgctttattgtacaattacaaaaagtgcaatgtttattatttaggcgtgaacccgcctcacgtgaaaaatacgataatcgaccaggcaaaagccgaacttcgtaacgaaccgctggattgtgagacgacgcgttatgatattctttacagcaaagacaacgtaagtacttttgtatcgcccgtttcgtttatcggtatttgccaggtagccgatgatagcaattataataactgtaaatctataagaagcgtgcaaggaacaataaaatga

SEQ ID NO: 446634 - DNA, 483 bp, Serratia marcescens
atgaaaaggctcgcgctcatctgttcaaccgctttattttcattagctactgcagcgacggtactctggttcatcagcagccgctcggatataaaacttcaatgcatgggcgaactgttgtcgagaaagaacattaacaacgaagaatccgtgacgattcgcaccaacctgctgattaacctctataacaaccggcatggaatgatattgcaaaaaggcgggctaacgctcggggacaaagtttatcgcatcgacagagagatcaagtttcagatgtgggacttagacaataaaggcatctacattatcgatgatgtgaatatcaagccttctgccttggataacgtgccgaaatcgatagaagaaaaatacgttctgcaaatcgacggtaaaagcaagcaatatattgaaattggaaaactcaagaatcaatatatcatcaccatgatttcttcgccatttctcatatgcaaacgttactga

SEQ ID NO: 446635 - DNA, 669 bp, Serratia marcescens
atgaataggagctatcggagtcttgttttaaagaacaaaactgtagaaagcatcgccgtactggaaccttttccttatgtatccaacgtgctggtggatatgtttctggggatacctgaagtcacggccatcttcgatacgcaacgaatagagacgttgcaggaggtggtggataggaaaggcatcaatatggtgtttatggatttggttgacagcgataacgaccctattgcgggattatctttcattaccaagaatgccttgctttggcaacatattgatttggttatatttacatcaataacgaattcttacatcttggagttcgcaaggaaagtgggcgcggtcgccatactctccaaacgagacgagatggataaaatcagggagaagatcaaaacgatattttcacggcgctctttctactatccgaaagaatgggcgttttatggagatgtcaataatatgaactttacacgcagcgagtcggcgatcatttactttctgtgccatggaaaaagcatgaatgagatatctgagataatggggatatcttataaaacagcacatacccataaaagcaatattatgaacaagttaggcgttaaagggttgtttaacctacataaggtcattcgtgcgattagattttctgaagggcacgcctaa

SEQ ID NO: 446636 - DNA, 1380 bp, Serratia marcescens
atgattgtggcacgactgacaaggaatttggccggtgtcgcgttggccggagcggcgttgttcgccttctccgcgccggcgcaggctataggcgtgctggatgcgtactcgctggccatgcaaaaagatccgacttttttggcggcgctgaaggagaaggaagccggcgctgaaaacgaaaacatcggccgggcggggctgctgccgaaagtgtcgctgagctatcaaaactcgccgaagaactggcagcaggtcaccagcccgcagcgggtaaacattttcagcaatgagaccatcgacgtgaccacccggcagcaatatcgcagctactccggttcggtcacgctgacccagccgctgatcgactatgcggcctatgcgcgctaccgcaccggtgtggcgcagacgctgatgtccgacgagcgttttcgcggcaagtttatggatctggcggtgcgcgtcgtgagcgcctatgtcgatgtcgcctacgcccgggatcaaatcgcgctggcggaggcgcaaaaagcggcctaccaggagcagttggcgctcaacgatcgtctcctgaaggcgggagaaggcacggtgactgatgtctcggaaacgcaggcgcggttcagcctggcggaggcgcaggcgatagaggcgcgcgacgcgttggacgcggctcagcgagagttggaggtgatcatcgggctgccgctggatcagctggaaacgctgcgcgggctgcggcctggcaagttccaggtggcgccgctcacgccgacgacctttgatgggtggcgtgaaaaagccattgcgcacaacccgacgttggcggcggcgcggcacggcgtggaagcagcggagtacgaggtggaacgcaaccgggcgggatttttcccacaggtgcagctttacgcttcccactcggaaaacgattccagcagcgacaacacggtgaaccagaagtaccgcaccaacagcatcggcatccaggtcagcatgccgctgtattcgggcggtggcgtggccgcatcgacccggcaagcggcggccagctacggccaggcaaaatatgaaatggatgcgcaggtggggagcacgctgaacgatttgcgtaaacagttcaacctgtgcctgagcagccgcgccaagctggcggcgtatgagctggcggtcaagtcggcgacggaacaagtggatgccacgcgcaagagcgtgctggcggggcaacgggtgaacgtcgacgtactgaacgcggagcaacagctttacagcgcgaaacgcgatttggcttcggccaagtacacctatatcaaagcctgggtcagcctgttaaatggcgcgggcgcgttggatcaaggacacattcaacaaatagccaaatatttctga

SEQ ID NO: 446637 - DNA, 1332 bp, Serratia marcescens
atgtctatgccagttagcgcaccgcagacttctctggaagtcgcgcttcctcaggatgagaagaaatatacccgtttggggtggttggttttggcccttgggctgttcggatttttcatttgggcggcgttcgcccccttggataaaggcgtcgtgtcggcaggttcggtgatcgtttccggcaaccgtaaaacggtgcaggcgccggcgagcggcatcatcaagagcattaaggtcaaggaaggcgattcggttaaagcaggcgaagtgctggtgcagttgagccaggtacaggcgcaggcgcaggtcgactccctgagcgatcagtattacaccacgctggccagcgaagcgcggctggtggccgagcgtgacgggcgcgatgccatcacgttttcaccggagttggaaaaactcgccggcgaagcgcgcatcgcggaaatcctgacgctgcaacaacagctgttcaactcgcgccggcaggcgctgaaaagcgaaatcgacggctatcgccagtcgatcgaaggcatgcgttatcagttgaaagggctgcaggactcgcggggcaataaggcgatccagctgtcgagcctgcgggaacagatgaacagcatgaagcagctggccagtgaaggctacctgccgcgcaaccgctatttggagatccagcggcagttcgccgaagtgaacggcagcattgatgaaacggtggggcgcatcggccaattgcaaaaacagctgcaggagtcacagcagcgcatcgatcagcgcaatgcggactaccagcgcgaggtgcgtacccaactggcgcaaacccagatggacagcagcgaataccgcaatcgtctggagacggcctcgttcgatctggataacacctcgatcacggcgccggtcaacggcacggtcgtcgggctgaatatctttacccagggcggtgtggtcggcgccggcgaccatcttatggatgtggtgccgagccaggcgtcgctggtggtggatgcgcgcctgaaggtggaactggtggacaaggtggcccaggggctgccggtcgatctgatgttcacggcgttcaatcagaataaaacaccgaagataccgggcgaagtcacgctgatttcggccgaccgcctggtggataaagccaatggcgagccgtattaccagatgcaggcgacggtgacgccggaaggcatgaagatgctggcgggactggatattaaacccggcatgccggtggaagtgttcgtcagaaccggctcgcgctcactgttgagttatctgttcaaaccgattatggatcgcgcgcgtacgtcgctgtcggaggaatga

SEQ ID NO: 446638 - DNA, 1773 bp, Serratia marcescens
ttgcgtcagtatattggcagtaatgaaattgcggatgttatacgcacgcgcagcaaaatattctggaccgtcggcatctttaccgcttttatcaatgtgttgatgctggttccttccgtctacatgttgcaggtttacgatcgcgtactgccttcgcgcaatgatattacgctcctgatgttgaccctcatcatgttggcgatgtacgccatgatgtcgctgctggaatatgtgcgcagcatggtagtgatccgcatcggcagccaactggacatgcggctgaacacgcgcgtctataccgcggcctacgaggccaacttgaagaacggaacgtcggatgcagggcagatgctgggcgatctcaccacggttcgccaattcctgaccggcaatgcgctgttcgcgtttttcgacgccccgtggttcccgatttatctgttggtcattttcttgtttaacccgtggcttgggttgttcgcgctggtcggcgcgctgttgctcatcgcgctggcgatagtcaacgaaatggtctccaaacagcctctgggggaggcgagcaagctttccctgatgtccggcagcctggcgagcgccaacctgcgcaatgcggaagtgatcgaagcgttgggcatgttgccgaacctgaaacgccgctggttcctgttgcacagccgttttctcaacagccaacgcgtggccagcgaacgcgccgccaccgtcaccgccatcaccaaattcgtgcgtatctcgctgcagtctctggtgctggggttgggcggctggttggccatcgacggccatatcacgcccggcatgatgatcgccggctccatcctgatggggcgcactctggcgccgattgaacaagtgatcaacgtgtggaaaagctggagcgcggccaagctgtcttatcagcgcctggtcaagctgctcgatgagcatccgcaacgcggcaccggcatgtcgctgcccgcgccggtgggcgcgctggccgtcgaaggcgtgaccgccacgccgccgggctccaaaggcgaaccggtcttgcacaacgtcagcttcgccctgcagccgggcgacgtgctgggcatcatcgggccgagcgcttccggcaaatctacgctggcgcgtctgttggtcggtatctggccggtttcagaaggcatcgttcgtctcgataccgcggatatctaccagtggaataaagatgaactggggccgcatatcggctatctgccgcaggatatcgagctgtttgccggcaccatcgcggaaaacatcgcccgctttaacgatatcgactcggaaaaagtgattgaagccgccaaattggccggcgtgcatgagctgatcctgcgcttcccgcacggttacgattcgattatcggccacggcggcgccggactttcaggtgggcagaagcagcgcataggtttggcgcgcgcactgtacggcgatccggcgctggtggtgttggacgaacccaattccaacctcgatgacgccggcgaaaaggcgctaaatcaggcgattcagcagctgcagcagcacaacaagacggtgatcctgatcacccaccgcaccaacctgttgtcgatgaccagcaaattgttgttgctcgccaacggcgctgtcaacgcgttcggcccgactcagcaagtcctgcaggcgctggccaacgctcagaaacagcagcaaccggccaatcgccaggtcgccggtgcggtgaatgcgccagccgccgcaggcagcttcgcgcaaacgaaaacccattaa

SEQ ID NO: 446639 - DNA, 3027 bp, Serratia marcescens
atggcatctttaaattatcagaaagaggctgcagcactgttatattcagtgcttggtgaaaaagctgacgctgccactttcgactcagtcggcaatagcattgaaaaaggccagattacagcggaaagctatgtagataccctgctgaactctgctgcaggtgtcagcctctatggcggcaaaagcgatctggatattctgaacagcatttatgcctccacttacggcaaagctgcgccggaggggtatctgtcgggcttgctggctaactccagcctggaaacgtcgatcaccaccatcgtcaatgatctgctgaactacagcggctttgatcagggcacgctggcttctcagaacgcctacgatcagcaactgaacaccatcctgtatccgtcctatgacgctgcaggcggcgcgcagggtgttgccgacgtaacggcgctgtattatctggtcggcatcgatccggtatcgggcaccgtaaactcgctgggcagccaaattaacgccggtacgctgacgtttgagcaggccgcctccaagtttgtcaacgatcgtccggcgttgaaagggctgtctaacgacgcgttcatcaagctggtattcacagaaggttatggccgcgcaccgaccagcgctgagctgaatacttacacttccttcctggcgaatggcggagaccgcggtcagctgttggtgaacgtgactaacgatctgcgcggcaccgtcggttcgaacgatcagggcgcgcaacagcagttcctgcacgacaccaccccgcatgcgccgggtcagatcgccgatctggcttctcaggagcaagtcgcttccatcttcctggctatcccgcagcgtaacgtcgatgcgcagggcctggacgactggagcagctacctgggcaaggacgggcactcgctgaactcgttgacggcgaagctgatcacctccgctgagttccagaagaaaggcgcgcagctgagcggcaacgactacatccagcatgtgttcaccgcagtgcacggcacgccggccaccgcagctcagctggcgcagtacgccaaactgggttccgataaggcgctgatcaccaccgccatcatcaacgatctgcgtacctctaccgcaacggatgcggcgacggtgacccagcaacacgcgtttgaatacgatatcggcaccagcctgacctacaaaactgcggcgaccctgtccgcttccgcagcgggcggcaacgccaccggcagcgtcaacaccggcacgagccatgtgctgaccaacgcagagaccgccgtgctggtcaacgcggtgctgaacgccgatgcggccaccacggtcaacctgaagttcgccgatcacctggctgacctgaccatcaacggcaacaaggccgctacggtcaacctgtcggacaatggcgtgaacacgggcgtcgacattaccgtaaacaacggcaacgtgatcctgaacgccagttctggcagcgatgacgtgcaggtgacttccgccgccaacatcgcgaccggcaccgcgcagttcaacctgggcaacggcaacgatgcgctgaaatggggcggcaacgccaccaacggctacaacgtggtcagcagcagcgtgcgcgcgaacggtggcaacggttcggactccatctccgccaacttcatcaccaagcagctgacgaccacctccagctccttcctggggatcacgtcgtacaaaacgaccgtaggcaccaacgccggtcagttcagcagcttcgagaagatcgatctgggcggctacatcggcggcacgcaggcgacgctgaacggcgctgccgttagcgtgaacagcggtcatcagttcgacttcggcgtgatcaccggcaacgcgaccgccaatgaggttgccaaatccggcagcctgaccaacggtccggcgtactctacgctggggacgcaaggtttcgtgctgtccagctttgccaatgacgtgcatgtgatcaacatctccaacttgaaaggtgctgacgcggcgcagttggaagtgaccggtgacgctaccgccaacagcagcctggacttcaccttcctgcagaatgcgagcagcaagttcgacatcaacttcaatgcggtgagcaacagtgatgtaaacgcgggctccgtctcgctgaacagcagcagcagcttgctcttaggtacggcgctgtccacggtcaacatcaactccaacggcagcggtgatttcatcaacgtgctgaatctggccagcagcagccaggtgactaacgtgaacatttccggcaaccactatctggatctggatatcggttccggcaacggcagcgtgcgcactatcgacgcttcaagcaacagcgccggcgttgacatcaccgccaacgtcgccggtaccggacagggcatcatcctgaacttcctggatctgttcccgttcaacggcatcaccaaagcgatcgccgcgctgttcggcttcaagagcgatgacgtgcacatcaccggcaccgcgcacgacgacgtcatcagcgcgatgggcaacagctatgtgaccggcggcgccggcgcggacaccttcaaactgctcagcagcaccccggatgcgggcgtgaccatcaatgacttcaacacccatcaagataccctggtggatgtgaagtccggtctggcgctgtctgacaacggtgtcatcaacggcaacaacggcacccaggtggccgattacggctacagctccaacgatgctctgcagagcattctgggtggcattttgaccggcggcattacgtcgaccatcagcttcatcaacgccattctgggcatcaaagaccagccgctgtcgcacgtgggcgttgtgggttcaagcgcaggcagctatgtgctgatcgacaacaacggtgacggcaaactggacaacggcgataccctggccttcctgcagggcgtaagccatcaggatgcggcgcacatgttctacaacaacgaaatcaccaccaacggcgtgcagtctaacgtcggcgatctggttcacgcttaa

SEQ ID NO: 446640 - DNA, 1452 bp, Serratia marcescens
atgagcaactcagaactgcaggcctttatcgacgactacattgaccaacgccagccccgcttcagcgcgctgagcgacgcgatttgggaccacccggaaacgcgctttaacgagacctattccgccacgttgctggccgatgcgctggaacaggaaggcttctcggtcgaacgcggcgtgggcgacatcgagacggcgttcatcgccagctacggcagcggccacccggttatcgcgctgctgggcgagtacgacgcgctggccgggctgagccagcaggccggttgcgccacgccgcagccgctggtggaaaacggcaacggccatggctgcggccacaacctgctgggcaccgccgcgctggcgggcgccttcgccgccaaggcgtggatgcagcagaaccggctgagcggcaccctgcgcttctacggctgcccgggcgaagaaggcggctccggcaaaacctttatggtgcgcgaaggcctgttcgacgacgtcgacgccgccctcacctggcacccggaaggcttcagcggcatgttcaataccagcacgctggccaacatccaggcggcgtttcacttcaagggcgtcgccgcccatgccgccaactcgccgcacctggggcgcagcgcgctggacgcggtgacgctgatgaataccggcgccaacttcctgcgcgaacatatcgtgcaggaagcgcggctgcactacgcggtcaccaacaccggcggcagctcccccaacgtggtgcaggccgatgccgaggtgttgtacctgatccgcgcgccgcaactcgatcaggcgcaggacatttaccagcgggtgatcaacatcgccaagggcgcagcgctgatgactgacacccagatggaggtgcgcttcgacaaagcctgctccaactatgtgccgaaccgcagcctggaacgcgcgatgtatcaaaacctgtgcgatttcggtctgcccgggtacagcgacgccgagcgccgcttcgccgaggaaatccgccagacgctgagccgcgacgatctgcgcaacgccaaactcaatattgcccgcaccggcggcgcggccggacgcgagtgggtgcagcagttgggagataaggtgctgatggacgaggtcgcgccttatgtggaatccgacgatctgctgtacggctctaccgacgttggcgacgtgagctgggtggcgccgaccgcccaatgcttcagtccctgtttcgcactcggcactccgctgcacacctggcaactggtggcgcagggccgcaccgctatcgcccataagggcatgtgcctggccggcaaggtgatggcggcgaccgccatcgatctgctgagcgacagcgccctgctggcgcgctgccgcagcgagttcgagcgccggcgcgccgaacagccgtaccgctgcccaatcccgcagggggtgcaaccatcgccattgaaatag

SEQ ID NO: 446641 - DNA, 624 bp, Serratia marcescens
atggcgggtttttcgctttctgggatacggactctccatcgaactgcgttcgattattcggccagaggcctcaccctgcgggccagcgctgaagcgctgttcaacacggcgccagcgccggttgtccgagtccggtcgccctattcagaagaacccgcctatggctgggtttttcgctttctgggatacggactctccatcgaactgcgttcgattattcggccagaggcctcaccctgggggccagcgctgaagcgctgttcaacacggcgccagcgccggttgtccgagtccggtcgccctattcagaagaacccgcctatggcgggtttttcgctttctgggatacggactctccatcgaactgcgttcgattattcggtcttccgcttcctcggtgggatcagcccaatcagcgccagcacacaggatttggcggctaataccagattgagatgcccggggaaagcgacgttgataaaccaaaaggccaggaagatcgccagagaaaccggccaggcgagcacgaagaaccgggtatcgcataaccgctgggcgcaaaacagcagcgtcagcaccaccgccaatagcccgaaaggaagatacagaatcagtctcaggtaa

SEQ ID NO: 446642 - DNA, 345 bp, Serratia marcescens
gtggccgccttcagcggcgcgtcctacgtggccgatgctgagcccactaccggcagcgcggaagtaatgccggaacacgcgcacgccgtgatggaaaatggcggcccggcgccacagcacgacgccgccggcaaaaaagaactctccatgccggaatcgaaatatatcggcatgaaggtcaaaaccgattacaccatcaacagcagcactatgatgatgtcggccaaatcgatgttcccagcgccaaacaacaaacagccgatggaactggcgaccgatctcaccacgctgggcctggcggattatgatgatcaacccgcgtgctctccagttcgaataaaatga

SEQ ID NO: 446643 - DNA, 1086 bp, Serratia marcescens
atgaaaataaaagctgctgttattacggagaaatcaggcccgtttatttttaaagacgtcgaattagatgagcctcaggatgatgaaattcttgtcaaagtggtggcgactggagtctgccagactgatgcccatattagagaacaatcctatgagacacctctgccgatcgtgttagggcatgagggagccggtattgttgtacgcacagggaaaaaagttgccaatatatccccgggcgatcatgtcatcatgtcctatccatcttgcggcgtatgcaatcaatgcatgagtggtgcatctccatattgtaaacatgggttcgaattaagctttggcggccatcgcctcgatggcaccaacgcaatgcatgatggcatccacggacattttttcggacaatcgtcatttgccacctatgccatcgccaatcaacgtaatgtcgtaaaagtccccaaagatgtcccattgaaactgctcggccctctgggatgtggcttccaaaccggcgccgggacagtgctgaacgcattaaaagtcaatgcaggcagcagcgtagccgtttttggtacgggcagcgtcgggctggctgccattatggcggcaaatttagccggcgcgacaacgatcgtcgccgtcgatatcaatcccgaacgtttgcgccttgcgactgaattgggggcaacgcataccgtcaatgggaaagataaagatatcgttaaccaatttatggcgatatcgccaggtggcgtcgactacatcgtcgaggtgacagctctgcccggcatgatcgagattgctctggatgttttaggtatgccaggtgaaatggcattaatcggtggcgcgccgacgggcaccaaggcgtctttcgatctgaatcgattactgaacggccgcagtgtcaaaggtgttatacagggaagcgctatcccgcaagtatttataccgcagttaattgatttgtacaaagaaggaaaattccccttcgataagctggtttcatattacccctacgaagacattgagcaagcctttactgatacccgctcggggaaagttatcaaacccatactcgttttttaa

SEQ ID NO: 446644 - DNA, 1089 bp, Serratia marcescens
atgtgcaatatctgtaataacccaaaccataataaaccgcattggttagtcgatgatctcggctcagccggtgttccctatgttgatttccgagaatttttacctccgccggaatcttctcacggttgtttatattctcgtgatcgtattgagaagggttaccatgtagaagaaattcgcgatggcgtttattgggtgtcgtccggctggtacgataccatgtttgtgcgcaccgggaatggcattattgccattgatgcccctccggcattaggggaaaatattctggccgccatggaggatgtctgcgacgagcccgtgacgcatgtcgtttacagccattggcatgcagatcatattggtgcggccagcatgtatggccctaacgtgaaaattatcgcccatcaaaaaaccaaagatctattaactcgcttccccgatacttatcgcccgatcccaaccgataccttcgagcacgatgaagttctggatgtcaatggagtaaaattagaactgtcttataaaggccaaaaccatagtgagggtaatatttttatctttgcgcctaaacaaaaagtgctcagtgcaatcgatattgccagtccgggatgggtaaccttccgcgattgcgattcatctgaaaatttgtcaggctatgtggatgcccaccaccaaataatgggatatgattttgacactctcgtgtcagggcatgtgtcgaaattaggcgataaaaaagacgttctggaaaacattgaatatctggaagatctgatgcgttttgcccgcgaagccctcgaaactgtcgagatggaatattttattaaacagttaggtgatggctcttatcgtgcggcattccgggatgccgaggagaattatttccaggcattaactaactacggcaccaaaaagatgctcgaagttgtgacgtccaatggcaagcattgggccgagcgcttaaatggcgttcaggcgatgaccaaacacaatatgttctccatgattgaaaaaactcgtttggaaagaacgcataacggttatatgctgcgcggcggcaaaccctcatcaccgaaattctttatttag

SEQ ID NO: 446645 - DNA, 1470 bp, Serratia marcescens
atgaatttaaaaaatgaaaaagaaatctccgcacattggataaatggaaagtggatcatctccggtaagcagggaaaaagcatcaaccctgctaatgggatgcctattggcgactattttgaggccggtgagaatgaagccaatatggcgatagcggcggccaaagacgcctttgaaaatagcagctggaaacacgaccgggcattaagagcccgcgttttaaacgctatggcggctaacttcggaaaatatgaagatgaacttatttatcttttagggttagaaaatggcaaggtcaaaaagcatgcaaaatttgaggtgaaaatagtgcctgaatgtttgcgctttaacgccgcgctggcgctgaccgaagccggtagagccgcatccgtggaagcgaacaacatttccattttattacatgaacctgtaggcgtagcgggaatcatcgcgccctggaactccccggcggcattggtgatacgctcactggctccggcactggccgctggcaccaccgtagtggcgatgctgcctcgccagacggcacaaataaaccaccttatcgcgaaaataatttctgagacaccagaactccctgatggcgtcgtgaatattattaccgggggccatgtggccggagcgatcctcgtcgaatcagaacaggttcccgtgatcagttttaccggcagcacagagacagggaaaaatattgccgctgtcggcgcaaaaaacctcaaacgcctgggccttgaattaggtggaaaaacaccggttatcgtttgtcacgatgccgatattgaattgctaatccctaaagttatcgcggcgcttaccgtattctccggccagttctgtatgaccggaagcagactgttgctacaagataccatagcggatgcggttctcgccgcactcatcccctgcctgaaagcattgaacgtttcccctgcggcgaatagcgacagtgacatgggccccttaattgataaaagtaacgtcgagcgcgtaaacgctttagttgaagatgccatcaaaaacggcgcagtgcccttattgagaggcggtatcgtacatgaggtgccgttatctgcgggggcgttctatctgccgacggtgctggaggtaaacgataataaaatgcctatcgtccagcaagaaatcttcgggccggtgttaacggtacaacgcttttcctctgataacgaagctgtcgctttggcaaatgacaatccctacgggttagcggccagtgtctggagccagcatatcgatcgcccattacaaattgcccgcgccctacagtgtggcaccgtgtggataaacgattgggccacgctttatgaccaatttgaagaaggcggctataaaatgagcgggctgggaagaatgcgaggcatcgccgtcattgaagattttctcgaggcaaaacatatcgtgatgacgccagggcgctctcctcagggatga

SEQ ID NO: 446646 - DNA, 615 bp, Serratia marcescens
atggaacatgcagctgcaataggcgttccctatctggctgcctggcacggcctactgaaaagcggcgccctttctcaggggcaaacgatattgattaccggcgcggcgggagccgtggggaaagcagcaatacaaatcgccagatggaatggcgcgcaggctatcggcgcggtaagagagttgccatcagatgctgacgatatcccttacatctcaacgttagatgaaggctggcaacatcaagtactcagctacacacagggtaaaggggtggatttggttctggataccgttggcggcaacgtatttaattcctgtctggaggcgctgcgggtggggggccgctatgtggttcttgccagccgcccggcggaagtcacattgaacatggttgatttataccataacttacaacacattatcggcctggatacgatgaagctcagcaaccttgatattaaaaaaagtctcgacaacctgagcgtcggttttaacgaaggccatttgacacccccggtcattaatgcctggcaatttgagttggcgccattggcatacgaagccgtcaatcagggcactaccggtgttaaacagattttaacctttcccgagtag

SEQ ID NO: 446647 - DNA, 1701 bp, Serratia marcescens
atgcagcatattgaaaatctcttgaaacagaccgacctggttaataagtatggcataggaaacgctcatttactgtggtctatggggctttatcttgacgaatcggactttgataaactcgcttcagatggtttaacggacggtggaaatgataaaaaaatagactttgtaatagtatctaatggaacattatttattgctcaaggatatcattcggcgcaacaaaatgtcaaaatagtcgccccagccaataaagcctccgatttaaatatagcacttgcttggataatatctggtcaagggtattcacctaatgaaaagctacgatctaaaataagtgagataaggcaacttatagaagatggcgagattgaagcaattgaattactatatattcataattgcgcggaatctcagcaggtaaaagatgaacttgagacttgtaaaagttacctagaaggtagattcaatgaaaaagaaattgaagtatcgtataaggaattaggaatatcaaatttagaaaaactttacatagcgttatctcaacaaatagtcgtaaaagaaaatgttgtatttgatggagacctgattgactcaatccaaggtgacggatggacttcacatgttggctttgctaacggtgcttggcttaatgaattgttccgcaaacatggagctgaattattctcagcgaattatcgtggatttatggggttaagtaaaagaagaaaaataaattcagccatcagaactacagctgaaacaaacccaaaagatttttttgttttcaataatggcgtgtctattcttacaacaaaattcattaaaaatggtaatgttttagagggtatatctataattaatggagcacaaacaaccggttcaataggttcagtgcaagactttaaaaaacttgatgggcttaaagttctgtgtaaagttattgaatgtgttgattccgataaagtaaaaaaaatagttcagtataataacactcaaaatcatataacaacatgggaccattactctaatagtgctgagcaaaaattggttgaggaagagttcaaaacctttggctatgtatattccttgaaaagaggatttgaaaatacaggttcatattttgggatagaatctgtcgctcagccgctaattgcacttcatggtgattatgcaagtgctaatagaggtaagaactatgtctttgacactaaggcagcgtatgacaacgctttccatgaatccaaggctcagcatatcttattagcatatacaatatcaaaagcaatagaaaaagttaaattaaacttcaaagcaaaaacaaataaaatctcctcagatgaagatgccttgctgtttcttcagaatctgaagtctagattttttttaatttctgttattggcgagattctggacgaacttacaggaaagcctcttgataagaagttcgtaaagtttaattataactctagcctacaaaaaaacttaagtctagatgatttgattaatatatgggtgcctgtgataacggcaattcttccttatgttattcgtcaaacagggcaagacctcacatctttcttaacaaatacagaaaatccattactacatgtcgcagtagaagtaaaaagcttgataaatgctgtaaaaggttttcaaccgatacctgcgctcgatactttatctaactacatagagtga

SEQ ID NO: 446648 - DNA, 1371 bp, Serratia marcescens
atgatgaatcttatcgtgatcggcaatcccggttattacagttttttttctgaatccaacggcgatgattcctttccagtttcgcgcctttttgaatccaccccggattcactgcgaaacaagctgcttcccctgaccgaaaaaacctatcagttccttcaggacctgccagttgtgttcatgacagagccggagcttgattataaggaggaccaggaggaagccggatacttcagtaacatccgtatcggcactataagcaatatacacacaaccaagtcgggcagagatgaggttctgggatttgactttgagattagcaataacattggctaccgatgtttacgcaatgacaaagagtacgttaaagaactagagctgggcagcttcggactgaaaaggacattctgggccgtgaaagacattcctgtaaacgagtttcttcgaattttaggcctggaggccgatgccgttgaagtgcctgccacagatcatactgaggcccctgacaatgatgagaaccttcaggtcattacggatatcaatcagtatctggaagtcatattgaatcatcctcaggacagcgatgaagaagttttctatcgaggccattctgacatcagctatcagttagagccttcactgtttcgcaaggataaacagggaaactaccgctaccgacatcatgagtcggatatgataacagaactactgaccgtgcaacccgcagagtttaaagacgacaggtatatgctagataagcttgtgcgcatgcaacattatggcttaccgacccgcttgctcgatgtctccactaatccgcttattgcactttattttgcctgttcaaaaattaatcttgatgaagaaggctctgagattgatggtaacgtcattattatgacgacccgtaaaagtgaaattaagttcttcgactctgatacagtgagctgcttagccaatctttcacgcctcccatcacgattcaaaagcacattgaaaacaaatctgtcgactccagactttaatgctaccgaagagtgtggacagctgctccaccttatccgtgatgaaaagtcgtactttaaaagtattatcgatccggcccacctgagcaaaattgttcttgttaaaggccgcctcagtaacgcgcgtatttcctctcaggcaggtgcattcctgttattcggtgaaaatgtgaccctgcccgaaacgggtctcagcacgctgaacgtcagaaaactggtgattagaggaaaagaacatcttaaacagcagcttaaccgcttcgggattaatgaaagcacggtttaccccggcatagagaaggcggccatggaaatcgccaagctctacgacgggcgaagctga

SEQ ID NO: 446649 - DNA, 774 bp, Serratia marcescens
  misc_feature (749)..(758): n is a, c, g, or t
atgataaaggcacatgtcgtctataatgccaatgttttaactcggcttatagaccacacccaccctgagtggctcgctacacttaacatagttgctcatgagctcggacacgtaagtgttattgcatggtttgaaaaacattcaccaggaataatgcttgaaccattcaaaggtgactggctgagaggccaattattggatgctgcacacacctgctgggaagaatatgctgcatgcaagttggcttcgatctttaatcatcctattgtagaggaaggttacctagaaatggcaacctcacaagttaaagatgctttcacaactgcccacgaaattattaaggaatataggacaaaaagagatttgaatagtgcggttaacggtgtggcaatcgccgtttctaacccgataaaatacatatcttattatcttggtcatctggatggcatccagaaaagagaaggggattcagttgatgctgagcagtttggtgtatattctccatttataattgctattcaagacgaattacaaaaagcatgggatactagaaaggactgggatggactgaacggtttaaatgggctccttgacgtcatgcttaaaatattttcttctgctgggatggatataaatttggattactcggagcatggaggggctagctacgttaattttccatatactccccagacacttcccggtggagaggtcgagtaccagctaatgaagttgcgcggacttatttnnnnnnnnnnggttacagatggatga

SEQ ID NO: 446650 - DNA, 162 bp, Serratia marcescens
atgcttttctttatcaagcgcaggtttaaacagaaacgctgtaggtacatgagtgaggcggagcgtagccagagtgagcaccgaacagtcatgttcctacagtggaatcaagacagccctaaggagggaatgatgtacagttaccccatgcgattaacttga

SEQ ID NO: 446651 - DNA, 906 bp, Serratia marcescens
atgcaaaacctcgagcctgtcctcatattcataacggtagccgagatggggagtttcacccgcgcagccgatagtctgggtattcaaaagggaagggcctccacggtggtccggaaactggaagaagagatcggtgtcaggcttcttcatcggactacgcgcagcgtgcagttgacggaggacgggcgtgtatttcattcccgtgcccgtgatctgcttgctgaagtagatgacctgcactcaatgtttgctggtgaccgtgtggcactccgcgggcgtttacgggtcgaccttcccaccgaggtagcgcgcacaacgatcgtgccggccttacctgacttcatggcagctcacccctatctggagctggaaatgtcaagtacggatcgacaagttgatttagttcaagaggggttcgactgtgtattgcggcttggacctgtcagggacgaaacactggttgcacgccccctgggcctgttgcgaatggtcaatgctgcgagtcccgcttatctggcgcgctatggcatcccgcgatcgctggaagacctccagcgtcaggaacatcggacagttcatttttcgacaatgctgggctcaaggccttacggatgggaatatccggacggtgacagtttcgcaacattacagttgccaggtgcgctacacgtcaacagcgcgcagacatatgatgccgctgcccttgccggtcttggtttaattcaggcgccactcctggggattggccaatactttacgagtggtgcgcttgtggagatcatgcctgatcttcgtcgccgggcgcttccggtgtccctcatcgttgcacatcggggcaacctgtcgcgccgggtgcgcgtattcatgaagtggatagaagagatcctgaagccttacctggaatag

SEQ ID NO: 446652 - DNA, 873 bp, Serratia marcescens
atgtttttagtaatgggaatcacgggaaatgtaggcggcgcgacagcaaggcatttgctagctcaaggtaagaaggtacgtgcgctggtccgcgatcgcgagaaggcggttaactgggcaaaccaaggtgtggaactggttgacggcgactggaatgattcgggatctatcgaacaagcactcaaaggtgtcgaaggcgtgtttgttatgttacctccggtttgggcgccgtcgcccgattacaaagaagcaaagcgcgtgattgcaaattatatcgaggcactctccagggtagtgccaccaagagtagtggcactttcatcaatgggggcgaacagaaacaccggacacggggtgatcatggctttgtcgctgttagagcaaggcttttgcgaactactatcacccgttacgtttgtacgcgcaggcggattcttcgaaaactttcttttcggtttacaggccgctcggagcggaaagctaccggtcttctacaatccgacaaaccggaaatcaaccatggtcgcaacaaacgacattggtgcagagttcgcaacccttttgaccggtccggcgtggtcagggcagcgcatcgtcgagattggctcgatggtcactgcggatgaagtcgcggagcagttgggcgaagtcctgaatctcgacgtgaaggcctttgcaatcccgcggacagggtgggctgaagcgttagagcaattcggtatcccgacgggccacagcggaccagccgaagacatgtatgatgccgtgaatgcgggatggatggacctcggcgtcgagggaacagaacacgtagcgggaacgacacctgcacgcgacgtcttcgctgcggctcaaaaggcaatgaaggcataa

SEQ ID NO: 446653 - DNA, 336 bp, Serratia marcescens
atgaaagataaaacctcatttgactcattttcagctctcgatatgcgtgccggcaccatcatcagggttgaggagagtaaaacctcaaaacctacctggcgaatgactattgacttgggacccgaactgggaacccgcgtgtcatgcggtgcgtataccaattatgatgctcttgaactgcagggaatacaggtaatctgcatcgtcaatctgggtactatgaagatgggacctgaaaagtcagaggtgctggtacttggtgtgtctgatggttcaggcgggacgatcccgctgacgacagaaaagcgcgtcgataacggcgaatgcgttttctga

SEQ ID NO: 446654 - DNA, 957 bp, Serratia marcescens
atgctttcttcgggacaacgcctgggcggcatggcgggtgtgcttatcgcagccgttctctggggaacgaccggcacagcggcgacatatgccccagggctgagtccgctggccgtaggggcggtggcgatggggattggtggactgttgcagggtcttatcgctgcagcaacaataattcgccagcgcgttctgataatccggaactggcatttcctgctgaccggagcagtggcggtagcggtttaccctctcgctttttatgcttccatgcacaatgccggtgttacggtcggcacggttatttccatcggctctgcaccgatcctgtccgccctgattgaatgccaacttgacggtctccgcctgacccggcagtggatgtgcggagcgggcgttggcgttacaggcatggtgctgctctgcctggcagaaagcagcggaaacagtaccgcaaatgaccatgccatggaggggatctttctgggcctgctggccggcttcacctatgccttttactcgtgctcagcacggcggttaatgcaggccggggtagcctctcgcgccgcgatgggcgtcatctttggtgcaggcggtattttacttatgcctgtgcttctgatgacgggagcccccctcctgatggcatggaacaatgccgccgtcggtatttatatggcactggttccgatgtttctggggtatgtctgttatggctacggacttgcgcgtattccggccagtatggcaaccacaatcactctgctggagccggttatagccgcgctgctggccattctgctcgtcggtgaaaggctgccgcctttaggatgggcaggagtcggtctgatagttgcgtgtctgggtatcatcaccgttccgggcggaaagttaagtttcagcctgggccagcaacggaaagaaaattttgaaatcgcagaaaggaaagaatcatga

SEQ ID NO: 446655 - DNA, 588 bp, Serratia marcescens
atggcatctttatctgcaggttctgaaaccgcctacgaaaaattgctcagtgctgcgcgcgtccttttttacaatcatggcattaatggcacggggattgacgccatagtaaaaaaagccagcgttgctaaaaaaagcctgtacaacaactttgcatccaaagacgaactggtggcggcctatctcagggtacgccatgaagaatggctttctttgtataaaagccggctggaactggccatgacgcccagagagcgggtgatagccgttttttctgcttataaagatcatgctgaatatgcctatgagaacggttttcgcggctgcggcctgctgaacgcggcggccgaacttcccgccggggcaccgggccgtcaagccgttcgtgagcacaaagaggaagtggaagcgatcctagctgcgcatctgactgagctgatgaacggaaaggctgaaagcgcacgctgtgtggcaagacattttgcctttctgctggaaggcagcatttcacgagccggattggaaggtaacagtgactgcgtgacgcaggccagcaacattgctgaacagatgatggaggcgtactga

SEQ ID NO: 446656 - DNA, 711 bp, Serratia marcescens
atgtttctcgaaaggtgcagccgcattctgggggaacttcaggcggcagaagatgaactcagcagcctgactcaacaccctcgcggacgattaagggtgggtctggcactttcggcagggctgccgctgcccgtcctgtcggcgttcatggcacaccaccccgggatcgaactcgacctggattttaccgatcggcttgtcgatgtgattgatgaaggatttgatgtggttatacgggggaactcgcttcgggattcgcgtttggtatcccgcccgctgggcccctatcgcgctatcctggtcgctgcaccggcctatctgaaagaaaaaggtgtgcccgtgaaaccgatcgatcttttgaatcatgaatgcctgcactatcgctcaacgcctaccggaaaggtgtacccgtggccgctggaacactcagatttcgcagccgaagggttttcacttcccctgacgatggtatgtaatagcctggacgcgctgctgtatatggccattgcggggcgcggtatagcctgcgtaaccgacttctctgccaggaacgcggttgctgatgggcgtctgaaaacaatactggatacctgcgtaaccggctccgatactatccatataatgtggcccagcaaccgaaaaatgacgccaaaagtgcgcgtcttcgttgactttatgctcgcccatttcggcgattatcttgtcacttaa

SEQ ID NO: 446657 - DNA, 408 bp, Serratia marcescens
atggtcactactgaacatctcgatgcgtatctcaaagccatgggcagccgtcatgttgaaggaacccgagtccacatcgcggataacgttacactccgcagcccaatcgttcctgttccctttgaagggaaagagcaggttgtcagagtccttacccagctccttgacaccgtggacgcctttgagccagaacttcttttgcgcgacggatcagactttgtcgccgttttcactatcaggttcggtgaccacactattgatgggatggatcacatacatctaaacgatgccggacttatcgacagcatgactgtggtttggcggccgctggcgtcagtggtcgcagtgcagcaaaaacttgctccgaaactgggaggcaaaccgatgaagctggttaccctggaataa

SEQ ID NO: 446658 - DNA, 627 bp, Serratia marcescens
atgaaccctgaccggatattactggctgaaattcgcgggcgggaagcctgggatgcgctgaaaatcgtcggtttcgggcatgagggattaatgacccccctgcatgcgggcagcccggaagaatgtattgaagggctgattgaccgctgctatgaaaacctcgactgcagggacatgcctttcgacgtgctgttacgtaaggtgcttaagagcattgatgtgatagtcagcattgatattcacggtgacatacgccgcatgagtgatgtttattttaacccccttcatctcaaagacatgagaggtgtattcagtaaagggcttcaatacataaattatcgaattacgcaaccctcgtttaaatatgaaggtgaccgaaatgaaaaaaacaatatcttccgcattattgcgtcatattcaacttccgtcatggccgctgacgcctgcgaagtggtgatatgtatatacggtaaagccaccggtaacggcggcggaaatgaatgccattctgctgaacgtgcattctttaatatcgtcaaaaagaacaagcacggttttctaccggttattgcaattactgcaaacgctgaacggcaccgacagaataacgctgacaaaagaagctaa

SEQ ID NO: 446659 - DNA, 846 bp, Serratia marcescens
atgactacgcaatccgttagctcgaatgaaaaaaagcttaccaaaggcgatatttttaatatgttcattcgctcaaatttcctgttgggttcatttaacttcgaacgtgtacaggcaatgggctactgtttcattatgatcccggccatcaaacgtttatatggcccaggcgcagaacgtaatgaagcgctgaaacgtcacctggaatggtttaatacccaacctttttgcagcgcgcctattttaggggttaccggggcgatggaagaagaaaaagccaatggtgccaatattgatggcagcagtatcagcggcgtaaaagtcggcttgatgggaccttttgccggcgtcggcgacccgatcttctggggtactatccgcccggtactggcggcgttaggggcctcactggcacttaatggcagtatcttcggtccgctgtttttctttctggcatttaacgctatccgcttgccggtaaaatattttggtctgaaatatggctacgagaaaggacgtgaaatattggccgatctcggcggcaatcgtattcagaaactgactgaatccgcctcaatccttgggctatttattatgggggcgctggtctgtaaatggaccaccattaatgtacctattgtggtttcgcgtattaccggtgccgatggccaggtggtcgtgactaccgtacagggtatattaaatcagctattaccgggcatgttaccgctgctgctgacgctgtttgtcgccaaactactgcgtaaaaaagtcaatgcgctgctgatgattatggtgatttttgttatcggtatcttaggttattgggccggtttcctggcgtaa

SEQ ID NO: 446660 - DNA, 807 bp, Serratia marcescens
atgactacgttgcaaattgtattgttactgctgattgccgccattaccggcatgggcagtgtgctcgatgaaggccagactcaccgtccgctggtggcctgtagcctggtaggttgggtgctgggtgatattaccaccggtgtcattctcggcggtactctggaaatgatggcactgggctggatgaacgtcggtctggccatggcccctgataccgctattgcctcggtgatctcgaccattctggtgattaatacccatcagggtgtaggggaaggtattgccattgccgtggcgttagccgccgccggacaggcactgaccatttttgtgcgcacgactacggtgtttttgatccaccgcgccgacgcttacgcggaagcgggcaatatgcggggcattgagataatgcatattaccgccctgtgcttccaggcgctgcgcgtgatgatcccgacctttgtcgtagtgatgatgagcgtcgattccgtgcaggtaatgttaaacggtattccttccgtggtaacccatggcctgcaaatcggcggtggcattattgtggtggtggggtatgcgatggttatcaatatgatgagcgttaaatatctgatgccgttcttctttgccggtttcctgatggcggcatttaccagctttaacctggtaggtctcggcggtatggggttagtgggtgccttgttgtatatgcaacttaatccgaaataccaaccgaaagccgccgttgccgcccctgctggtgcccacagccaggttccagtaaatgacgaagatgatttggacgcataa

SEQ ID NO: 446661 - DNA, 477 bp, Serratia marcescens
atgaacattttattagctcgcattgacgaccgttttattcatggccaggtcgtcacgcgttgggttaaagagtaccccgctgagcgcctgattgtggtctcggatgccgtagccgcagatgagttacgtaaatcactgctgatttccgttgccccttcaagcatgaccgccaatgtggtgtcggtagaaaaaatgatcaaggcctaccacagcgcacgctacgagggtgtcagtgcctttttattgtttgaaaaaccgcgtgatgtactgcgactgattgaaggcggggtcaagattgacagcgtcaacgtcggcgggatgcgctttgaaaacgatcgtgagcaggtgaccaagtccgtcagcgtcacggcagatgatatcgtggcgttcaaagcattacaggcattgggtatccggcaggaattgcgccagttaccttcagattctgcggtcgattttatgactaagctgaaataa

SEQ ID NO: 446662 - DNA, 429 bp, Serratia marcescens
atgaatacagcaatcatcattgcgactcacggtgcagcggcacaacctcttttagataccacccagatgattgtcggccatcaggagaatgtctgtgccatctctttttttcccggcgagaacgtcgatagcctggtaacaaaatttgaacaggccgtccagcaaatggatctgcgcgatggcctgatgtttttggtcgatatctatgcgggcagtccattcaatgccgcaagtttgctggcgataaaaaaagaaaactgggacgtggtcacgggggttaatgttccgatgctggttaatgtgtttttagagcgggagggtacggaggatttcgatcagctgattgaaatttcgaaagatatggcaagagaaggcgttaagtcactcaagcaaagtttaaaaaataataatgccgaagaggaactttaa

SEQ ID NO: 446663 - DNA, 2874 bp, Serratia marcescens
atgaagcggatcgacaaaatttatgcatggatgtttgagcgtagcggccagatggcatggggatcggtttgccagagaggcggattcacaacccaggagatcgccgaagagttagccattttacgcaataacgtcagcttcgagttaaacaacctgctgcgcgccgagcggatcatcaaggttaaaggacgaccggtcggctatttgccaaaagccagtgtcgaacactggctcggcgtcagcctgtcactggtggagtacgacagtctcgaggtgcttactgcactggctccgcaaagccaacaacccattacggcaagcccgacgcccgctgcaaccggcgtggtcaataatccctttcacagcctgattggcgccgatggcagcctgaaaaatcaggtcgagcaagccaaggcggcggtactctatccccctgccgggttacatacgctgatcaccggacagactggggtcggtaaaagtatgttcgcctcggtgatgtttaattacgcccgctttgccggtcgttttgccgaacagacaccctttattatttttaactgcgcagattacgccatgaacccgcagttactgatggcgcatatctttggctatgtaaaaggggcctttaccggcgcggatagcgataaaagcgggctattgcaaaaagccaatggcgggatgttattccttgatgagatccatcgcttgccgccggaagggcaagagatgatattttattttatggataccggtacttacagccgtctgggcgagaccgagcgcaagcagaccgctaacgtactgttaaccggcgccaccaccgaagatccggaatcgtcgttgcttaaaacctttgtgcgccgtatcccgattattatcaaccttccctcctttgaagagcgcaccacccaggaaaaaatcgagctactgaaattcttactgaataaagaagcccaccgcattcaaaagccgattaagattgatgccgaagccatgaaagcgctgatgggtaatacggcttttggcaatatcgggcagatgaaatccaatgtgcagctggtctgcgccaacggctttttgcattgtctgcatcaggatattattgatattacttttcgtgatttaccgggcgagattaaagatggatttttccatctcagtggccgccgcgatgtgatgcagcaaattaccgaccgcctggaaccttttctgctggtgcgtccggaagatatctctcctgcgctgcaagaggccgatcagtacgaaccctcttttaacctgtacagcattattgaaggcaaagtggcctttatgcaggaacgcggcctttcccagcaagagatcatccgctttatcaccctggatattaatattcatctcaacagcttttacctgaaatttcaaaacggcaacaagttacaggaaaacattctcaaactggtcaatgaggatattctgcgctttgcccagcaaatgaaagaactcaccgagcgggagctgaatcaacggctgaccgagcgttttttactggcgttcagtttgcatttgaccgcctttctggaacggatcaaaaaccatcatccgctttcatatgccaatattgatgacgcccttgagggccgcgcccgtgaacatagcgtggcgctggcgcttaagcagcagatcgaagagaaatttgctattagtgtgccggatatggaagtgatctatctgaccctgctgattggctccctactgaaaacccagcaagaggaacgggtggcggtgctggtggcgatgcacggtagcaccaccgccagctcgatggccaatgtggcgcataaactgctgggcgaaggcaatatcgatagtattgatatgccgctggatctcagtccgaaactggttctcgaccagatgcgtcaacgtattaaagaactggatcgcggcaaaggggtactgctgctggtggatatggggtcgctgctggggtttggcgatatcattatgcaggagaccggtattccggtacgcaccttgaccatggtatccacaccaacggtgattgaggcggtaagaaagtcggcggtgatgggcatggagctggacgatatttacttttcgctgtgtgattttaaaggctatggcagctaccagaaaaccacccagcagcaagacacctcgcaactatgccaaaagataaaagcgattctcagcgtttgctccaccggacagggcaccgccgaaaaactgaaagtgtttgtcgatggcatgctgcagagtatgggacgcagcgatgtcaatgtgattgccatgccactgggcgaagtggataaccaacgcgaaagcctgcttaaacgctatgattttattatgtcgctggggattgccgaccctaaaattgacgtgccctttctgccactggaagcgctgttctccagcgatggtgaagcgcagtttactttactggtacagggcaatcatttgtatcagccgctggtacgtccccatgccatggtgcgcaagatcagcgaagagagtatgaacgagtttctgacctacctgaacccgaaaaaggtggtcgatctggtgctggaatttatcagtgagctggaaagtgttgaggggcatccctttgataacggcatgaaggttagtctctgtgtgcatattggcaccgcccttgagcgtatggtgcaacataacggtctgacctatagcgggacattaagcgacgccgatcaacttaagctgggtgtttatcagcatattgcccactctttccagaaaaagctggctattaccctggatgacgatgaactgagctgcattttggaaatggtcaaggaattatcaatgcgctctattgaacctcaggatgaattattgtga

SEQ ID NO: 446664 - DNA, 1032 bp, Serratia marcescens
atgtcaggtggtatgtttgttggaatgaacaacactatcactggcggtttaaatgccgtactacagggacaaacttccgtatacggcaatatgatcagtgttatcgccgtcagttcatttacattatttatcacttatcgtgggtatcagactctggccggaaaacttcaaaccccgatagaagatgtcgtatgggatgtcggacgaatgttgttgatcatgacgttcgttttaaatcttggcagttggctggatttagctatctcggccattaatggattaaaatatggtgtcagcggcgacgataatgtctgggcattgctcgataccgtatgggaaaaagcacagacaatcggacaaaaactttatcaaaatgatgattccaactatgtaaaacttaacggagggattgctgaaattctggtctggggaggcgctatcgttaccctgccattcggctcgaccgttaatcttttagccgaaatcacaatagtattaatgaccactaccgcgccgatttttattttctgcttgctatatagatttctaacctccatgttcaataactggttgaaaactatatttaccgttattctgacgattatgttttcagcattgtcaatcaggatcgtaattaattatctgaacggaatattggataaggcggtcagtttcgcggataacgccaatatcatcacgctcggcgttcagtgctgtgtcgccggtgttatttcaggcgtcatcatctacttctcggcaaaagttgccagcgcattaggcggtgccgccgtgcaggccgtgttacagggtgcagccatgagcggactgcgcgggctggccagcaaatctgccgacgttgccggacccggcataaagaccgggggccgactgaccgccaaaggtggcatggccgcagccgcgacaaccggcagattcattgccgcaggggcgggcaaaacggtgagcgcctggcagaaacgtgccaccgccattgaaagcatgaaacgccagaatcagcagcgccatcgttaa

SEQ ID NO: 446665 - DNA, 222 bp, Serratia marcescens
atgcgaaaacccatttatcacgtatttgtcacccaggaaagtcaacccgatgcacagggcgaaataaacacgtattggaccatggttggcgtggcgtttgctcataacggtaagtctggcctgaatatcatgctgacacccggtattgctgtctccggcaagctggtgctgcttgaacccagagaagatagcggcatttcgcaggataccgcctctgcttaa

SEQ ID NO: 446666 - DNA, 225 bp, Serratia marcescens
atgcagtttgcgggtcccgatacgcgcctgacgtactcttatcgttttaacaaaatcgacgatccggacatcacgcgcccgctgcttactaagccgtgtattgtgctgataccaggcctgtcggctgtgtcccaggaactggcagacccgggtaatggttattttttgggtctgtttttgcgtgaggacttgcctggccgcttttttatgacactgatcccatag

SEQ ID NO: 446667 - DNA, 189 bp, Serratia marcescens
atgagccaaccgtctgcccctttaactcctgagcaaaggatcagggaacttgaagaacagcttgagctggtcacccagaaagcggagttccttgatgctgtcgttaacgtgctgaaaaatgactatgggatcagtgtcataaaaaagcggccaggcaagtcctcacgcaaaaacagacccaaaaaataa

SEQ ID NO: 446668 - DNA, 696 bp, Serratia marcescens
atgtctctgagccgaaaagcctttaaacgccagcattatcccgtcgatatcatcgcgcaatgtgttcgttggtatctggcttacgctctgagcctgcgcaatttggaggagatgatggcagagcgcggtattaccgttgaccattccacgcttcaccgttgggtcatccgcctggttccgctactgaataaggtctttcgccgacataaacggtccgtgggtcgtcgctggcgcatgggcgagatttatatcaaaataagaggccagtggaaatacctataccgggccgtggactctaacggccagaccatcgactttctattgactgccaaacgggatgcgggcgcagccctgcgtttctttcgcaaggctattcgtcttcatggcgaacccgaagtggtcactatcgataaaagtggtgccaacacagcggcactggccatacttaacggcgataaagcagaagatgaaaccatcaccgtcagacagagtaaatacctgaacaatctgattgaacaggaccaccgaaatatcaaacggcgaatacgcctgatgttgggattcaaatcatttcggcgggcgcagacgatattggcgggtatcgaggtagtgcacatgatacgcaaaggacaacttcagcgtcttggcggggggcatttatcaccggcggaacagttttatctgttggctgcctaa

SEQ ID NO: 446669 - DNA, 171 bp, Serratia marcescens
atgacgcaacattccagtagttcactgacccagatgcctggatttatcatccaaacgaatcagaaaatcgatactggaaaaactctaaagctgtggccaatttttgttgaccacttcattgcggagcgcgccaaccagacccaactttccttgatggtgataccggagtga

SEQ ID NO: 446670 - DNA, 1383 bp, Serratia marcescens
atgaaaatatataataaattgccaatggcgttggcggtaatggccgcgctttgctctggatccgtactcgctcaagaatttacccaagaacaaatcgatgccattgtggccaaagcggtcgataaagccctggcggaacggcaggcgaaaatagataccgccatgaataagaaagccgatgtcattaccgaaccgcaaagcgccgcacagtcgccggatatggcgatcccgtttggcgtcaaattttctggttacgcccgttacggcgcgcagttccagggcggcgatcagaaattcgtcggcgttgacggctcctacaacggcgcgtccgcactgggccgcctgggcaacgaaggcaacggcggcgaattccagctgtccaaagcgttcaaaggcgatagcggcgcaatctgggatgtcaatgtgatgttcgaccactggggtgacgaggtaaacctcaagaaagcctatgccggcgtcaccaatattctggcctcgaacccgaatgcctatctgtgggccggccgcgattttcatcagcgtccgcaacagggcatcaacgactatttctggatgacccacgatggccagggcgcgggggtgaagaactttgatatcggcggcgtacagtttgacgtcgccgccgtcgctgccgtcgaatcctgtgatccgagagtggcggaagacgaagccaacccgtcgcgtatcacctgtaccggtggttcaggaaccggcgataaaggcaactacgcgctgacctcgaaaattcacggtatgaaggtcggcccgctggatttggaactgtacgccaactatggcttcgattccaaagccgtggaaagcgatgagcgcctgaaagcctggcagggcggcgtggtactgagccataccggcgacaaaggggtgaatagagtcatcgcccgttactccaacaatgcggataacagcgtttacaacaaaacggacgagttgacggcggtttacgccagcttcgaggggaactacaagtttactcaacaggcgcaagtggaatacctgctcgccttccatgattactccaacgacgccgacggcactgacgatcgccgcaactacggcgcgattgtgcggccgatgtattggtggaacgacgtgcattcaacctggctggaggcgggctaccaacgagtagactacgaccagggcggcgataaccacggctggaaactcacgctgtcgcagaatatttcgattgcgatggggccggagttccgtcctatgctgcgcttctacgttaccggcggcgaggtggataacaaacataccgcacgcgtgaacggtactgacgacgatacccaactggattcgttcaacgtcggcgcaatgtgggaagcctggttctga

SEQ ID NO: 446671 - DNA, 303 bp, Serratia marcescens
atgattgaattggaagaggcggtcatggagattatcgtcaacgccggccagtcgcgcagcctgtgttttgaagcgttgcgcgccgcacgtgaaggcaacatcagcgaagctaaagcgctgttgcagcaggccgatggcttctcgcgccaggcgcatcatatgcaaaccaaactgatcgagcaggatgccggtgaagcccgacaacctatgaccttgattatggtacacgcgcaggatcatttaatgacgtcgttactggcgcgtgaactatcggaagaaattattcatctttaccaacgttaa

SEQ ID NO: 446672 - DNA, 1404 bp, Serratia marcescens
atgaaatacgaatttcccgagcacttctggtggggcagcgccagctccgcgctgcaaaccgaaggggatagccggcagggcggtaaaagcccgacaatctgggacacttggtacgccaatgagccctggcgttttcatcagcaggtggggccgcaggagacgtcaaccttttaccggaactggcgccaggatatcgcgctgctgaaacggctcaaccataacagttttcgtacctccctcagttggtcgcggctgatcccggacggcacgggcgaggtgaatccgcaagcggtggcgttctataacaacgtgattgatgagctgctggcgcagggcatcaaaccgtttattacgctgttccacttcgatatgccgatggcgatgcaggagaagggtggctgggaaaaccgtgacgtggtcgcggcctttagccgctatgcgcaggtctgttttgaactgtttggcgaccgggtgatgcattggtttaccttcaatgagccgattgtgccggtcgaaggcggctacctgtatgatttccactatcccaatgtggtcgactttaagcgggcggcgacggtggcataccacacgatgctggcgcatgcgtcggcggtgcaggcgtttcgtgccgggctttacgccggggagatcgggatcgtgctgaacctgactccgtcctacccgcgttcgcaaaacccggcggatgtgagtgccgcgcatcacgccgacctgctgtttaaccgcagtttcctcgatccggtgctgcgcggcgagtacccggccgagctggtggctttgctgcaaacctgggatcagcttccggcttgccaaccaggcgatcgggcactgatcgccgaaggaaagattgacctgctcggggttaactattaccagccacgccgcgtgaaatgccgcgacagcgccgtaaacccgctagcgccctttatgcctgaatggttattcgaaaactatgaaatgcccggtagaaaaatgaacccttatcgcggctgggaaatttacgaaccgggtatttatgacattctgacaaacttgcgcgttaactatgacaacccgcgctgttttatttccgaaaacggcatgggcgtggaaaacgaacaacgctttgtggaaaacggccaaatcaacgatcgctatcgtattgagtttgtttccgaacaccttaaatggctgcataaaggtattagcgaaggcagtaattgcctcggctatcacatgtggacgtttattgataactggtcatggtgcaacggatataaaaatcgctatggcctggtgcaattggatttagccagccagcaacgcgccgtcaagaaaagcggagagtggtttgccgccaccgccgcagacaatgggtttaacgaactggagacaaatgatgattga

SEQ ID NO: 446673 - DNA, 1329 bp, Serratia marcescens
atgagttcgttatatcagtcaatggttgccgtcatcgagcaatccatcaccccgctggccggccgcctcgggcagcaaaaatatgtcattgccatccgcgatggttttaccgccgcgttgccgtttatgattattggctcgttcatgctggtctttatctttccgccgttttccgccgacaccacgaacggttttgcgcgtggctggctggatttttcgcagacttatcgcgaacagctgatgttgccgttcaacctgagcatgggggtgatgaccttctttatctccgtggggataggcgccagcctcgggcggcagtttaatctcgatccggtgatgtccggcttgctggcatttatggcctttttgctggtggcggccccttatgccgacggcaaaatatccacccagtatctttccgggcaagggattttcaccgccctgatcaccgcaatttactcaacccgcgtttacgcctggcttaagcagaacaacgtcaccattcgtctaccgaaagaggtgcccaccggcgtggcgcgttcgttcgagatcctgatcccggtgctggtggtgattggtacgctgcatccgctgaatctgtttatcgaagcgcaaaccggcatgatcctgccgcaggcgattatgcatctgctggagccgctggtgtccgcctcggattcgctgccggccattttgctgtcggtgttgctgtgccagattttctggttcgccggcattcacggttcactgatcgtcaccggcatcatgaacccgttctggatggcgaacttgtcggcaaaccaggcggcgctggcggccggggcggcattgcctcacgtttatttgcaggggttctgggatcactatctgctgattggcggcgtaggttcgacgttaccgctggctttcctgctattgcgcagccgcgttgcccacttgcgcaccatcggcaagatgggcgtggtgccgagcttctttaacatcaatgaaccgatcctgtttggtgcgccgatcatcatgaacccgatgttgttcatccccttcgtttgcgttccgctggtcaacgccgtactggcctataccgcgacgcgtttgggatggctggcgcaggtggtgtcgctcacgccgtggaccacgccggcgcccatcggtgcctcctgggcggccaactgggcgttcagcccggtggtgatgtgcgtcatctgtatggtgatgtctgctctgatgtacttgccgttcctgcgtgcttacgagcgctctttaatgaaaaccgaagagcaaaaagtgcagaacggggcaccgctggccggaaccctcggcaacaactga

SEQ ID NO: 446674 - DNA, 315 bp, Serratia marcescens
atgtacaaaatcatgctgtgttgttccgccgggatgtctaccagcctgctggtcaggaaaatggtcgaggcggcggatgaaagagggttgccggtcgagatcgatgcctatggcgtagccgagttcgatacgcagtttccacgctatcaggtggtgctgttggggccgcaggtaaaatatatgcttaaaacactgtcagaaaaggctgccgtccaaggcatacccgttcagcccattgatccgatggactacggcatgcagcgcggtgagaaggtactggactatgctctgtcgctgatcgcagcggcgcactaa

SEQ ID NO: 446675 - DNA, 954 bp, Serratia marcescens
atgtcaacaatcaacgatgtatcacgtttagctggggtgtcaaaagccacagtctcacgggtgttgagtggatcgcgcggcgttaaggaagccagccgtctcgcggtattgcaggcagcagaagagctaaattaccggcccaatgtgatcgcgcaatcattgctcagccaatcgacgggctgcatcggggttatctgcgcgcaggagaacattaaccagaccacaggttatctttatgcgctggaaaaacagctcagccagcatcaaaagcatctgttgctgcgtttcgccaacaccaaagcgggcgtaatgaacgcgctggacgaactcacctgtgggttgtgcgacgacgtgctgattatcggcgcccgtttcccgctcaacatcccgaatgacaacgtgatcctggtcgattgcgttgaggccgacacgcccaacagcattcagttcgaccacgcttttgccactgaaagcgcctgcaattacctgattagccagggcagacgccaaatagccttgatccatccggatgccggcggctctgccgatcaactgctgctcggttacaagcttgccctggaaaacaactttttgccgttcaatcgcaacctggtgtttatggattcaaccacctcttccgtcgcggtacaggtgctgctcaataacgccactacgctcaatttcaacgcgctgctggtggcggacgagcaggaggcacagcgggtgattactcagctacaggcgttcaataaatccgtaccggacgacattatggtctttagcctggccggttcgctgcatttacccggcattccggcgatcccctccatcgaatattcaatggatgccatggcggcgcgcatcgtcagttggttgacggagaaaacccgggatatgctcggtgcctgcgtgctgcgcggggatttgattatcccggacagacacaaacgttaa

SEQ ID NO: 446676 - DNA, 150 bp, Serratia marcescens
atggggggacctggccaaagtgtcgactttgagctgacctatgctttgctgaaagatgctgaacaggtgaaagtgtatcaggacaagatcaagacgctgcaggggagcaatcagcccaaactggttgagacgcctatcgcggtagaatag

SEQ ID NO: 446677 - DNA, 1035 bp, Serratia marcescens
atgaacaagataaaagttatcggtatcgatctggctaaatctgtctttcaggtttgcgtctggatgagcgacgggagtattgcatctaacagtaatatttcccgggctaaattgctggataccattcgtcaatttcctgcaggttcaatgattgcaatggaggcttgcgctacttcccattactgggatcgcacttttcagccaatcggctttcaggtccggctgatccccactcaacacgtaaaagcattaacacatcaccagaaaaacgatgccaacgatgcgctggctatttgtgagacagctctgcgcccgggcattcatttcgtagctataaaaacagttgaacaacaggatattaaggctctcggagcagcccgtcagttgatggtagaacagcgtactgcgctggcaaatcaggctcggtcactggcggcaaaacagtgtatcgagatccctgtcgggattcatattttacagcaacgtctggccgacattattgaagatgcagagcagttaatttctcccgtgctccgccaattactgttctcgttgctcgaaaatatacattcacttaatgaacgcattctttttgtagagcacattcttgcggctctttgccagcaacaacccaaatacaaagtactgatgacaataccgggtatcggtccacttattgcagcagcctttctgagtgaagtgaacgcagggcagcttactaacggacggcaattatctgcctggtgtggtctggtccccaggcaacacagttcaggaggcaaaagcagcctttctttgatgaccaaaaacggcaatcatgacctccggacactgatcattcatggtgcgcggtctgttgtgcactgggctcataaacgcgatgacgcactggatgtgtggctgaaacggcttactgaacgaagaggcaaaatgaaagccacggttgcgctggccaataagatgacacgcattgcctggcgattattgacagaacttacaagttttaacattaacagggctttcgctatgagctaa

SEQ ID NO: 446678 - DNA, 219 bp, Serratia marcescens
atgataaagcaaatgcgccagcagggtgcgtatattgtcgataatgccactcaggttggttgctctgagcggactgtcagacggtacctgaaatacccggaacctccggccagaaaaacacgccacaaaatggccaaactcagaccgttcatggactatatccagctgtgcatcgtgcacatggtgcgaaacagcctgcagttctctactattcactga

SEQ ID NO: 446679 - DNA, 858 bp, Serratia marcescens
atgaagctttcccgccccacggtcattaactatttacgcctggcgaaagcccgtgaaattgtttctgtccgtctgagcggcgatcactttcgccttaacgatctggccgatcgcctgactcagcaattcagtctggatgaagtcaacgttattcctggggaggggctctctgatgagagccgccttcatgaagtctgtgaagccgccgcccatattctgttaaattttgtccagcctggcgatcagcttggcgtgagttggggctcaacattgagccttatctccgacagcgtcccgttctggtcggtggaaaatctcactatacgtcagcttatcggcgctatgtcaaacccgctgctgccaacggcggaacgctgttcgattgagatagcccatcgcctgaatgcgcaatgcatcaacctgaatgtcccggcagtatgcagttcatcggagcttgcggccatgctgagggcggagccgattattgctgatcaactatcccagctaaaaaactgcaataaagccattttcaccgtcagccccgcaacccgcgacggccatgtcactcaattcaatattgtcaccgaacaggaggccgaacgctatattaccaacggtgccgccggtattattgctggtcgctttatcaatgcggaaggcgagccaatgaccgggaatgttgatgcgcgtttgatgggaattgaattaacgcatttacgccagatgagcggattgctggtggtatccggacaagaaaagctctcggcggttatcgccacattaaaaggcgggtttgcaaatcatctggtgctggattcactgttggctgaggctatcctggcacaacaaaatgcataa

SEQ ID NO: 446680 - DNA, 774 bp, Serratia marcescens
atgctgacgtccatctccaccctggagatgctgattgagcagcatgcctttgacggtagccagatagcgcccgcttttcgcggcaacgaagccactgacgcctgggtaggtattcgcggcggacgctatcgcgattttgcgccgctgccttatcgtggcgcctcgctggagtttgcccgcgtcccgctgagtctctactccctgacctatgttaatgatgcgcagcatgatgtggcctcgctggaggcctatgccaggtttcgggccgacacgcgaacccacggcattacacactttctcgaagtgtttaatccgggtatcgataccggcctcacggcggaggcgatcccggcatttatcaacgactgcattattcgcacgctggcatcactcacccgcgccgagcgtccggccttcctcaaggtggcctataacgggcctgacgcgctggaggaactggtcactcacgatcccggcatggtggtaggggttcttggcggcgggcaagggacgcatcgcgatacctttgagcttcttgcgcagactgaacgccacggcggtcgccttgccctgtttggccgcaaaattaacgccgcagaacatcagccgacgatagtgcagtggatgcggcgcgttgtcgaccaggaggtcagcccgctggaggcggttcgcggctatcatggcgatcttcaacggcagggcttgcgggcggatcgttcacttgaaacagatagccagataacagaagatgtcctccggtcagacgcaaaataa

SEQ ID NO: 446681 - DNA, 1485 bp, Serratia marcescens
atgccaaccccctacacccccctggttctggcgattgacgctggcggtacggcagtaaaagttgcgctgttcgacgcgacaggccgtatcgttcgtcatcgcaatgctgaagtcactacgctgcactacccggatggccgggtggaacgcgatggcaatgcgttctggcaagccacgcgatcgaccatccgtgaaatccttcaggacgatatcgcccaacgcgttgtcgccgttgggtgtaccggttttggcaacgggatttttttagttgatgacgccggtcagccaacccgccccggcattgtctctgttgatcatcgcgcccagcccattgtcgaccagctgagtgcccgacatcaggctcaggctctcagtcatgaaaatgggcaccgcccgtggggaggacaaacactatttcaactggttgggttggcgcaaaacgagccggaggtaatggcgaaaacccgctgggggttggcctgcaaagactttattcgcttctgcctgacacaggaagccgtgaccgatccgtcggatgccagcggtggtgggctaatgaacctggaaagacaagattactccagcgaagcgctgacgatgctggggcagccgggcctgagggataaactgccgccggtggcgaacagctcatcgccggcagggcgcatcagtgcaagggcggcgcaggaaactggcttgccagaaggcattccggtggcgggcagtatgatggatgtcgcggcctgcgcgctcggcgcaggcgtggtctctgacgaacacatggtttttatcgccggcacctgggcgattaacgcgctggaagtcacccgaccgattcaggatagctacccgctgttgaatatgctgtatcgcgatggcgcagcccgtctggtggcggaaggcagcccctcttcagccgccaacctcggctggtatctgaaaaatgccatgggcgatcacctgagcgttgaagaggcgctgacgctggctgaaggctgtgccattggcagccagcgctgctacttcatgccctatattcacggccccaaacctaatcagggtagttttgtgcggctgagcgcatcggataatcacgcctcaatgattcgcgccatctgcgaaggggtcgcctttgagcatcgtcgccatgcggaaaccttgatggaatatagcgagaaacgctggcctgaaaccattcgccttaccggcggcgccgcacgttcgccattctgggcgcagatctttgcggatgccaccaactgtccggttgaagtggtagacgcgccggaaatcggtgcgctgggtgcagctatctgcgcagcggttgcaggtgggctgtatagcagcctggaggaagcggcaggagagatgagtcgtatttcccgctatcacgcgccggttgccgacaatgtcgcgatacttgacgagcggtaccatgagtttttgcgcctcgatcggggaatacaggcattactcgacgtttaa

SEQ ID NO: 446682 - DNA, 1662 bp, Serratia marcescens
atgttcagcacagaaggaaattccccaaatgcgcagagaaaggaaatgtgggaaaagctgcgcaccacgcttgcgccagaagttttgattattggcggcggggtaaatggtatcggtctgttaagagatttggcgctgaacaatgtgtcagcgacgctgatagacagcggagatttttgctcgggcgccagtagcgcttccagtcgcatggcgcatggcggtttacgttatctcgaaggccgtgagtttgatctggttcgtgaatcagcgcgtgaacgcaatatgttattgcatgacgccgctcacctggtgaaaccgctggaagtcgtcgtgccagtcaggcactggataaaagggctgccacggacggcattacgtttctttggcttatccggcaaatcggggccactgagttttgtcgcactgaaaagcggcttactggcttatgaacgctttggcgcgatacgtcgggcactcccgcatcataatgtcgccatcagacggtcgcagtttcctgccggtctgcctcgtccggtgcgttctgtcatcagttactacgacggtcagattgttggcccggaagcgctgatgtttgagatgttgagcagcgcaatacagcaggaaaacgtcgcggccatcaaccatatcagctggcgctatagcgcgcccggcaaggttgaaattaccaacacgcagtgcaacgacagcgtcgtgctgacgccaaaaattattgttaacgcagccggttccgccattgataaggttaatcaacagctgggcctggagacgcactacgtccgtggcgtgaaaggcgcgcacctggtattacgccatccggcgttgcagcagcgtatggcaggacgttcgttttatttcgatgacgggcacggtcgcatggtggtgtcattaccggtggaggaggtcattttaatcgggacaaccgaagtggaaactgaggaccccggcgatcgtcaggtttcatccagtgaggtcgattatctgctcaatgccctgaatagcctgtttgacgatattcgcgttcagccggaacatattgtggcggtcaccagcggcatccgtcctttacaggccagcgaaggtagcgccacgcaggcggcgcgtgaccatgctctgcaacaaaaccgggcaggcgaaacgtcggtgctttcgctggtcggcgggaaatggacaaccttccgcgcgtttgccgaattggcggccaacaccgtgctgcaacagttaaagcgcccccgccagacgaccacgctgggactgcgttatccgggcgccggagaactgaatctgactgaactggctgacagctgcgggctgccgttagctcgcgtccggcaactttatacacgctatggcactctggctaaagaggtggccgacttctgcggtttgcagacagaccggccgctgacggaaagctattcacaacgcgaaataatctggttaacgcaacggcgcatggcgctatcgctggaagatatgatcctgcgccgtaccaatatcgtgatgaccgggcaactgacgaaaaccacgctggcagacattgcacgcgtgatggcgcagacgctgggttacgacgaaacctgggctgagacgcagacgacaaactgcgcggccgatccccgtattatctggaatggaagataa

SEQ ID NO: 446683 - DNA, 1134 bp, Serratia marcescens
atgaataacgtaaacaggaaaaatggcctgctgctggcagggagcatcattgcattcatcctgatgggggccgggcagtcattgatggggccttcactgcctgagtttcgtaccgcatttaaactctcggtggcctctgccagtatggcggtgacagcgcaatgggtcggggcgctgattggcgtcgtggcgttgtttttagccggtaaacgcgactggacacgcgtggcgttcggcctgttaatcatcggcgctggcttgatggcgctgcaactgagctggattttaacgcttatcggctcactgacattcggtgccggttacggcgccagcctggcgctggttaactcacgtctgatgcagtcgtttgaaaaagcaggaccgtcgctggtcagcctggtgaatgcgctgtttggcggcggggcgattgttgcgccgttagtttttgtcgcgctggcgcgcaaccccgagctttgctttggcatcctggccgcaggactggtgcttccctttctgctctctttcttctttccccggacacatagcgaacaaaccatctcgcaaaatactcaccgggggaaaatttccttccccacgctgtttatcggggcttccggaacggcgatagaagcctgtctgattggcctcgggccggtgatcttgctcggcggagggtattccgataacgcggcggcgagtgccttatcactgttttttgtctttttcctttccggacggattacattaagtctggtcggtcagcggctacctgcggcgccgatgctgatagccgggtttaccggaggggcgctgctgctggtctgtgccggttttaacgttgcccctaccctcacttacccgctagcggggttcttcattggcagtctcttccccaacttttttgtctttagctcttatcggatgggaaaagatgccagaaccggctcgattattgtgatggctgcgctggccggcggggttaccggtccgttgatcgttggacaactggtgacggccatgccaccgctgatgcccttctggttgctggccgcctacagcgggttgattgcattgtgcgggctgtatgttttacgcgagtctgcgctatcaggggcgtcatcggtttctgaatga

SEQ ID NO: 446684 - DNA, 300 bp, Serratia marcescens
atgttggtggccgccagtggtgcgatcggtttcatgggattgctcgtcctgatgccgactgttcaaaatgacgtatcggcgcaggttaatgccatggacggtctgaaggctatgttaaatccacacctgttggcgggggctggcatcactgttctggcctatgcaggttcttttgcacttgacacctacatttcaccaatcctcctgaaggtcacacaggtcagtgaaagcaccagcagcctgctcatgctcggctacggggtcatggcggccattggtaacgtctggggggacgactga

SEQ ID NO: 446685 - DNA, 762 bp, Serratia marcescens
atgaacaaatacatcctggcgttatctgctgcacttatcggctcgcaggttcaggcagcaacgcccgcagcgcttcccgcaccggtcaagcagttggaaaaacaaggtatagaaatcattaaacccttcacggctcccggtggggttcagggctggttgggaaaatatcagggaacgggggtgacaatttatctgacccccgataaaaaacatgccatatcaggttatatgtacgatgagaacggaaataatctgagcgaaaaaatcataaaggacgagatttacatccctgccggcagggaaatgtggcaaacactcttaaaagctccaggtatcatggagggaagtgataaggcaaattgccaaattgtcgtgtttgccgatcccttctgcccttactgtaaaaaattcaggcaggaagttcagccctatatcaaagacaataaaatcgccatgaaaacccagttggttggtgtcatgcagcctgacagtggccgttatgcggcggcgatgttgtctgctgataatcctgcgaaggcctggcaggatttcgagctgtctggcagtaaaagtaagccggcgcttctagagaaaacaccacagccgattttttcccagatccagtacaaccagaaattgatggacgatctgggcgccaacggcacaccggcaatttattatctgaaccacgccaacacgcttcaacagatcgtcggcctgccggataaagatcaaatggccgatcttgtggcatgcaagtag

SEQ ID NO: 446686 - DNA, 180 bp, Serratia marcescens
atgcgtgaaatgggggaacgtataggtcgtcctcacagcttcgtgcaaaaagttgaagtgggagaacggcgcctggatgttgttgagttcatctggtactgcgaggcgctaggtgttcagcctcaaaccggtatggatattgttcagagttaccgggcacggttaaaaaacactttttaa

SEQ ID NO: 446687 - DNA, 648 bp, Serratia marcescens
atgcaagccatatcggagaagcccgtaaaaagtgcgcgtggcagaccgaaaatattcaatcgggagcgggtactgaacaaggcgatgatgcaattttgggcatacggctatgaagggacatctttgtcgcatctggttgatgccacaggtgctaaagcacctacgttatatgctgagttcggtaataaagaaggcctctttcgcgcggcgatggatcgctatctggaggttttcgaggatcttagaaaaggtgcgctggatcagtcagagtattctgtctcccaaggtattgaagtctacttgcgttcaacggcacgcagttttaccgacaagagtaaacctgcggggtgctttgtcatctgtaattcaatggtgctggctgcttcatcaactgatgtagcaaagatgttgcgtaaacaacatcacacgcaggaagctatacttgaaacgtatttgcaagtgcgccagcagcggcaagagttaccaactgatgttgatgtctctgctatcgcccggtatctatcctgtcttttgcagggaatgtccgtacgtgcccgagaaggtgccacgttggcggaactggaagagattattgccacctttatggggcagtggccagcactcacaggtcttacttacaagggctga

SEQ ID NO: 446688 - DNA, 765 bp, Serratia marcescens
ttggttggttcatttacctctgaacagccactcctatacgaagcgggctgtattacagcaggagagttggggaggcacttggccatattaggaagctgtactgcagtcgcactgcacagcgggcaagaaggctactatttggcaacaaaggcgcatttcattcgcaaatcggaaaagaatgtcctacgccaggaaatgttatatgcgagagctcaggtcgtagacatggataagcggacgctgaaaatttccgctcaggcatgggggaatagccccatagcggaattacattgtgagtatgccattctttcacctgtactattccaacgtactttcaaaaattatgccagcgagatattgtctacatcaccagactcaccttatcgatatcctgtttcattacatagcctagagttccatgaaagaggacttgatacgattgctggccctttatcacctcaacaatgcaccggtcattttgccaactatccatgttggccagtagccatcatttcacaaacggcttttcaggccacgggtgagttactcaagaacatttatggccccggcattcgattttacgtaaatgacacgcaattatcagcggaaaagttgattagtgccgatacggaattaaaattcagtgtaatattaaagcaaactcagcctcccttgatacagtgtgacattctggtttatcgtgatgaggaagagatagccacgctaacaaaccagctcgaactgatattacccacagagccataa

SEQ ID NO: 446689 - DNA, 330 bp, Serratia marcescens
atgatcgacgttttaggccctgagcgccgcagacgacgtaccccgcaggaaaaaatggctatcgttcagcagagcttcgagccaggtatgactgtgtcgatggttgcccgtcaacacggtgttgctgcaagtcagttgttcctctggcgtaagcaatatcaggacggcagtcttaccgccgtcacttccggtcaacaggttgttcccgcgtcggaactggtcgcagccatgaagcagatcaaagagcttcagcgtatgttgggtaagaaaacgatggaagttgagttactgcgcgaagccgttgatatcggccggcaaaaaagtggatag

SEQ ID NO: 446690 - DNA, 249 bp, Serratia marcescens
atggcggtccattcgatcaaaagcaaaaccgcattcatcgccagtggtgccaaaaaccttgacggtctgatcaccctcgatttagccgctcaagatgcgaaggccattgccattcactataacaacgcatcctcaaaagcagatgcctacgccgcggcgaatcacaaaaccgcagcagcgctttttcagcaaaaccgacctgaccaatctccaagacacagcgccttgcatccgccatctggtgagtga

SEQ ID NO: 446691 - DNA, 819 bp, Serratia marcescens
atggttgccataagtcatcaaaccatcaagaaaacatacccttcagcgaccagtactggggcacgccgctttgttggcaaaacggcaatggtgataggtgcatcggctaacgtgggtcgggcgctggccgaactgttagcgcaggaaggcgcagatgtggtgatccactataattctacgtcgaaacaggcattggcggaagaaactgccgagaccgtccgtaaatatggtcaggaagcgttgattttccaggccgaccttacccgcccagcacaggccacggctttattcgatgcggcgctcgaaaaatttggcaaagtggacattcttattaatactgcgggaaaaatcatacgcaaaccgctcgcggagtttgacgaagcggaatttgattctcttttcaacgttaatactaaagccgcctttttcctgcttaaagaagcgtcgaaaaaaatggcggatgaaggacgtatattgagttttgtcaccaccatggtcgccgcttttgcaccgacctatgccggttacgcgggtagcaaggcacctctcgagcatttcagcaaagcactggcgaaagaactcggcccacgagggattacagtaaactgcatagcaccgggtccacttgatacctcattcttttaccctgcagaatctgatgagaatattgcttggctgcaatccatgtcgattgatggaggtctcggcaatatccccgatattaccggtctggcgctctatctggtttcaccagaagcacgttggatgacagggaccactagcttcatcaacggaggcatcatctctcctattaactaa

SEQ ID NO: 446692 - DNA, 774 bp, Serratia marcescens
atggcagaccattctatcaaaggcaaaaccgtcctcattgctggcggcgccaaaaacctcggcggtttgatcgcccgcgatttggccgctcaaggcgcgaaggccattgccattcactataacagcgcatcctcaaaagcggatgccgatgaaaccctggccgctatcgaagccgctggcgcgcaggcggtggcattgcaggccgatctgacgaccgcagccgccgtcgagaaactctttgccgatgccatcgccgccattggtaaaccggatatcgctatcaacaccgtcggcaaagtgctcaaaaagccaatggcagagatcagcgaaccagaatacgacgagatgacatcggtcaactcaaaaaccgctttctttttcctcaaagaggcgggtaaaaacctcaacgacaacggtaaaatctgtacgatagtcacctcgctccttggcgcttatacccccttctacgccgcctacgcaggcaccaaagccccggtagaacatttcacccgggcggcctccaaggagttcggcgaacgcggtatttcggtgaccgcagtgggaccaggtccaatggatacgcccttcttttaccctgcagaaggtgccgacgctgtggcgtatcacaaaaccgcagcagcgctttcgcctttcagcaaaaccggcctgaccgatatcgaagacgtggtgcctttcattcgccatctggtgagcgacgggtggtggatcactggccaaaccattctcatcaacggtggttacaccactaaataa

SEQ ID NO: 446693 - DNA, 759 bp, Serratia marcescens
atgtcgatatccgatctgaaagtcgaaacccgcttgggcaagaagcacacaccgagccgcattctttccatcgtctccaacaccgctcaactcaaaggcttcccggtcggtttcttcgctgaagaaatgacccgcgccttccttatgttcatcgaagccgggcatcgagtggatcttgcctctccaaaaggcggcgaggtgatgttcgatatacacagcgacccacgtacgccagacggcgcctatgccaacgatctcatcagcctgggtttcgtgcaccacgccacgttcggggagatgctgaagaacacactgcccatcagcaccctgaacgtagccgattacgatgcagtctgggtcgccggcggcggcggcccgctgctgactttcaaggatgaccaggcgttacacaagctgatcgccgatttctacgagaagggcaagatcgtcacactgatctgccacggttctgcgctactgctgtggacacgcctgtcaaatggacggctgctggccgagggcaaaaagtggacgggttttaccaatgaggaagaagagcaaatcaaccgaaccttcggcatgacgctcaacgaatatacgatcgagagcgaagccgccgcgctaccgaacacccaattcctgcgccgtgcggccaacgaacccttcgctattcgcgacggccggctaatcacaggccagcaacaatacagcagcgcaatcaccgccgaattggtgctggaagcactcgacgaacgttaa

SEQ ID NO: 446694 - DNA, 270 bp, Serratia marcescens
atgcatgtactcatggttattggtggtggcctgcttcttttaggcatatttgtgctgttcggctggctttggggagccagcgccgcaggtatggcgctggcagccaaatgcttcgtgccagcctggttggcaatatcggtgatcaatatatgggtgggggttgtgcacgcaggctacagcctgcgcgcggagttgcccatcttgttgctggtttttgccgtgcccgctatcgtggccggcattgcactctggcagtattcccgtgtctga

SEQ ID NO: 446695 - DNA, 1770 bp, Serratia marcescens
gtgtctgaagcgttagcaaacggcagcgccggcgatctgctcaaggtcgtaacattgcttggtgcagccgtagtggccgtacccttattcaaacgtctgggcctggggtccgtgctcggctacctcgcggcaggcctggttatcggccccttcggtctgggcctttttaatgatcctcaaacgatcctgcatacggcagaacttggcgtcgtgatgtttctctttatcattggcctggaaatgcgcccgtcccatttatggaacatgcggcgtgacatttttggcctgggtagcctgcaagtactgatttgcggcctgctgcttagcggtataggactcctcttcggtttttcattggccgtctccttcatctgcgggatgggcttcgtcctcacgtctaccgcgatcgttatgcagcttttgggggaacgcggtgatagcgctacgcctcgcggacaaaaaattgtcgctgtactgctgttcgaggacctgctgatcgtgcccctgctggcgttggtcgctttcctcgcgccggccggttcatcctcatcgccgcccaacgcaatctggatgaacatcgctatcgctgcaggcgcgctggccactctggtcgccgccggcatctggctgttgaatccgctgtttcgcatattggccaatgccaaagcacgggaagtgatgactgccgccgcattattggttgtgctcggcgcggcgctgctgatgcaatcaggcggtttgtccatggccatgggcgcatttctggccggtgtactgctgtctgaatccacctttcgtcatcagttagaggccgatattgatcccttccggggtctgctgttggggctgttcttcctcggtgtcgggatgtcattggatctggcggtcgtcgcgcgtaattggcccctcattatctcaggcgttctggcgatgatgttgattaaaggtctgtgcatttatggcgtggcgcgactgacgaagagttcacatgccgacgcgctggagcgcgccgtgctgatggctcaggggggagaattcgcctttgtgctcttcgccgctgcattagccaaccgcgcattacccacagaggtcaatgccaacatgaccgccatcgtcgtactgtccatggccctgacaccgctggcagtacttctgcatcgacgttggcgcgccgttcccggcgactcattggcaggagcccaacggccggagtcattatccaactcggtcctcatcatcgggttcggccgttttgggcagatcgtgagccaacatgtactggccatgggtgcggatattgccatcattgatcgccaaccgcaggtcgcgcgcgacgcagaggaattcggtttcaaagtgtactatggtgatggcgagcgtgcggatgtcctgcatgccgccggagcccatcacgcccgggccattctgatatgcatcgacgatcctcgggcaaccacaatgattgtcgagcatgccaaaacgcatttccctcacgcccgggtactggcgcgcgcacatgatcgagaacatgcgattgaattaatcaaggcgaatgtggattaccaggtccgggttactttcgaatccgccatggcttttgggcacgaggctctgctgacactgggttcttcgcctgaggatgcagccgatttggtggctgaattacgccgcaaagataccgagcgcctggacatggaaatctctggcggcatttatgccggtaaatcgatgattcagggcaatgcggtcattaaagcgaagaaggattag

SEQ ID NO: 446696 - DNA, 582 bp, Serratia marcescens
atgccgacaaccttatgtcagcacaacaatgtccccgtcaaagtggcacaacgagcgagcgatgtcgtggcgttttggcggcaagtcgggcccagccagtggttcagcaaagacccggcttttgacggaaatttccgcgaacgcttttgggccctgcatttggctgcggccagacgtgaacatgacgattgggtaaacacacctgaaggcgcgctggcactggtgattttactcgatcagtttcctcgaaatgcctttcgtaacaccagccacatgtatgcgactgatggactggcgcggcattttgcactcatagccatcaagaagggatatatgaatactgtcgaacctgctctgcgcctgttcttttgtcttccgtttgcccactctgaaacactggctgatcaggatctttctgtcacgctaaacgctcagttgggcgcggttgaacgctcgcatgctgaaggacaccgcgatattattcgacggtttgggcgttttccgcatcgtaatcgactgctgctacgcgaaaccacaacacaagagcaggtctttctcgatgcaggcggattcgcaggttag

SEQ ID NO: 446697 - DNA, 942 bp, Serratia marcescens
atggacaggttcaaccaatatcgcgtattcgtgcaggtagcagaaatgggaagctttgtccgagccgccaatgcactcgatataccgcgcgcttcggtttccgccgccatccagcaattagaatcgcagctgggcgtaaggctactacaccgtacaactcgtcaggtgcgactgacggccgacggcgaacagttgctcgaacgcgtgcgccccttgctggccgaagtggaagacatcgaccagtcatttcagctcagtcaatgccaggtttccggcaagctgactattgatgtcccaagccgcattgctcgccgactgattgccccggcgctaccaggattattgcgtcgccacccgcaattacagctggttctcggatcggcggacagggctatcgatttggtgcaggaaggtgtggattgcgccatccgtgtgggcgcgttgcatgacagcagtttggtcgtccgcgctctcggccatatcgccctgatcaattgcgccagccctgcttatctcagtgaacacgggctgccatcccaaccgagcgatctcacccaagggcattgggccatcggttacacctcatccaaaaccggtaaagagttaccatgggaatatgagtcaaataatggccacacacataatctccatatacccagccaggttgcagtgaacaatgccgaaagttatatcgcttgctgcctggctggccttgggctgatacagatcccccgctttgatgttcagcaccttctgaactcaggggaactgattgaggtcatgtcagactatcgcgccgcctcaatgccgatatctcttatttatccgcatcgtcgccaacgatcccgacgcctggctgtttttcattcgtggttcgaagccttactgcaaccacatttgatagttaacttaaccaaggataatgctttatcaaagccataa

SEQ ID NO: 446698 - DNA, 603 bp, Serratia marcescens
atgttgcactttgaccctgaggcattgcgcctggtcgtagccgaagttaaggccaatcagtgcgaactggtgttggccaaagacgacggtgtttacctgatatcagccgtggccgaacgtggcgatacgggccgcgtgaagcacatagcgtatgccgatggctgtcatccggaaaaggatgacgcctggtacgaaacctcccgcgtgttggtgggaggcgacgacttttgtgagcatctgcagctgaccgacgaaagcatagaacgaatattttcagacggctttgagctctggatacacgtgctgcacgaccagatccatgtgcatgagtcacccgtcacctgggtgccggtggccgagtaccgtcatatcattaactgcatgcagcgcctggctcatgtccattaccgggcatgcgtgggcaacgcggagtacaaacgctggcgcgtcagcgccatcgacctgctggcgatcgccagtcataccgacgctaaacgggcgaaaccggacgacagggaggaattcctctcgatgttcgaatgtctgtatcacctggctgacacggttaatgcggaaggggcgatccgtttccccgcacgttaa

SEQ ID NO: 446699 - DNA, 522 bp, Serratia marcescens
atgaacgtgtattttgtcacaccaccgtcccaggacgcgtggattgattttaccctggcggtgaccgaggtgttctggttgttgccgtatgaggcacgaccagaaggtgtcacggaagccggccagctgttcgatggcatgatcttcgaaacagccggtttacgtttatcatcggaatcagaggaaaatatcccgatgcaaccgctgccttacgtcgaagaacgtgtggggttctttcagcgccccgacttttttcaccgactggtcctgatactgctccataacctgtgtccgggctctgtacggatagagcggaacgacaccagactctccaaatatccaggatgggagttgccactactctggttgcggcatcatctcaaacgcccggaacttgttgctccggaggatgtagatgaagcgaccatgactgatgactccacgcttttctatttggcgaagtacagcactctcatcgactactccaatgacttgccgtgtcactggcgggttattgtctga

SEQ ID NO: 446700 - DNA, 978 bp, Serratia marcescens
atgcatatcttcgaaaacacagacggttatagcagagtgtcgctcgcacagttcccgactcctttgcagcgactcgacagactatctgaacatctgcggcatgagatttggatgaaaagagatgacctgacgggctttgccggaggaggtaacaaagttcgtaaactcgaatttcttatggctgaagcattgaagcaaaaagctacggcggtaatcactgttggcgcattgcaatcaaatcacgcgcgccaaactgccgccgctgccgctcgtctgggattggcatgtactttagttctggctgaagccgttgctggccgaacagatgcctatgccaatggggggaatcttacgctggaccgcctggtcggtgctgttataaaacgcgtacctgcgggggaagatgtgaacactgcggttaatcaggctattacagacttagaagctcagggacataaggtttatgtcgttcctctgggcggctcaaatattattggtgctctcggctatgcagttgccggacgggagattgaagatcaagcgcgggcagttggtcttatgaatccaacaatcattaccgggtcaggatctgcaggtactcaggcgggacttattttaggaacggatatgccggttctgggaatatccgttgctgcaaacgaatcagacttgaagttaaaaatttcccagatagtaaatgaaggcagtgaattagcacaatttccaaatgctgataaaaaagagataaatgttgatgatcgctttgtgggggcagggtatgggcagccctctgaagagatgaaagaagctgtggaattggttgcccggcttgaaggtatattccttgaccctgtctacagcggaaaagcaatggcaggccttattcatcgagttcaatcgggtgagtgctcggggccaattatattcttgcataccgggggaatgccggcgctatttgcttacgatgacgttttttga

SEQ ID NO: 446701 - DNA, 1641 bp, Serratia marcescens
atgaggccagtaaaaactaccggtgaggattacgatgtcattgtggttgggtccggtgccgcagggatgaccggggcactcgcactggctgtggctggtcttaaagtggttgttttagagaaaagccattttgtcggtggcaccagtgcaatgtctggcgctgatacctgggtagcagctaaccatattgctaaggctgaaggtgttaacgacagcccggaagaagcgctggcttatattgaaaatgcactggagagtgaaggttcatcacgctttcgggatcattggaaggctctttgtgacaatggggggcctatgcttcaaatggtgatgaataattcgccgcttgatttcagattgactcccgccccggaccctattgatgttaaaggtgccaaagcatatgggcgaaatctctcgccgatggttctcccgcgtcgtcttgccgggccttacgccaagagaattcggccttcaactttacctcatctttttacctttcaggagatgtttactccaaatccatggtccaggccgttctatacaatctggaaaatgtggcctgaattagctcgcagattactgactggccaaagagggcaaggctcagcgcttatgactggtttgatagcagggtttattgcaaaagatggagaactgcgcaccgaacaaaatatagccgaacttttgacacaagagggggcggtggtcggagtgcggttgagtgatggaaaagaaatcaatgcccaacatggcgtattaatagccagtggtggatttgaatgggacccaaaacggtataagaagcattttgcaggcaagactgattggctatgtacacctgattccaataccggcggcggacttacacttgcagaaaaggtgggcgctgcattggatcagatgactgaagccaacgtacatcctgctttacccgttcgctatgaagggcgagcgcatggtatgccagtagcatggcatgtagggcctagcggcataatcgtcaatgcttatgccaagcgttttgtgagtgaatatgactacaacttaggcgctgtacttaatcagcgagacaaaagtggcaatcctcttcatttacccgcctgggtaatctgcgatcggccctttatctataggaatttgccattcgcatggtatgcatttcgtgcaaaaggatggattcgaaaagcgccaacactgtcggctttagcaaaaaaaattggtctcgatccgaaaccgcttgaagatactgttgatacttttaaccactattgcaaacaaaattttgatcctgattttcaccgaggcgaggcgctctgggagcgcatgcgttcggggaactggaaagctggcgaaaaaaacttgtcgctcggaggaattggcaaagggccttattacgcaatgccgattaatcgctcaatccttggcacaaaaggtggcccattaaccaacgcaaaaggacaggtactttcaacaaccggtgatgttattcaggggctttatgcggcaggtaatgtgatggccaatccaattggaagtcgtgccataagtgctggcacgacaattggaccgcacatgacgatgggctacgtatgtgcacaatcgattatttctaaaacactttcttatataaaggaataa

SEQ ID NO: 446702 - DNA, 666 bp, Serratia marcescens
atggctgccagttgccttaaattagccgatgaagggttccgtacggtacaaatcaaggttggtaatgattggcgcgctgatgttgaacgtgtagaagcctgtctggaagttgctccaaaactagatcgtctggttgtggatgcaaacgctaattatatgccacatgaagcactttctcttttaaatgcattagggcctagggattttattctcgaacaaccttgccgaacattagaggataatttatcagtccgccgccgcatcactcagccaatggtgctggatgaatctttggacagcattgatgcggtattccgcgcacacaaggaggatggatttgatttggcaatgcttaaacttagtcgatttggcgggatactccccttaagtctggtgcgcgattgttgtgttgcctggaatcgacctgtgacaatcgaagatatggcaggaggcggtattattgcggcagcgtcagcgcatcttgctgcgagtacaccagcgagtcatttggcagctggctcattctgtactgcctacgtcgagcagacctatacgctgggcgactggccacaaggggctatcggacgactcccttctgataatccagggcttggtattgatgtcgacttagatgcgctgggagagccaatatttatttacgaataa

SEQ ID NO: 446703 - DNA, 1329 bp, Serratia marcescens
atgtcgattttttcaggtttacttaatgcacagcgaagccattttgccggaaaggaagatgcccttgcctcgtcaatgtggtttgctactgcgggtgagtccgtggtcactaagccattaaacagcaatgcaaatgtcgatgtattggtgataggaggagggatcaatggtctgacggcaatgctacagcttacaaaattcggcgttaatgcaatgttgatcgaggcaggtgagtttggcgaaggcgcatctggtcgaaatgcgggaatggtgaatccagggcaatttcttgggcccgatgaaataagagcaatattaggcgtcgagtatggcgatatctttgttgacgaacttagcaaaggccctgatttggtcaaagaactccttatcgaacatgatattaattgttatgcagattttcgtccggtcatccgcgcagcacatgatactaaaactgctcaaatgcttcatcgtcaggttaagctttggtctgatttaggccagcctgtagagattcttgaaggtaataaactctttgaaattacgggctcacagcgttggaaaacagccttaatggaccatagggggtttactattcaaccgttggcttacgttcgaggattagctaatgctgtactcagaaaggggggggaactttaccaaaatgttcgtgccacctcccttagcagagagggggctgattggattgtttctactgtagagggacatcctatccgggctaaaaaagtcattatggctacaaacgcttacacaggttctttacaccccgcatttgcgcaaacccttgtcacctgtggtgcatttggggttgccacttgtcctttggacaaaaagttgcgagggctcatcttaccctcaggccactctctctacgatactcacaagataccgctttttttgcgttatgaccccgagggtcgattgatgattggttcactgggcaatctttctgacgacagtagacgttcgatagaagcttgggggaagcgggttttgaaacgcctgtggcctcaacttcccgcaccacaatggagccatgtttggcaggggacaattgggttgacgaatcatcatcttcccagattgttatcaccagaagacggattaattggaacgataggatgtaatggtcgcggtatagcagcaaatagttactttggccgaatggtggcggatataacagtgggacgaaaggtggctcgcccacttcctattgaaaagcaggcaccaagagcattcaaaggccctcagcaggatgggttagatcttgccatgcgcctttaccgtaatactttccttcttgactga

SEQ ID NO: 446704 - DNA, 2283 bp, Serratia marcescens
atgcaatcaatccagttcgacctccacaaacttggatggaaggctttcgaggatctcgtatcatgtatcttgaaagagacctttgggcagacatttcaagtattctctgacggcgttgatggcggccgcgatggggctttctatggcacttggtctggaactggtttcggcgatgacatcagcagtagttttactactcaatgtaaacattccagcaaacaagatatgaagctttcaaagggagttgttagtgatgaacttcctaagattgagcggcttgtgagtaaagggctggccgatgtataccttttattcactaattgttcagtttccgctgaaacagccgccttgatggaagaggacatgcggaaagctggtgcaaagttcgcaaggatttacggtgccgaatggataaaccacagcatatccttacacccaagtcttaggcgtatggtaccccgaatatatggtcttggtgacctttcccagataattacaaatcaggcattccggcaagcaaaaagtgttcttgattcgattgcaccagatcttgcatgcttcgtccccacagaggcataccgacgttgtgcacacgctctcagggatcacggattcgtgatgcttataggtgaacctgcaagtggtaagactatgatagctaatttgttagcgctctcagcggctgatgagtgggggttgcaaacgctgattttaagttcgccggaagatttggataggcaatggaacccagacgatccaggacaatttttttgggttgacgatgcttttggatctaatcattgtgactttaaccgagtccaagagtggaatcaaaggctccctaagttgaaagctgctatacataagggagcgcgagtgattttcacttcgcgcagctatatcttccgtgcagcccagaatcgcttaaatacaaataaattcgagttgtttaaagacagccgagtcacaattgaagttgagaaactctccgatcctgaaaaagccatgatcctgtacaaccacctgaagcttgggaaacagactaaagcatttcgaagggcaattaagagttttctaccgtcagtagtaacagtgcccaaatttcttccggaaattgcccggagattcgccaatccacagttcacgaataagcttgtgcctaacgaagttggggtcgttgattttttctcaaatcccacggggatcatggcagacattattggtgggcttgcacccgctgaaagagcggccttagccctcgtatttgctaatggaggggaactaccaatcccactgcggctagaaaaccctcagacaaccaatatcatcacgtccatgcaatcaaatcttggcgacgtaaaagctgcattgtcagcattagatgattcactcatcagaattagcaaaacacaagacgaacactactggaaattccgccatccaaccattcgcgatgctttcgcaactgatgtttcgggtaatccagaactcatcgatatctacctttccggagtcacaaaggaaagattaatcgaggaaatcagttgtggggacatggggattgaggggataaaactggttgtgccacatagtatgttcaacagcgttctggatatcatcgatcctagtggcaacagagcctccatcagtaagccaatactctcatttttggcaagcaggtgttcacctgaattcttgggactttatttcaataacaacaaaacaaaggctaatttgcttgatttaataaactctgcgagaagatacgataatagccttacaatattgggtaggctgaatgcaaatggtctactgggtgatgagctcagaataaaagtactggacaggctgagcgttcttgccacagtaaaccattcagattgtttcatcgatgccgactttgtcggagttttactctcgcaagaagagaatgcagccaggctttcagtccaaaaagtcggattttactctaacatgaatgaaataatccaagatatagaggattcctggggtacagatgatgatgtagacgaagcattctacgatgtcacacgccttttggagcgatttcgtgacgagaacaatgaactttattgtgcggatttttatgatgaagatgaatggcaaaaatctgaacaattcatccgtgaaatcgaagctaagaaagatatgttgaagcagaagcaatccgaggcagtggattacgaagaattagaaacagaagaagcccagagcacaaatttgtcttcaggacgaagtattttcgacgatgttgacgagtaa

SEQ ID NO: 446705 - DNA, 978 bp, Serratia marcescens
atgaaagaggtcgtaaagtccctctttgaggaattctcaacaaagaagaaaactattgttgcggatgctctctctgaacgatttgccataaagacagcattttctttatcagcctatgacaatacgataatatgttctgactgtaataaagccgatgctgatgctaagcgcttagttaaatgccatcgatttttttcattttcaccaacggagatatcggaatttattcatgttgccagtaatcgtgagcataaaataaatgctgaggccgcaaaaaaagtgtgggagagggtagagcctgtatttaatattcgcatggatatggctagaaaatttgcaactatagctgccgaaaaacaagactggtatcaaccatcagaaaaaaccgctaaacagacagaaactttagctaggcatttttttaggattaatggattgttagagtttgatcagtattggcctgaaagtttactgtacaacactgaagtttttaaaggagcaactaactcttggaggatgaaaaaaagttttatcgctaaacgtgagccaacatcaaatgagatttcccacctttcctctactagggggaaatattggaatagatatgatgagcgatgggtgtgcccttgttgcaaaagaattaaaattgagtgtgtcagagcttcgaagaaaaatccttgggtacttgaaataaagaaagtgcccctattcaactctgagaaaaaaacagtggattatgagagcgcagcaatgtgtgcagattgtattgactcagtaatacatttaggtcgtgaggctttaattttagctggttcagatgcagtttttccaagctcagttatcacattacaggagttgtcttgtataatagtacctcggccttactccaaacatacttttagaaatgatttaatagatcaaatgttgccatcgattattgagagatgctctattttctttaaggatatccaaaaatag

SEQ ID NO: 446706 - DNA, 696 bp, Serratia marcescens
atgaaaaagtatttatttctggccggtttgctgttcagctccacgtattctcatgcgaacgtggtgattaacgggacccgagtcatatatccggaaagcaataaagatgttgtggtgcagctgttgaataacggcaaggacccgtctttggtgcagtcttggatcgatgatggcgatctcaattcaacgcctgaaaccgctaacgtgccttttttactttcaccacccgtggtgaaggtttcgggggatagcggccaacaattgcgcattaagaaagtgggggttgcgctgccgtcggatcgcgaatccgtgttctatctcaacgtgctggatattccgccgacgccggaaaacctgaaaggcaccaatacgctgcaactggcgatcaagtcgcggataaagctgttctatcgtcccagcggtctgaacggcggcgccggtgaagcgcttaaaaacgtcgacattcaggccaacggcaaaggtttcaaaatcattaataaaagcccttactacctgacggtggcgaatatcgacaataaagataaaaagcacctgctggtggattccgtgatggttgcgccattctctgatgtcttcgctgcaactaaagaggcggtgatgaaaaacaccccatataccctgatgtatattgatgacctgggggcttataaacttcaagccgtcacctcgcattaa

SEQ ID NO: 446707 - DNA, 513 bp, Serratia marcescens
atgaagctgaataaaaaagccctctctctactgacagcctcttcattcttgatgttggaaaatgcgtcggcaatagagtttgatacttcgctattggccggctcttcgcgcgagtccgacctttcgcgtttttatatcaacagcgatatgcctgcgggaacgcaggaagttgatatttatgtcaacaataattggaaggggcgttactcactgaattttggtgaaacgagagatgacataaacatcagctatcaagatgccgcgttgctgggaatcgacatggcggatctgcccgcgcctgacgatgagcgcgccatgctgccgatcgcgagcctggttcgaggcgggagaaccgagctggacgtcggcagcctgagcttaaggctgacggtgccgcaatcccatgtgttgcgttcggaagccggttatgtcgatcccaaattttgggatcgtggcgtatcagcattgatgctgggttacaacacgacctactaccgcgtgaaatcaaagtag

SEQ ID NO: 446708 - DNA, 1848 bp, Serratia marcescens
gtgcagaaggggtttgccggcatcaaatccaattttaccgccggtgacttttattcgccgggcgagctgtttgattcagtgcggatgcgtggcgtgtcattggcttccgacatcaatatgcggccaaactcgcagcagggtttttcgccggtggtgcacggcgtcgcgcaaaccaacgccttggtgaaagtcatacagagcggcaacgtggtctatcaagaaaacgtgccgccgggcgcgttcgtcctcgacaatattcagcccacgggttccgcgggcgatctgttggtggtggtaaaagaggctgatggcagagaacagtctttcaccgtgcctttttccgccgtgccaaacatgctcaaacagggcgtgaacaaatacagcctgctggttggtgaagtgaagcagtccaataccgattatcagccaggctttgtgcagggcacgctgcaatacggtttcaataatctggtcaccggttacgccgggggcattatcagcgatgattaccgttcttacctgctgggcagcggctggaatctgccgatcggcgcggtgtcgctggacgtcacccatgccaatacttccctgaaagatcgccgcgaaagcgggcaaagtttccgcattgcctacagcaaattcctcgatgctaccgccaccaactttactctcgcggcgtatcgttattcgaccaagggttattacagtttcagcgacgcgatttatgcgcatgagggatatcgccagttcgagacgcgctttaatgagctgcgggaaaatgaagagggcggcgagagcgccgatctggatatgaatacctgggatgcgctgcgttccgctcggcctcgcaacacctttaacctgaacctgaatcagcggttggatgacggctggggcacggtctatttttccggcacacagcgtgattattggacgcaaaacggcaaaagccgggaatatcagcttggttattccaatgcctacggcaaggtgagctacaacgtttccgccagccgggttcggaatgcttcgcgacaggaagagacgcgttactatttttcggtcagcttgccgttggcgatattcgacaccccggcgtacctcagcagcggaatgacggcgaccaactcccgttatcaacagagcaatatcagcctgagcggcaatgcgttggagtcgaatcgcttaagttacgccgttgccgccagcaatcagcgcggcggcaacaatatgggcagcgccaacgtggcatatcgcacgagtttctctaccttgggcgcatcatacagtgagtcttccggctatcggcaggcgggtttgagcggccgcggcagtctggtggcgattccctggcacgtgctggcatccaatgagttcggcaacaccatgacggtggtggaagcgccaaaggccgccggcctgatggtcaacggcgatgaaagcatcgtcaccaacagcgcggggttggcgctggtaccgtacgccactccataccgggaaaactcggtgacgctgtcggacaccggcaacagcagcggcgcggagatcatcggcaatatcgccaacagcgtgccttacgccggtgcggttaactacctgcggtttgaaaccgaccagcgtcagtcctatacgctgcgcgcttataaacacgatgacaaaccactgccgttcggcgcggaagtgctggatgacgctggggaatccatcggctatgtcggccaggccagcatgctgtacctgcgcgccgatcgcgagccgaaagcgttgacagtgcgcttgcgcaacggcagctgccggatagagcggcctgcgctggcgccggatgccgcacctggcgtatgccaataa

SEQ ID NO: 446709 - DNA, 1077 bp, Serratia marcescens
atgaaattcagaagcgttgctttgttgctgctgtccgggctgttttgcaattacggctatgcagcttgctatgaaaaaaccagcatgggatacggtacgccgatatctatcgacttgtcggacaagctgagtgcaaaaaatccggtctggcaaggcgaatacgccacccagtatgtcgggagctttaagtgttcgggaggccttttccaaaattatgagttcgcctatacctcactgttgcctaccggctctaaaaacccagtgattatcgggtttaacaatggcaagcagtgggtgcgcgccgaaattgtcaatgagatagacggcgtaaagttaaaaggggccggaacttattcggccagcgagttgaaccagccgatgacgttgcgtttctcgttggtcgacaagaagggcaccgccgtgcccggcgacaccaaacagtttgatagcgcactgctggtttccgacgtgaccggtattggtcctttgacctggattatcaaaatgacgggcaagctgctcacttggatcctgagcggctttcaggattggcccatcgatgagcgcgatatgtatgcccaaccgctcattctgcgctacgcgcccaaaatgaccacctgcagttttgacaatgccgggctgcaggtcatgctgccaaaaaccggcatcgcccaattggggaaaaatgctcaggccggctataccccgtttacgttgaacatgagctgcgagaacatgcagcaagcgggcatcgccgatcgcggcgtcgacatgtttttatccagcaacaacctgttgcctgccgatggcacggtgctgactgataagaatcctggcgctgcgcaaggggtgggtattcggctggtgcaggctgataagccgggctcgccggtcatgctttcgacctctccgatcgatcgcggcaatgcaacgtccttatttaatgtcgcggtcggccaggcattggcaagccatttctctattcgtatgggcgcttattattatccttatgatatttccggcgccactcaaggggaaattaatgcttcggcgacgctgaacattatttacgactga

SEQ ID NO: 446710 - DNA, 1182 bp, Serratia marcescens
atgagtaaagaaacaaattctaatttcagtatcggtacgcgcattacccaaataggcagaaacccggcagagcaaaaaggtttcgtgaacagcgcagtgtttcgcggttcgacggtaattttccccaccgttagcgatatcgaaaacgaccgtgctgaattcaattacggtactatgggtacaccaactatagccaatctggaaaatgcatggagcgaactggcaggtgcagtaggaactgtgctctcaccatccggccttggtgctatcgccctggcgctgcttaccacggtaaaagcgggtgaccatttgctgatgccagacagcgtctacaaacccacgcgtttgttctgtgcgagcttgctggccaaaatgggcatcgaaacccagtattacgatccgctgatcggcgcgggcattgagactttatttcgcccgaataccagcacgttgttcctggagtcacccggatcgcagagttttgagatccaggacgtacccgctatgacagcactggcgaaagtacgcggtatcgccaccatcattgataatacctgggcgacgccggttttttttcgtgcccacgagcacggctgcgatttatcagttgaagcagggaccaaatacctcggcggccattccgatctgctgatgggggtcgtctccgctaacgaaacctggtggcctgaactacgtaaaacctatgacctgatggcaatgttacctggtgcggaagactgtttcctggcgctgcgcggaatgcgcactatgtacttgcgcctcaaagaagcggagaagcgtgggctggaaatggcgcagtggctgcaatcccgaccggaagtgttgaaagtactgcatccggccttcccggactgccccggtcatgagatctggaagcgcgactttaccgggtcctccggcctgttctccattattctgcaaccggaatatggcaaagccagcgtcgatcacatgctcgataacatgtcgattttcgccatgggctattcctggggcggtttcgagagcctgataattccgttcaactgtgcggaataccgtacagtgacgacgtggcagcctggcggtagggcactgcgcctgcaaatcgggctggaagatatggatgacctgaaagccgatctggtcgccgggttggggcggttaaaaatgttcgcctaa

SEQ ID NO: 446711 - DNA, 1287 bp, Serratia marcescens
atgaataacatttatcactctctaccaggctacgaaaaatttaatgaatccgttccgtttactaaatatgacgcgggatgggtggttctgtgtattggcatggcaattggttccggcattgtttttatgccagtgcaaattggcataaagggtatatgggtacttatcgcctcggttattattgcctaccccgctatttacttattgcagagcttatatttaaaaacgctatcagaaagtgaagattgtgaaagttacgttaatatcattacccagtaccttggtaaaaactggggattctggctggggacagcctattttttaatgttactgcacggaatgttctcttattcactggccgtcaccttcgacagcgcttcgtatattcagacctttgggttaacaacagatttgctgtcagactccgtctggtacgggctggttatcctgatcgtactggtgagtatcgcctcgcagggtgaacgcctgttattcaaggtgtccgggccaatggtctgtgtgaaattcggtattattgtcgcgctgggtctggtaatggtgccacactggaatattaataatattagcgcgtttccgccgatggggccattttttcgcgatgtattcttaacgctaccatttaccctattttccattctgtttgtgcaaattctcagcccaatgaatatcgcttaccgtaaagtggaggcagacagacgtattgcgacctaccgcgccattcgcgctaacaggatagcgtatattatactggcagtagcggttttattttttgccttttcattcacttttgcaatcagtcatgaccaggccgtatcagcatacgagcaaaacatctcagcactggcaattgccgcgcaggttattcctggctccgcggtaaaaacaatgagtgcgctattgaatatctttgcaatattaacggcattcctcggaatatatctgggattctatgaagcaattaaagggattgtgataaatattattagccgttttatacctgaagaaaaaataaaccagaaagtattgcatatcgccattagcgcaattgttgtgcttgggttgtgggcatggatttcaactcgattttcgatcctgttttttatgcaactcggtagcccactgttcgggttagtctcttgtctgatcccctgctatttagtctacaaagtaaaaacgctgcatcagtttaaaggtccgggcgtgtggtttatcaccttttttggcatcttgctgtgcctggctcctttctttaaatttttcgaataa

SEQ ID NO: 446712 - DNA, 972 bp, Serratia marcescens
atgaacaagctttttatgccatttaaagcaaaaattgataaccatgcgatcttccgtcaactggaaattttcatcaaagttgttgaatgcaatagtttctctgttgccgcgcaaaaactgaatctgacgccgtcttcagtgagccgcagtatttcgcaactggaagagagtctcgggatcgtgctgttaaaaagaaccacccgaaccctgatcctgaccgaaccgggtaaatacttattgagccgtgcgcagcggctgctgggcgatcttgatgattcgttaatcaacacctccagttttcaccaacacccgcagggacagctaaaaattacctgctccattgcttttggtgtgtcgcatctgatgcggctgtacagcgagttccgggccctgtacccggatgtgcgcttgtccgtcgatcttaacgatcagaacgtgaatttgaatgaggagaattttgatatcgccttgcgcattactgctcgcccgccaaacaattttgccatccgggaaatatgtaaaatcaactgggtgtactgtggcagcaaaatctatttcgaacggcgtggtattcctaagttgctggccgatctggaacagcacgattgtttaattaacccgaacgtttcggataactggtattacatcgatgaacaacatcaggccagggcattgaaagttaataacattatcgaggttaacagcacactggggctactgaacgctgctctgcaacatcaggggattgtcagcttgccgacctatttgcttggtgactatattgcgcggggcgagctgttgccggtactgctggaccatgaagttaaacagcatgaatacagtttgtatgcactttatcatcccggatatcaccaggaccccaagatacgaagttttatcgactttatcgttgagaggatttcctcttcgccagcatgggataaatggttgggggaaggggggccggtgtag

SEQ ID NO: 446713 - DNA, 159 bp, Serratia marcescens
atgtactcgtataccaaagtgcccctcgggtttgaagtgcaggagtggtttaatctcagccacctgttccagggcttagttccggtgctggcggcgcagaaagtattgattcgcagcagttacatcaacggccgcaaaatgctggttttcctggtgtga

SEQ ID NO: 446714 - DNA, 678 bp, Serratia marcescens
atgcccgatcgctatatcacgctatccgatcagtcatatgaaaaaatatcgaactctgggaaaaaaaagaatgtaacgttgatttataacggaacgagtgctcccgctaaggaggagattttctctgtcgataggtcgaaaaattcgaaaaagctcgagttggcgtttatcggccgcataacaaaacaaaaagggttgccgactttaatcgaagcactggagaaattgaaccgtcgggggatcgattttgagttgtcaattattggcgaaggggaagagagggcggctttagaaaaacaggtgagcgccgttcagcttacaagtaaagtcaaattccttggtttctccgatcaaccatggtcgttgataaaaaatacgccgatagtggcgatcccttcattatgggagcagggtgctctggtcgctatcgaagctatcatcagaaatcacaccatagtggcaaccgatatcaacggattgaataatgttgttgtcgaaggtgaaacgggatatttgttcgataagcttgactcagtgaaaatggcgagcattctggaggaaatcgctatgggaacgaagacgctaattgatatcgccgaaagcgtgagaaacaagttgttattccctgaacgaacgggaataaagatatataacctgtatgaagagttgctgcgatga

SEQ ID NO: 446715 - DNA, 216 bp, Serratia marcescens
atgaacaccaccaccgacgacaacgatcttgcatttaccttgcaacctattggcaacgtcagtaacaacatcaaaccctttctgataatccaaacgaccgacaaagaggacattgagttccccctcagtgctcttttctgccatttgttcagccgctgctggttttgccggttcttccacgccattatatatgatggccagcttctctctctttaa

SEQ ID NO: 446716 - DNA, 342 bp, Serratia marcescens
atgatttttgcaggttccttcttcttcgataaaaatgaaaatttaaaaggttggcgcagttatattctgtggggcggggcggcatatattatgctattgccgattccgctggcctcagagcggttcttcatgccaatgtcagtctttttaatggggtacctgttgtttttgtcgttctcaagagtatcaacaattttcagactcctgctgattctttattttatctataaattcttaacggtaggcccattctatggggtggtaggtgtagcagagggctttgaattctggtcaagctacgattggattggcgactatcctttctatttctggatgaaataa

SEQ ID NO: 446717 - DNA, 588 bp, Serratia marcescens
gtggtattcgttgatacaacgtgggataacatcgtagcgggtcttcagtccggcaaatgggatctggcgcctgcgttaaaccttacgccacagcgcgctctggctatcagtttcagtggaccggccggttacgatgcaatgactttcctttacagaaccgattctgaaaaagttggtcatcctacgcctgatttgaagaccttagacgttcctggaatgagaataggcgtggtggcagggaccgctcaagacaaagcggtgactcaacgctttaaaagtgcacaagttgttcgccttccacaactcgcttcactccagttagccattctttcaggtcaggttgacgtaggtggtttcccttacgatggtggagttctcgcccagaaaacgcaaggtgatcacctgactttgctcaaccctaagccagcactcattaaacaagccattggttttgggttgccgcggagtatggaaccccgtgatattgcggtatttaatatcttccttgaagagaaagtcgccttaggtgaggttgatgattcaatgattcattatggtcagattatgttgggtaaggctgactggtaa

SEQ ID NO: 446718 - DNA, 408 bp, Serratia marcescens
atggggttgttcactttggaagaaaaggaattcaaaaaggttgctaaaactacatttatgcgagagtcgatccttgaacgcagggatatccagtcagcgatagccaagaatatgagcgattttttgcctgattgcctggtaatccaggaagagtttaacaattgggaaaatagtcaacgtagaattgatttactctgcatcgacaaggcgtttaatctggttgtcgttgagctgaagcgggatgagcaaggtgcgcatatggaacttcaggcggtaagatatgccgctatgatttcgcaaatgacgtttaatgatgctgcagaatgctaccaaaaacgtcttgatagcgcagcaggtcttgctaagaatgcggagcaggagatactcaagttttgtgagcgagagtaa

SEQ ID NO: 446719 - DNA, 1080 bp, Serratia marcescens
gtggcgctgaccacgccgcagctgctgttgggcggccaggcttggcataagctgacgctgtcagccgaaaaacagctgggcgccaccgtggtgagcgccaagagcgatgaagtggacggcagcctgcgggtggccgatcgcgggccgtggcgcgccgatatcaactacctgtactacaacccgcagttcgccgaaacgaaaagcgcggcgggttcgccgccaccgccgccggagaaagtcagcttccgcgactggccttcgctgatgctgcgctgcaagtcgtgctgggtgctggggcagaacctcggcaaggtcgaggcggatctgagcaatcggggcgatactctgacgctggatcacggcctggtcgataccggcaaagggcgcatgagcgccaccggtctgtggaagcagaacgcgcaggaagagcgcagctcgctgaaaggcaagctgctcggcggcaagatcgatgaaaccgccgccttcttcggcatcaccatcccgctgaaaggcgcgccttacgacgtggacttcgatttgtactggcgcggcgcgccgtggcagccgcaggtcaatacgctgagcggtgcgctgcaggtcaaaatgggcaagggagaaatcgacagcatgggcggcggccgcgccggccagctgctgcgactggtcagcttcgacgccttgctgcgcaagctgcagttcgatttcagcgataccttcggtaaaggcttctactttgattccatccgcagcaccgcctggctgaaagatggcataatgcatactgataatctattgatcgacggcctggcggcggatatcgccatgagtggccagatcgatctggcgcgccgccgcatcgatatggaagcggtggtggcgccggcgatttcggcgacggtcggcgtggccactgcgtttgtcgttaacccgatcgtcggcgcggcggtgttcgccgcctcgcaggtgctggggccgctgtggagcaagatttcgctgattcgttaccatatcagcggcgatctcgaccagccgaagatcaatgaggtacttcgtaaggcaaaggaggataaggcgtcatga

SEQ ID NO: 446720 - DNA, 330 bp, Serratia marcescens
atgtggcaagccgttagccgtctgttaagtgaacatcttggcagcgcagagatacgcgaaaggattgaactgcccgggggcgacattcacccggcgtggcgcgtgagttacggtgacaacgaggtgttcgtgaaatgcgacgcccgtgaacaactgccgatattcaccgccgaggccgatcagctggcgttgctggcacgcagcaaaagcgtgcgggtgccggaagtgtacggcgtcggcagcgatcgcgactacagcttcctgctgctggagtatcagcagttgaaacccctcgacgcccacggcgcctactgcctggggcaacaatag

SEQ ID NO: 446721 - DNA, 153 bp, Serratia marcescens
atgatttctcaaaccatcaacgggattttctgcgtaaccgtctgcggctgtgtcagttggcggtttgcagatttcaatgaagccctgcactgggcatttacaacacgtgtcgcgctggacgcggccaatcaattagaggttgcacacagatga

SEQ ID NO: 446722 - DNA, 189 bp, Serratia marcescens
atgcttgaaacattgccaggcggagaggactacatattccgcccggcaagagcttttaacatcgatatcaaagatcttaagtctggcgcggtagacctctgcgacattgcgatgatgaacgactatctcgatgttgaagaggaaaaccagcgccgaattgagaagtggagccgtgacaatgaacgctga

SEQ ID NO: 446723 - DNA, 210 bp, Serratia marcescens
atggactacgaagagcaagcgcaaattcgctatcaggagatgtgtcgcatcgtgggtgatgtggtatttgcgatggtggcggaaggacatgagacgaagaaggtggctatagccgatgttatccgaactgagctggcgaaggggctggataagtgggatgaggatcaaatgcaggttatgcacctggccgtgaagttgctggaggaatag

SEQ ID NO: 446724 - DNA, 687 bp, Serratia marcescens
atgaaagagcgcccagtgattttcaactcagaaatggttcgagccattctcaacggccgcaagacccagacgcggcgggttatcaatccgcaaccaacactaagtgagcggacagggtttaactggaagggtgccgcatacggcattggctcaacataccgcgacacggtaagaaattttgccaactgctttaaaacctgcccattcggccaggtaggcgatcggctgtgggtgcgcgaaaccttcgccgtcctcggcaacgaagacggatgccctatcgattggaatggaaacctgattaagggtgacgagaagcaagcggcgcggatttataaggcatcgtgctggcaggaaccgggcaactacggcctgtggtcgatacctgatcgagaaacccaatacgaaggcacatggcggccatcaatccacatgccgcgctgggccagcagaatcacgctggaaatcaccgcggtgcgcgttgagcgtctgaacgatatccgtgaagaggatgccaaggctgagggtgtgacgccatcgcaacacatcatcacgccgccagaagcgctatatcgcgttgggttcctgaaattgtggcaatccatctacggcgcagaaagctggagcgctaatccctgggtgtgggttatcgagtttcgtcgcgtgggaggtagtgatgccagcaaatga

SEQ ID NO: 446725 - DNA, 252 bp, Serratia marcescens
atgagcaagctgaaaatcgtcaagtttggcgatgagcgcgggatcggtgcaatcgttgaggctaccagtttcttcggcatattaacgcgcacctggacgctggttcctaggtcaaacaacgacggaaccataatggaatattgggggttcgataagtggacctgccgcgaaacaggcagatggcactatcgtctcttatgccgaatttgcacattctataccgctcaattcaacactagggctgggagctag

SEQ ID NO: 446726 - DNA, 180 bp, Serratia marcescens
atggttaatcaaaacttcaagccagggagcctgcgttatttcgatgaagaaattggcgcgcacgtcgtttcagagcctggctctacttcgtacagctcaacagcgatggcggctactgaattttttaacggcatcgagtggttaccggtagatggcgatgaggaggtggagcgtgggtaa

SEQ ID NO: 446727 - DNA, 420 bp, Serratia marcescens
atgacaagcatccagcggtttacccctgactacaaaatgcatgcagttcgcttcgagcctttcgcacgtgaagctgagcacggtgaatatgttcgatttgatgcccaccagcagacggtgagcgcgcttgaggctgagcgcgatgcgctggccgatcgagttaatgcgctggctgtggagagcaagacgctgtccgacgcgctttctttgatttcccgttgctacaaacattctccgcacattcaaagcatgtgtgttgttgaaaccccagccactgacgcagcacttgcagctatccaagcgcagggagttgagaagtttgcagacttccttgattcaccgatcgacggacagcactgctatcagaacgaagttggccttgcgcgtcacttcgccagcacgctgcgggagggtaaataa

SEQ ID NO: 446728 - DNA, 669 bp, Serratia marcescens
atgaaaactaatgaagaaatacggcgtgacaacgcccgaaagctgagagatagctctggtggcaattcgtcctttgccactttgctagatcgggaaccgactcaaattagtagggttattggtaaaaatcccactaaaaaaatcggtgatgatttggcacgtcatatagaaaagtgtttctcattacccgaaggctggttggataaagaacatcaagccactaatgttacagctgcccctgaagttgctgacacagagcttgaaattcatttagtcccagtcatttcttgggtacaagctggcgcatggactgcaattggttactctgaggttgatctaagtttgtctgagacatatccatgccccgttccttgtgggccaatgacctatatcctccgagtgatcggtgactccatgatcgatgaataccgccctggtgacatgatcttcgttgaccctgaagttgctccggttcatggagatgatgtcgtagcgcttcttattgactctggtgaaaccacctttaaaaggcttgttgaggatggcggacaaaagttcttaaaagctcttaataagaattggcctgagcaatatgtcaagattgatggcaattgctcgattatcggaactgttattttctcaggaaaaccaagacgatacagggcttag

SEQ ID NO: 446729 - DNA, 216 bp, Serratia marcescens
atgaaaatctattgggacacccttagcaagtcagagcaaaacgcactggcgaagcgtgtcggtagcagttcagggtatctgcgtctgatttttaacggttacaaaaaggctggtttttcccttgcaaaacgcattgaggaagaaaccaacgggaaggtaacccgatgccagctaagaccagatatctatggcaactctaccgttacggctgcctga

SEQ ID NO: 446730 - DNA, 210 bp, Serratia marcescens
atgcaagacctgaagattgaataccgcgatggaaagttggtggagatgagcattgatggtgtgagttttctttctgcggccgccatctccttcagtcatacagcagatgagacgctaccaacgatcatcttgacaatgtctgtcggtgtaggtgagcgactggcgcccgccggctctcctcacgcaaaactgcagatcatcgagaaatga

SEQ ID NO: 446731 - DNA, 1533 bp, Serratia marcescens
atggctaaaaaaaatctgacaagggccgagagaaatattctctggtgcgaaaggaacatcgttatacccgaaggtaagttcgtggggcagccgttgaaaatggcggatttcatgaaagacgactttagggcaattttcgataacaaacacagcactcgtcgcgcaatcatcagccgcggacgtaaaaacgcaaaaactgttgaaaccgccatgctgatgctgctctacctggtggggccggaggcggcgccgaactcgcaactgtattctgccgctcgctcgcgtgatcaggcagcgattctgtttaacctggcctccaagatgtgccggatgaacccggtacttatgcagtatgtggcgataaaggattcggcgaaagaaattcactgccctgagctgggctcttattaccgggcactgagtgcagaggccaccacggcttacggtttctcgccgagatttgtcgcgcacgatgagctgggccaggtacgtgggccgcgtgatccactttatgaagcactggaaaccgcgaccgctgctcaggataaccctatctcgataatcatcagtacgcaggcaccagatgcgagcgatctactcagcctactgattgatgatggcctgaccggtgctgacccgcgcacggtggtgcgtctacagaccgccccggaagagatcgatccgttctcggttgaagccatccggctggcaaacccggccttcgatgtgttcatgaaccagaaagaagtgctggatatggccgccagcgcgaagcgcctcccgtcgcgccaggctgaatttgagaaccttgtgcttaaccgcagggttgaggctaaaagtccgttcgtaagccagaacgtctggcacatgaacaaagaggaacccggagaactggcgggcgctaccgtctggggcgggctggacctttccagtgtttcggaccttaccgcgctggtgctgaatacaacgcagggcgatgtgcactgcaagttctggctacctgaagaagggttagcggacaaagcgcgtaacgatcgagtgccatatgacatttgggcgaggcagggttttcttaatacgacacccggtaaggccatcgaatatgcatttattgcccgcgagctgcggcgcgtttttgatatctgtaacgtaagggcgctggctttcgaccgctacaacatgcgtttccttcgtccgcacctcatcgatgccggtttcactgaggcggagctcgagcggttcgtggaattcggacagggctttgtctccatgtcacctgcgctcagggagctggaagccaagctgctaggagcgcagcttaagcacggcaaccatccgatcctcgaaatgtgcgccaaaaacgccacggtaatcaccgacccagccggtaaccgcaagtttgtaaaaggaaaatccagcgggcgtatcgatggcatggtggcattggcgatgtctatcggcgcgcagaccagtgatgaagtagaggatcctggcgacgttaacgattttatctacaactttttgagcgtgtaa

SEQ ID NO: 446732 - DNA, 1278 bp, Serratia marcescens
atggcagataccgattatagcattgacctgcgaacgcgatcgccattttgggcgcgcatggcctctatcctaaccggcggccgcctggtgacacccgataagggctctcagatggcgggcacgtcagcgcacggtgtggttggtgattctgttgtgactgatgagcgtaatatgcaaatcagtacggtatgggcctgcataaggcttatctcaaccgtaacagcatctttaccattagatgtttatcaaaccaagaatgatcagcgcacgaaggtggacaacgatcacccccttgcgaaactgctgagattccgtcccaacaacttcatgaccgcccttgagtttcgcgaagcaatgactatgcagttgtgtgcctacggcaacgcctatgcacacgtagagcgaaacagtgttggtgacgtgattagcatggttccactgatgagcgccaatatggaagtgcggctcagcgataacggtaaaaacattatctaccgctaccgacgtgatactgaatacgccaacttttcacagaaagaaatttttcatctcaaagggtttggcttcaatggtctgactggtctttctccgctggcgttcagtgcgaagtctgctggtgtggccattgcgatggaagataaccagcgtgaatttttcgccaatggtgcgaagtctccgcagatcctgatgactgacggcaaggtgctgacgaaagagcagcgcgggcaactggaggaaaactttaaggagattgctggtggcccggtcaaaaaacggctttggatccttgagagtggcttcaccacgcagcctatcggggtttcgcctcaggattcggaaattctggcagcgcgtaaatttcaggtagccgaactggcgcgcttttatggtgtaccgcctcacctggtaggggatgtcgagaaaacaacttcatggggtagcggtattgaacaacaaaacctcggcttcttgcagtacacgttaaaaccgtatctggatcgctgggaatacagtattgagcgctggctggtaaaagatgccgatcagggcaggatacatgccgagcataatttagacggtctgctgcgcggtgattcgacaagccgtgctgctttcatgcaaaccatggtgaatactggtattcgcaccgtcaacgaagtcaggcgactggataacttgccaccgcttcccggcggagatgtagcgacacgccagtcgcagaacgtacccattaccgatctcggaagaaccaaagagccccgcactgacggggcttaa

SEQ ID NO: 446733 - DNA, 669 bp, Serratia marcescens
atgcctgatattcagaaaaccctggcgttcgaccagacagaaataaagtttaccggcgacggtgataaaggcacttttgagggctacgcctctgttttcaacaatactgactccgacggagacattatcctgccaggtgcattcagcggtgttattgctggtcaaagccgaaaggtcgccatgttctttaaccatcagacccgcgcgatccctgttggtaaatgggattccatgcatgaggacgataaagggctgtttgttcgcggtcaactcacgccaggacttagtctgtctgaggacctgaaagcggcaatgaaacacggcaccgttgaaggtatgtcagtcggtttctccgtcggccccgatgattatacagtcggcacttccggcctcattttcaaaaacatttcttatctgcgggaaatcagtgtctgcactttcccggccaacgagctggctggcgtgaccgccatgaaaagtatcgacggcatcaaaaccattcgtgacgcggaagcctggctgagggattcagtcggtttgacccgttctgaagcgcaggcatttattgcccgcgtgaagtccgcaggccggagcgaatccggtagcggcgacattgacgcgctggcacagcgcataacctcatttgccgctaatctgcggaatgcataa

SEQ ID NO: 446734 - DNA, 1164 bp, Serratia marcescens
atgtctgaattagccactctcgaaaaagcgattgagaattcccaaaaagaagttaaggaactcatcgaagaacagcgtaaatccatcaatcagaacggcgaaattaacacgaaactgcaggccgatctgaccaaagctcaggaagagctgaagaccaccggcactcgcctgttcgatcttgagcaaaaacttgctggtaactcaccggatcagactacgcaaaagtcatttgccgaacgcgtgtccgaagacctgatgaaaggctgggatggttcccgcaccaaagcgaaagttaccagctttgataaagctatcggttccggcgcagcgtcagcgggtgccctggtccaaccgcagcaaatgccaggtattctgatgccaggtctgcgtcgtctgaccgttcgtgacctgctggcacaaggccgtattaccagtaacgcgctggaatacgtgcgtgagaatgtgttcaccaacgctgctgcgccagtggccgaaggcaccctaaagcctgaaagtaacatcaccttcactaaagaaacggcgaacgtgaaaaccatcgcccactggatccaggcgtcgcgacagatcatggacgatgctccggcgctgcagtcctacatcaactcccgcatgatgtatgggctggcgctggtggaagaaaatcagatgctaaacggtgatgggactggcgataatctgcagggcattaacgtagtcgcgaacgactatgaaaccgcgctaaatgctaccggtgataccggtgctgacatcctcgctcatgcgatctatcaggtgtctctgagcgaatttgaagcagacggaatcatccttaacccggcagactggcaccgcatcgcactactgaaagatgccaacggcaattacatccttggtgggccacaggcgtttgcctccaaggtgctgtggggacttcctgttgtttctaccacggcccaagcatcaggtaccttcactgttggcgcatttggtcttgcatctcaggtatgggatcgtatggatgccactatcgagatcagcaatcaggatcgcgacaacttcgttaaaaacatgctgaccatcctgtgcgaagagcgcttggcattggctcattatcgtcctgctgcgctggtcacaggtagcatcaccccaccagtaactccgtaa

SEQ ID NO: 446735 - DNA, 210 bp, Serratia marcescens
atgaacgagcaacaggtaaacgcactgatagcagcactgcaggaagagaccaaggcaaagcaggaacagacagcagcattaacccgcctggcggagtccaatgaatcgttggtcgctgttctggccgatgcatttagtagtgatgctgatcttatcgaaacgacgtccattgatgatcagcgccctcagtatctgagtaccagggggtaa

SEQ ID NO: 446736 - DNA, 333 bp, Serratia marcescens
atgcaggctggaaaactgcgccaccggattaccctgcagaaacccgttaaggtgcaagataccacctctggtgaaatgatcgacacttggcaggatgtgtctaatctctgggccgaagtttccccgctctctgcccgtgagtttgttgctgctcaggctatgcaaaatgctgttaccaccaggattaaaatccggtaccgacaagatatttcagcaaagcatcgcattctgtttcgcgggaatattttcaatatcgaaggggtattaccagatccggatagcggcctggagtatttgacccttccatgctcagaggggacgaacaatggctga

SEQ ID NO: 446737 - DNA, 795 bp, Serratia marcescens
gtgtctgatcggcgaatcatcgctggcgccctgacggaatcgtacaatcccgatcagcgtatcttccgcggtaacgccaacagagaaccatgcggcaccttcgttagaagtgtgcgtggccacagtgaagatatcgctgaagtttacaccgtcacgagttcgaataatgtacgcatcagcgtcggaagagccatgcaaaccgccagcgtgccaccccatgtatgcgtatcctttccacgaaaacattttgccctgcggccagttcgcaaaaaatccgttgttcgtgatacgagtcagtgttttacccatgatgccggccagagcatccgcgactgtctcaccattccagccaaccatcccggccccgcccggcatcccagcatcagccagttcgagcgacaactcagtattcgaacctgcgtcagcagaaaccggaaccggcttaccctgggcgttcagacctaccagcttattcgcgttggtagcggcatcaggcatcacgtcaacgtcatagccaaacctgaggtttcgcttgttgttcgtggtgatctcgttgcgaatatcgatatccgccttggttcgtgccgcctgctcagcgctatcagcggcgatccgctcttgtcgctcttgcgcaagggcagcggccgcgccggcttcagcgtctgcaacttcggagtcaacataacgctttgtggcggcgtcctggttagccataggatcgccaaggttagagatgcggtttccttgagcgtcgtagaacttcgccaaccagttaggctttcgcagcgccaatga

SEQ ID NO: 446738 - DNA, 246 bp, Serratia marcescens
atgatgcagctaaccttgggtcgccagcatttcacccttgatgagcgtgacgcgttgtttgtggcggaagctatcctgttgcagcgtaaagagcctggcgtcgtcttgccggagcaccgcagtgaaaaacacggcgttatttgtctggcgagtcgccaggccgagccgcgtctgttccgtgccgggccggtgccgctgacctgcgcggctgctgatacccgcaacgaccaactgacggactgttga

SEQ ID NO: 446739 - DNA, 264 bp, Serratia marcescens
atgttgaccgtttccacccccaccccatccaccccgtcgccggttattcctggcagttacaccccgcgcgaacgctttatccgcctgccggaagtgctctacaccaccggtctatcccgctccaccgtgtacgagatgatgagccgccggcagttcccggcccaggtctccctcggcggtaaaaacgtcgcctggctggcctccgaggtcgagcagtggatggacgaacgtatcgctaaccgtcaccagggggccgccgcatga

SEQ ID NO: 446740 - DNA, 192 bp, Serratia marcescens; identical to SEQ ID NO: 158566

SEQ ID NO: 446741 - DNA, 234 bp, Serratia marcescens; identical to SEQ ID NO: 426787

SEQ ID NO: 446742 - DNA, 306 bp, Serratia marcescens
gtggcagcggctatcgcccgcgccaaagccaaaaaagccgcgcagcaggccgatgcccctgcagcggcggaaccggctccggctgccgtcgaggaagacccgcgcaaagcagcggttgccgcggcactggcacgtgtaaaagccaagaaagccgcgcagcaggcggatgctcctgcagcggcggaaccgacgccggttgccgccgaggaagacccgcgcaaggcggcggtggcagcggctatcgcccgcgccaaagccaaaaaagccgccagggaatcgctgacggcggaaacggaagacaaatga

SEQ ID NO: 446743 - DNA, 2862 bp, Serratia marcescens
atgaataaagtctacgcattggtatggaacccggttcgggagtgctggaatgtggtcagcgaacactgtagccgctgcggcaagggcggcagcaagcgccgtttagcggtggcactgtcgctgctgagtctgctgccactggagcaggctctcgccctgccgagtgggcaaaacatcgtggccggccggggtgacatcagcagcaatggtcaaaacatgaccatcaatcaacacagcgacaagctgatcacgcaatgggataacttcagcgtgggcggtaacgaaagcgtgacgttctatcagccaggcagtaactccgtcgccctgaaccgcgtcgtaggcgttaacggtagcgatatccagggccggctggacgccaacggcaaagtgttcatcgtcaacccgaacggcgtgattttcggtaagaatgcgcaggtgaacgtcggtgggttgatagcctccactcgcgatatcagtaacgccgatttcctggcgggtaaaaaccgctttaccggcagttcacaggcagaggtcgtcaacgaaggccgtcttcaggccgctgaagccggcagcatcgccctgctgggcgcgcgggtcgataaccgtggcgtgatccaggcaaatatgggcaccgtcgcgctgggcgcaggcgacaatgtcaccctgaacttcgacggcaataagttgcttaacctgcagattgacggctccgcgctcgatgcgctggtacaaaacggcggcgttctgcgcgccgatggcggccaggtgttgatgagcgccaaagccgccggcgacgcactgagaaccgtggtgaacaatcagggtacccttgaagcaacgaccttacgcaaccaggccggtcgcatcgttctggacggcggcgacaatggcgtcgtcaacgtcgccgggacgctgaatgcctcggccaacgtcggcaacggcgggcggatcgaaaccaaaggcgctcgggtagcggtgcaatccgatgcaacagtcaccacccgttcagccaatggcaagaccggtagctggcagttagcctccgccgacgtcaacgttgcggacaacgcgacggttaatgctcaaacgctgtcgcacacgctggagaacagcaacgtcgagctgatcagcaccaaaggcgatgtcgcggtttctcagcaggtgcgctcgcaaagcgccaacacactggcgctgacggccgaacgcgcgggcatcaagatcaacgcgccgatctcgacaaccggcggcctggcgttaaaccacaaaaccggctattccctgagcaaagacgccactgtgaccctggccggcaaggatgcgtcgttcagcatcaatggcgaccagtaccaagtcgtgcaaaacatgggacaactgctggggatcaatagagatctgaacgcccgctatgtcttagggaattctctcaccggcaatatgcacatcaacgctatcgccggcgagtcgtctttcaatggcagtttcgaagggttgggtaatacgattcggggacttgaagtcgccaataacaataacgcttaccttggcctgttcggcgtctccacagggcacatcagcaacctgaagctagattcgctgacgctgatccctactggcgacacgatttacagcggtggcctgaccggcctgaacttcggtactatctccaacgtgcaggctacaaatatcaatatccgcggccaaggtgatatcggcggcttggtgggcatcaacttcggtaaagtggcgggctcttcggtatccggcaacatcaccggcactgcgagcaacagcaaccttggcgggttggttggcttcaacctgggcaacatccaggatagccagactaacgtcaatgtaacaagcctcgcgaatgccgcttccaaccgggtcggcggtctggtcggcgataacagcggtagcatcgaggattcatcaagcaaaggatatgtcattacgtctggtgagcaaacggagatcggcgggctggtcggtgccaataacggtaagatcgtcaatgccatcgccaacgccactgtcatcgggggccgcaacaaccttatcggcggtctggccggtaccaataccggcaagatcagcaatgcgacagccaatggtccggtaacggggagcggttcatacgccatcggcggcctgattggtcaaaatgccggtgaattggacgtggtgcgtgccaatggtgatgtggttgacaagaacggccgccacctcggcggcttgatcggcatcaacgccaaaaatgctcgggtgcaaaatgcccatgcaaccaacgccgttaccggtggcaacaatgccaacatcggcgggctgatcgggctcaacgatgccggcaaagccgtcaacgcttctgctggcgggaaagtcagcggaggtgacaacagtcagattggcggtctagtggggcgcaacaaaggaatgttgacccaagtaaaagcgcagggtgacgtgagcggcggacgcgatagcgacgtaggtggtctggtcggcattcatgatgtggctagcagcattgagcaggccagcgctaccggcaatgtaacaggtctggcgggcagcgcagtcggcgggcttgccggccgcaatggtggcaccatcaagaaatcgtcggcctccggccatgtagacagcatcggtccttctcagcgcggtggtttgatcggcgctaacgtcggccacttatacggttccaccttcaacggttcgatcgcgaaaaaaacgatggagtatcaatgggtcggcagcctgatcggtgctaacatcggcggtaacgtgagcaacaatacggtcaccggcagctctgctgaccaaccgctgtacggacggggctcgcctgacacctggtaa

SEQ ID NO: 446744 - DNA, 906 bp, Serratia marcescens
atgagcaatgacatcatcacagtgggaaaccacgacgtaacagacacggccacggcaatttttagcccatccggactacgccagttacaacagttcgctgaagtaatggctcagagtgtacagacgctgccaaaacaccttgcaggaaaaccagcggattgcatggctgtggccatgcaggcggcccagtggggaatgaacccgtttgcagtagcccaaaaaacccatctggtaaatggcaccttgggctacgaggctcagttggttaacgcagtggtaaccagttctcgcgccgtacaaggtcgattcaagtacgaatatggcggcgactgggatgcgtacatgctgcaccctgataaacagcatgaagccggtttatttattcgtgtaggcgcagtgatccgcggtgaaacagaaataacttggggtgagccagtctatctggctccgatcaccacgcgaaattcccccctttggaaaactgcaccaaaacagcagatcgcctacctggcagtaaaatactgggcgcgcctgtactgccctgaagtgattctcggtgtgtacacgccggatgaattcgacgcgccgcaaccacgcgttgaacgcgacgtcaccccacccgccaccagtgccgccggcgtaaataaccttatcaactccaagcctgctcagcagcaggaagataaaaatccatcccgatcgcaggatgacattcttaccagcttcaccgaagcagctggcaatgctgagaacgctgaaaaactggatctcatcttcaatggtggtacctggccggacggtaaaaaacgccctggcgcatgcgatgcgctgtcggataaatggcttgagatggccaccgacgtttacaacatccgtcgcgatgagttgaacgaagtccctatgtaa

SEQ ID NO: 446745 - DNA, 201 bp, Serratia marcescens
atgggggtggaatggcaatacagaaaccctgtgtctaataaaaatcgccgcaaaaaacttaaagataggatgaagcggttaattgataacacagagcttcaaggagggaagaaggtattcatcaagcagggattggcagaaatcatgcaggaatatgccgaactttgggaatgcagaaatggtcgggaggttaacaaatga

SEQ ID NO: 446746 - DNA, 384 bp, Serratia marcescens
atgaaaaatatcgttgaaaatcaaggtataaaaactgataagccattgccaatgagttatgaggcgctgaaagctgagcgcgatgcgctggctgtggaggatgcggcgctgaggtcatcggttgaccttattgcctccgcctacaccgaagctgagccagcagggtttgaaatcgacagagcacgccatatcgaaactccagccactgacgcagcacttgcagctatccaggcgcagggagtggagaagctcatcaagctgaagatggaacagcttgccaacatgcatccagacacccacgcatttggcgctacagctgagtctctgcgcgctcagattaacgagctgcaagcattcgccaccgaactgcgggagggcaaatga

SEQ ID NO: 446747 - DNA, 417 bp, Serratia marcescens
atggacaataagctgagcgaactgaaagcggccgctttttcactgaaaaatatgagcgataggaaggcaaagggcctgcggacaagcaccctgcaaatcaatgcggctgcggcaaaaatgcgaggaatgttaacagcagatgccgctctcgccctgctggcagagctggcggagaaggataagcgcatcgccgagcttgagcagctaccgacaattaagcacatgcgtagcgttgaagagtccctgatccgcgccacggatatggtttcagacctggaagccaagctggctacgccggtgcggttgcctgatgtgttgtttatcaaggtaagcggttcggcggttccggtaatgcacgctgaacgcgttaaggagcggattcagcgcgctgggttcaaagtcaaggggggtgagtag

SEQ ID NO: 446748 - DNA, 570 bp, Serratia marcescens
atgacactaacgactgagcagttgagagaacgaatcggacacctgaaagaacgtctgcgagacatgaagcagcataaatatcccgacaattgccctaacgccgccgcgtatcttgaaagtttaaaggttgagcgccaacaagatattgaacttctagaagaactcctggctaaccgggaggcgcagccggtggcggtggttataactcgcggccatctcgcacacattacagatgccgatctggaattgggcaccaaattatacaccgccccgccagcgccagcagtgccagaagaaatggaagtgccggatccagtaatctctatgccgataattgaaaatgcagaagagatatccttcgctgaaggatggaactcctgccgcgccgcaatgctgaaccatgtcggcgatgccaacgaaaaggtcaactctccggtaatcccggatggttggaagctggttccagttgatccgacaacagaaatgataaacgcagcgttagcatctggagccatatccatacgcacagcgtacagtgcaatgctggcagcagcgccgggggaatcatga

SEQ ID NO: 446749 - DNA, 408 bp, Serratia marcescens
atgagcaaagcaggcgtagaagaactcaacttcattcaatcgatgcttgagaagtgcggttatcaactctcacctcatggcgccgccgtgtctctcatgctgatggacagcgattacaataaggaagaaaccctatcctatgtcggactgatcgccctggctcagaacatgcgcactgcaggcaatgggatggtcaacatcatgcatgctattagcagaggaaataagctcgctgctttggttgaaaaccttcgtgaccaaggttacataagagctgaattattcaacaatgatatgtcagcaataaccgcgctcattaatttagatgccgaccacaatgcaatgatcggcgtcgttctcggtagtgacccacatgcagatgcggatgacgtagctataaattcctag

SEQ ID NO: 446750 - DNA, 2562 bp, Serratia marcescens
atgaccgtatcaacagaggtaagccgagaggaatacaccggcaacggggtgacgacagattttgactatcgcttccgtgtgttttctgcggatgagcttgttgttactgtcgcggacacaacagaaaacatccgcacactggtgctaaataccgattacacagttaccggcgccggcagtcgtaacggaggcaaggttaagcttgccagcgcgctggccaataactggcggatcagcatcgagcgagagctgcctgtcacccaggaggccgacgttcgtaaccagggtaacttcttccctgaggtgcatgaggacgcatgggacaagctgaccatgctgatccagcaggcgattggtggccttggccttgcgctgcgaaaaccaaactggctggcaaagtattacgatgccaaaggaaatcggatatctaacctttccgatcctgtctatgggcaagatgcagcaacaaagcgatatgttgatgctggagatgcatctagcaatcagcatgctgatgatttattcaagcgaaccattcgagtaccagagaactacgttgatgaattgccaacaatccacggccgtggcggtaagctgtttgcgtggagtaattccgggcggcccatcgcggtgcatgctgaaaccgatggcgggacacagctcgagatcgacctggccggcagtgatgggtttaagttcatcggccaggccggctcgtttgatgaactcagaagcgtgatccctgagcgtgctggtcagaaaatcctgctaggtggctattaccctggctgggctgctatcgggcaaccggcaggtggcggcgaatttgtggcggtttccggggtggcggtcgatgatggcggctatatttgccagcctgcgggcagcgcactattccactggcagcgagtaatcgatgggcgaatgctaagccccgagatgtttggcgcattccctgattcaacgcgaagcgtgcgcgggactgattatgcgcccaaccttaacaaaatgtttgccgctgcaattgcaaataattttggcgttgattttcgtcatggccagggtggctacgaatttgagaaagaacgcgcctattacgtcggaagtccagtcgtggcgactggtattcatcaaatccgtgggagcgtttacctccatgctgactcgagtttgttcgacaaaaccaataatagctatgtcttgctgctaggtgatccaaaaacaaattatcagacaatacaaaatactctgttgtttgactttatttttgttcgagatattgaccagcgtgggcttcgctctggactgaaaaatgaattgaacggcgtattcctaaagtacactggtgtttacggtgatggtttccgtgcaatggactttaacggtcgcggtgtgcactgctctcctgtatttgactccaagtttggcattattcaggagcgatgcggaaatgagttgtcgtatgcgatcacagtggatgggaacggcgatgaatcaaactcgatcaccttcacttacatattatctcatgatgcctatcataaaggcgtttatatcaccggttctaagcataacatcctacgtgctcacattgaggccacggctgttaccactctggacgatggatatactggtgcgtccggttctgttgcgcagagtggactcaagtatttaaacaacttcttctatctcgtcgctggtcaaaccgggaacataacaattaatgattattctcgcagcgataataaaacttactacgacgatctggacaactatgcatcaacaaatggtgcgcactcattgttcattctaaacaccggtagtaatgcatcgtctatacaggcaacgtcgccaaatgttcacacctcattctttggtggctcgacgtatggcggcataggtgtgctgcaaactattaatgcgtactatgaaacagggagcaggatcacaacctctgttgcgcgcgtgacagatttgcgcgttttcgacaacttcaatcggttcttatctggccgagccgcgagggtgtcaagagctgctgggcagttctattccttcactgtcgatgcgccgttctctcaatcgccaaatcaggagggtactgtcgtattcacaaactgcacatttagcggcggtatttctgcattaacgaacggatatacataccttaataattgcattattaacggcatctcgttgaatgcgaataacacaccggagcgcggtatattcagaggctgcaatatatcaggaaatataaatattgccgacgcatcaagcagcacgaataacaaacgagtgctgttctatgcatgcgaaatgacagggaatctgacgctcagttcaaatagagaatcaactccggcatttatgggttctgataattgggctcgaggcgggacggtttcaggatggtctctgccaaaacacatggaagttggcgccattgtccaacgcattgggcagccgtcagcaggtcaggggattatttatattgccaccgccctgctgtcagacggcacaaatacatgggcgacgatcgctcaagttcctaacgcataa

SEQ ID NO: 446751 - DNA, 1053 bp, Serratia marcescens
  misc_feature (1032)..(1041): n is a, c, g, or t
atgagtagttttttttatatgcagccagagctgaaaaataataagaatgctgacttcttaaatgaaattgaagagtttgctaattctaaacagatgcagctctatgcaattaagaatccgctgggtgaaaataaatataattataatagagatgatgtctgtgtagtattatcaccgggtgctaagttgctatttgtaagctttgatgctgatgatgatgaattcgaagattatatcgaggactttattgaggacttgggctctctctctgataaatataattataaagatactatcggtcgacctagagagtggcgaaaaaaacttgtcaccagcttatgttttcctgcaatagatgaaaatcttgtattcgatgatttttttaatgatttaaagataaaggatggtgctgatagtaagaaaagtgagctaatcatttctcttttaactggtagcataaataacattgataaggtaaaaggaaatgttcctgacaatattcttgataaggttaaacagaaaataatactatttgatggtgatcaaactcggttcgtgtatcaaaagttcgaaaaaagaaaggttattattcaaggtctttcaggaactggcaaaactgaactgttgctccataagttgaaagagatttatctggataaagacaagcctgaaagtaaaataattttcacatgtcataataaaatcttagctgataatatgcgtaaaagaatacctgagtttttcaactttatgaaagttgaacagcaaattagctgggatgaacgtctgtggtgtgtcaatgcttggggatctcaatctgataaagactccggtgcatatcgttatatatgtgattcctatggtttgagtttctatcgctatagttatgtaatgacgtttgataaagtttgtcaaatggctttggatgaagtaaaaaaaatacctcgagatgagtttaaatgttgttttgattttatgctcattgatgaaagtcaggatttcccagaaagctttatagaactatgtgagtannnnnnnnnngtatgttactag

SEQ ID NO: 446752 - DNA, 966 bp, Serratia marcescens
atgcccagaaccaaagccccctctcgctggcaacattccgatccccgctatctctattccttggtagcccggcgttactttgcggagatgaaaaccaagattgaaatcgctgaagagctgggcgtttcccgttttaaagttgcccgtctgatcgatgaagccattgagcaagagtacgtcaaattcgtgttccccaaacagcaagcgctcgatgaagaaattgccggaaacctctgcgaaaaataccgccttaaagaagctgtcgtccttcctgcttctgaaacctggtccacccaagagcagctgaacgtcaaactcggggggatcacggcgaattatctcagtgaaaccctccaggagggaatgaaatttggcatggcttggggacgggttttgtccagcaccgtcagtcaattggtttctttaccctctctggatgttatccaactctcaggtgtacatccaggcatagagttcagtcagggccccgtagatctcattcataaaattgcggccatttcgcacgggaaggcccacccgatgtacgttccaatgtgggtcgatgacgagagtctggcggaaaaattagcaggcgatcaggccgttctggacgcccagaagttttacccgcaaatggacgtggtgatcaccggcattggtgcctggaaaacgggttcatccagtctgtgcgatattttcccaaagtcctggcgtgattcgctgctcgatcaagatatcgctgccgatgtctgcgtgacactggtcaacagcgagggagagatcctggacagtcccatgagccggctgggctttggcattacaactgaacagctgagaaccacgaagaaattgatcggtgtggcgggcggtgaagagaagtatgaagggattgttgcctcgttaaaatccgggcttttgaaagtgttaatcacagactttgatacggccatcaaacttctggagtga

SEQ ID NO: 446753 - DNA, 522 bp, Serratia marcescens
atgaaaaactactctctcgttttgaacgaactagcctcgctcgctggaaaaatcgatgagcgagaatttaatgccgttattgattccctcgtcaccgcgaaccacatcttccttgccggggctggtcgttcggggcagatgattaatgcattgacgaacagactgatgcacctggggatgtcagtcagcgtggtgggtgaagtcagttcccctcattcacatgaaggcgatttgttgattgtgggatccggttctggggagactcagcgcctgattaatcaagtgaacattgcgaggaaaaacggggtgcagatcgccctgatcaccgcggcaccaggctcaacgctggcggggctggctgatcatgtgctgaccattccggccggcgacagtttacagccaatgggctcgctctttgagcaggcttgcctgctgacgtacgacagcattgtgttggggttaatggaaaagcttaatgaaacaaaccagacgatgaaagcgcgtcacgccgacattgagtaa

SEQ ID NO: 446754 - DNA, 459 bp, Serratia marcescens
atgaaactcgaaattctggtaaacgacgttgaggaaaccatcgctgactggcgcgctgctattgagtttgccggccagaagctgctggagaaagactacatcacactggaatatatccaggcctgtctggtacgtgaaaaaacctacccgacggggttgatgatggcaaatgggcaggggattgccattccccatgcggattacacgctggtgaagaccaacagcatcagtatcgttcgttttgacaagggcgtgctcttcggccagatggaagatgcggatctgaccgttgaatgcggcatcatgttcaaccttgcgttcgccacaagcgatcagcacatggcggtactgcgtcgccttttcacgcttttccaggatctgtcgttcattgagtcctgccgcaacctgaaaacgcacgaagtcggaaaatacgttgaagagatgctttcggcatcttga

SEQ ID NO: 446755 - DNA, 285 bp, Serratia marcescens
atgaaaaagatcttagtcgtgtgcggtaacggtattgcttcttcctccatcatggtttctgtcctgcaagactttctgaaagagcagaaaatggaagcgcaggttgataagtcctctctgatggcgtgcaccacggacaccttcaacggatatgacctgatcgtctcttccaccaaactggacaacccggggatcacgacacgcgttattgtgggcgcaggcctgttaaccggtttgggtgaagacgaaatcttcgatgccgttaaagaagaaatgctgaagtag

SEQ ID NO: 446756 - DNA, 1371 bp, Serratia marcescens
atggaactgatcacacagtttatcaatgatctgggtaactttattttcatacccgtcatcttccttatcctgatgaagctgctgggccgtccgctgtccgaatgcatttcatccgcgatcaaagtcggtatcggtttcatcgcattaaccatgaccatcatgttaatgctggaaaaaatgcagccagcggtcactgggctcgcagaagccacaggatcgtcactcagcgccattgacgtgggaggggcggcaacagccgtcatgggtttcggctcaagtatgggggcgattatcatcccgctgtgcgtggccgtgaacattgccatgctggtcgctcgcctgactgactgcgtgaacgtcgatgtgtttaacctgcatcagaatgcctccatgggggcaatcgtgggggcttactctggcagcttcctgtacggtgttcttactgccgcgctgttccatgtctgggcactgattgcggcggatctgggcgcgaaaaagaacgaacagttcttcaatctgccgaaaggtgtcgctatctcacatccggttgcgaatacctacctgttgtttgcctacccatttaactggatttacgatcgcatcccgggtttccgtaatctgaacgtgaccgcagaaagtatccagaaacgttttggcattctcggcgatccgaccatggttggtttcatcatcggcatcctgctgggcttctgtggttatggctgggagtctccgtatcatacggtcatagcgagccttcagctggggatgtacctcgcggccgtcatgcttcttctcccgcgtatgacctccattatgatggaaggactggtaccgctgtccaacgtggcgcgtaagaaactggtcaaacgtttccccgatcgcgagattaccgtcggtatggatacagcgctgattgttggacacccgtcggttatcgcccccgcactgctgttgatcccggtgattgtaatccttgccgtgatcctgcctggcaaccgcgtgatgccgctgggtgacctgtcgcagttcgtgttctttattgcatgcatggtgcctgttttcaacggcaatattattcgcacttgggtgacctccatcatcctgtttggtggtggcctgtacattgcttcctggatggcgccagccactaacgaagtgtttcagcagttcggcaccaatccggatgcgagcgtgatgtattcatctctgaacccgtcggccaacccgttcaccggcctttttgccgccctcagccacgtgggcatcgttggttacgcgcttgctgccgctttgctggtatcagcgggatacttgcttaaacagaaatcacgccgtcagttaaaagcagaagcagaaaaaacgatttaa

SEQ ID NO: 446757 - DNA, 537 bp, Serratia marcescens
atgaaaactaaaattgcaatcgcaagcgatgatgtagggttcgaacgtaaggaggagatcaaaaaataccttgtagaagagaaaggtgcggagattgtgtacgatcccgtcaaacgcaaggaggacggcgtgaataattttgcccgtctggcagacgaaatggcgggggtgatccagcgtgacgaatgccgcataggtatttatatctgcgggaccggcatcgggtttacgtgccaggtgaataagcactggggtattcgtgcggttgccgtaacgaatccttattctgcgaaacgcgcgcggctgagcaacaatgcgcaggtgattggactcggctgccgggttaatgatctcgaatacaccaaaatgatcgtggacgcgtggtatgacaatccgtttgacttcgccacagcaagagaaaactccaaaaagaacctgctggaagctgaacgcagcgataactcgttgctgataaagccgggtgatgttcgctggaatatggggttcagacccgatgatgagatttccgagggctaa

SEQ ID NO: 446758 - DNA, 165 bp, Serratia marcescens
atggtcagcggcgaattcaactcgccgatcctgcaagaggccgagcaggaaggttatcaggtgctgcgcaagccgctggagccggccaggctacatgcattgctgacgcagtggggggcggttaagggtggtttggcacctcctgaaacactgtttgcgtactaa

SEQ ID NO: 446759 - DNA, 1929 bp, Serratia marcescens
atggcgcagcgtgataatctatatcgacgtccaagtggtatctatgttctgcggatcaccgttccggttcgttatcgcgccctgatagggcagcgtgaaattcatgcatctacccgcacaacccaccttgcaaatgccagagctattgccgcgcgtttgctggagaagtggtatgcgtctctggaagagttcaggcaagtggataaagagaagattcggggtaatgcgccgctgttggctggcgctggcaaaatcagtttagcgctgttttgcgagtcatttgggattgcgcttgaaatggttgttcagcatcttttggcgcacaatgttccggtttattgcttcgcggaaggcctaaccgctttccagattgcagactttaccgaagctgaacgggaagataatggcggttttgtgcttaataaccttgagcagaaagggttagaaagcgtgatgcatggctatgtccgattgttccagacgagctatgcgtttaaacaacttctggagcaaggctacaccgaggaagtggcattcagaacgaacggcgacaaccgtctttctatctggttgatggattttccagggatcagattggatggcagttctttgtttatcaacaaggtgcaggctgagagtttgcgcaatatttgggataacgcgtttgcgaaatcagagcctgaattgcctccggctcctgttgtgatttcagccccgctacctccaccagttgtcatcactaatccgtattgcaatcctctatccgcttcgaaaagggtttcagaagtgctggaggagtttctggcttataaacactcaggggatatcaaacttgccagcgaggagaaaattcggtcacgaatatctcattttatcgacattgtgggcgacataacactcgctgagttagatcgtaatgttgttaaaaattacgtttccagaatgcagaggatgcccagtaacttgtatttaatgcggcgtcgatatgctgctgaaagcttagatcagctcatcgaaaaagccctcgatgctggtgagccgctcatgacgaaagatgccattgaacgccatatggcatcactgggttcaatgctggaatgggcgcgtaaagaaaattacttaattgcgaatccagttgagaacgttctggcgaaacgtaagaaaatcgtcagatctcaggataaccggcatcaatttagtgatgatgaactggaactcatattctccgcatactggtttaaaacaggtgcaggtgtgcagaataagtttgggcgttacatcgactttcgtccttaccgctactggctgccattgttggcattgtatatcggcgggcgaatgaatgagttatgccagctttatctttctgatatccgtgtaagtgaaaatggcgtcgcatatttagatttcaatttggatgcaccggataaagtaatggactcagaagcagataagtcgctaaaaacacttaatgctttacgacagatgccgatccacccagagttaattcggcttggatttctcaaatatgtagaggcgttaaaatccgacggacaagaacgccttttccctgagttaaagtttaataaaactaaaggttatcgtggctatgcatcaaaatggtttaatgagctttattgtggcaaccagcttggcttagagcgcaatgggaagatagtttttcactcattccgccataattatgtgaacagcctcgacaggctggagctaagtgagcggatgatcgcgcagcttgttggacatgttcgtggcaacactactgccatgacaacctatcgtaaggacagggcggttgaggatcagttccacgccatttccgggctgacatacaatttgcctgagatagccccatttaatgcagaggcggggctgaaagcgatgaaagatggggttcgcaagcataagtag

SEQ ID NO: 446760 - DNA, 1026 bp, Serratia marcescens
atggttaaggcagatagaccgctttttattatggaggttggtggtaagtcggttcgacaccatgacatgagttcgggagagtttatagttgctagcctactagagtatatagatagcgagattaaaagaattaatgggaagccgggtaggatttctgatgtaagtcttgtcattttagatgaaattgaggttgggttacatccatctgcattaaatagacttatggattacttatcggttataagtaaacgaaataaaatttgtttcttgattgccactcataatcccgcgaccatgagtaaggtttctaaaggtggtatttatttactgcagcgctctaagtttggcgggaaaaatattaaaatattaaatccatgttatcctgcatatgcaattcgagcaacaaaggatatgaatggttatgacaaaatgattttcgttgaggataggttagccaaaaagataatagagcggcaaattattttgtctgggcttggtgataacaatttacataaaatcatgccattgggagggtggaagaaagtaattgaactccatgatgaatttcaggttaattctttgggggggagcttttgtagttatatttccattttggacggagatattcaagagcaatacaataaggagaagtatggtaatttatattctaattgttgggtggagtttttacccataccaagtttagagaagtttttgtttaggaaattaatgattgagggtgatgactctatattcagagctatagaaggtgcattctttaataactcaactctttcatttgaagaagttattgaggattatgtaagagataatcctaactatgagacgacagataaaaaggggaaaagtttattgaatgcaataaaaacaagagcaggagagaagaggtttgatcagaattcagtagagaatactctttgtgatattgctatgagatcgatcgaatcacccttatcacctaacaataatgatctggaagaagtgctatcacgtttttatcgttag

SEQ ID NO: 446761 - DNA, 546 bp, Serratia marcescens
atgtttgtgacaaccagagccgcgcattggctggctatcagcgtggggttactgctggcaggcgtgagcggcagcggtctggcggccgaaaacatgtattttcacggtgcgctggtggcggaaccttgcacgcttaaaccgggggatgaagatatccagttggattttggtacggtcatcgataagtacctttatgccaatggtcgtacgccgaccaagccgttcactctgacactgcaagactgcgatcttagcctgggtaaaacggtaaagattaccttcagcggcaataagagtcttgagctgcctgatctgttggcactggatggcggcagccaggccagcggtatcgcactggggctggaaacggcggcgggccagccgatagcgcttaacaagcccagccaggaaataacgctggccagcggaggcaaccacttggcgctgcaggtatatgtgcagggcgagccgaaggcgctcgcacaaaagaacatcggtctcggcgcattttccgccgtcgccacctttggcctggaatatgagtaa

SEQ ID NO: 446762 - DNA, 504 bp, Serratia marcescens
gtgaagacgcgtttaagtagaagaaggctttggtttccttgcctgctgatgttcacgggcatgctatgggggggcaatggtaatgcagaaactccggtaacggttaaagtgacgatcatggcgccattgccttgtgtgttgaacgcgaagaaaccgatagacgtggtttttaacgaggtcatgaccacccgcattgatggcactgcatatcgtaagccagtggattacggcctggtgtgcaacgggcaaactaaaaatgccatgaagctgcaaataaaaggggatggtgcgacctatgatggcaccgtgttaagaaccagtagggatgggttagggatcgcttttgaacaacaggcgggaaagaagttgccgatcaacaattgggtgaattttagttatcccaacatacccgagctttatgctgtgccggtaaaaaagagtggaaccgatttaaaaacgggagagtttaccgcttccgccatgctgtatgtcgattatcaataa

SEQ ID NO: 446763 - DNA, 489 bp, Serratia marcescens
atgaataagaatgtaacggcggtttttatattctttctggcagcaccttatacctatattgaggctgcggaaggggtaaagatgacgcttcacggcacgcttatcgccccaccgccctgtacgattaacggcggcaagaaaattgatgttgacttcggtgagcgggtgggagtgaataagattgatggtcagaactatcgccagactatcgattatagtgttacctgtgaacgcggcgttttaccctgggaaatgacgctgacgttaaaagggaatgccagctttgaacgtgctgcgctacaaactaacaagcccgagctcggcattcgaatttaccaaaacgatatgccgtttattatcaatacaccattaaaaattgtgcccggtaatttaccgctgctagaggcggtgccgatagctaagcctggctcgacattgatcgagggagcgttttccgccgcggcgaccttgcaggcggattatcaataa

SEQ ID NO: 446764 - DNA, 807 bp, Serratia marcescens
atgagaaaattcgtgaagtacattattatgataagctcgctgttgttaatatctaatcaggtaagagctgcctgggaagtagatgtaaaattttatccaactcgcaagcagcaccttgtaaaaattatccgttgggatgaggatgatcaaactaagaatatactttatagatgtaaggtcgaagggcggtgtatattaggtatttatatgtatcatgaaggctcctatgactataccgacgacttccctatgccggaaaaagtttccgatctgcagacgatgggcgagttggctaaggtatttcgggagcagggatatttggggaaagaggtttggtccaagatacgtcattacccatatgttaattactgttattatcttggctattatcttcgctctgggccaagtactacgtcgatggtgccagtacccggtggcgtatcggattgccctaccactgagataataccaacttattgcagtatcgcggaaccttatattgagcttgatcacggttccttaagtagtgactcggttaacggtaataccgtcagtaaacaaattcatgtgacctgcaacaatgattttaatttagcgattaggtcaaaagattcccaagggaatttgtctcttggtcgtggcttgaacagtcagttaaaagtgaatggtaccgatctgggtattggacatagcgaggtagttggtccgtctggaaaaacatttacgctctcttccaccttaagcggatataccagcggaacaggcgtttttcagggttcaagtgtgatcatcttgggcctgccgtaa

SEQ ID NO: 446765 - DNA, 546 bp, Serratia marcescens
atgaattcgattaattttcttattgatgacgagaactgttatttcgccgctggcctgcggcatagcattatgcaatatgcacaggctaacgagaagacggtgtactttttaacgtcgtgcggtgaagcgcagccggatgtggtaatcgcttccgcccggcggcgggcccagcgctggcgcagaactggctttagtgaagcgttaacgcccgtcgtcaccatcaaagaacgcagttttcccgcttctgaagcacaatgggtactgtaccgtaccgatgattgccaacgcctgtttgagctgttaggtgagacgttggagagtgaagcccctatgagccggcctgaacgccgtctgctcaccgcccgtgaacgtcaggtagtgaattatatgcggtgcgggtacgatcagtcgcagaccgccagaatgatgggggtgagcgttaaaacagttcacagtcataagcgctccatcatgagcaagctgatgctgaagcggaatcatgactttatttactggttgctgtcctatgggggagaatattcctaa

SEQ ID NO: 446766 - DNA, 603 bp, Serratia marcescens
atgacacagacactaacgactactgaagaactgacgcgccgactagccagggagtgtttggctaaccgggaggcgcagccggtggggtataccagcaaaagaaatttagccaatgttaccggtcggcaccttgagttgttcagcaaggattcggctgtctatagcgaccccgtggcgctctacaccgccccgccagcgccagctgtgccggggattgacgaacttcgactgacgtttgagcgcacggagagggaatccgacgatggattcaatctgcacaaatacggcattggttacgcggatgaggcgacacaggcgcgctgggagtcatggctatcctgccgcgccgcaatgctggctcaacctgtaagtggcggttacaagttgccggatggctggatagcgtgcaacgaacagatgccggatgatgagcaggagtgtttagttcaaacgcactcaggattcagatatgtatcattttacgatgagcatagtggcttattttacgatatgcgcggaggcaaccaggtggattgcatcgaacatattctcgtaacccactggatgccattacctgcagcgccggagggtgggaatggctaa

SEQ ID NO: 446767 - DNA, 225 bp, Serratia marcescens
atgagcaaggtaaaaacgatgggcgccagcccgctgagtggcacaattttttacggcacgctggacaccgacaaaggcagatgggttggtcataaatctgacgtaactgaaattgctcgccggtcagttgctgagcatctttaccataccggtgacagccatacctacgagctgaaagatggccgccttctggtgctgagcgttgaaattcgggaggctgagtga

SEQ ID NO: 446768 - DNA, 198 bp, Serratia marcescens
atggaagatcatgtgaaacgagttttaaacgagcgtcaagagctggcaaagaaatgtgatgcgctgcttatctttttaggtggtgacttatttctttctctaccaaaagcaaagaaagacctgatgcatgagcaatacgccgtgatgcgtgattacctaaacgttttagataaacgattggcacttgaggctgattaa

SEQ ID NO: 446769 - DNA, 561 bp, Serratia marcescens
atgagcgttcaaaaaaacacatacgatattttgagtgagctgcaaagaaacgcccgcaacatcgacgatgcgcaggcagaacagtttgttaatcagataaagagagccaatcacatcttcctgcagggcgcggggagaagtggcatcgcaatccgcgcttttgccaatcgtctgctgcatcttggattttcggtgagtatcgtgggtgaaatttcatcgcctcatacgcagcccggcgatcttgtcattattggttccggcagcggtgaaaccggtagcctggtaagcctggcgcaaaaggccatcgcctgcggggtcgacgtggcgcttgtcacgatgaaagccgagtctacaatcggcaaactggccaaaagtatccttgtgctgcctggtactgtgaaagaagataatgcgcgagaggcagaggctttttcccaacctatgggatcagcttttgaacagctgtgcctgattacttatgacgctatcgtgcttgaactgatggctcaactcagcgaaaccagcgacacaatgtttaagagacacgcgaacctcgagtaa

SEQ ID NO: 446770 - DNA, 753 bp, Serratia marcescens
atgagtaattttgaaggaaaggtcgcgttagtcacaggtggggctcacgggattggtaaaggcattgcaaaacaattcgctgagcgcggagcacacacggttatcgttgactataacgaagagaatggcaaaaaaacggcaaaggaactgacctttgatggagtgacgtctttatttgtcaagactgatgtatccgaccccaaggcgctggaaaacgttcgtgacaaagtatttgaggcctttggccgcatcgatattttggtcttaaatgccggtgtggcatttgctaataaagtcaacgacatcacttttgaagagtggaataaaaccattgccattaaccttaccggtttattcaacaccgttaaggcgttctatgccgatttcaccaagaaccatggttccatcgtgtatatctcttccggatctgccctttccggcacggggggcggtgtgagctatccggccagtaaagctggcggtgaaggcctgattcgcggcctggctaaagaactgggtccaaaaggcgtcaacgttaatgctattgctccgcgcctgattgataccggagaaatgatgcgtgtcaattaccccacacaggcggatcttgatgccgttctggagaagattccagtgcgtcgcctcggtacgatcgacgacgtggcaaacctggccatctttttggctgacaaggagaactcctacattcagggacaaaccattctgatggatggcgggcgtactatcgcttaa

SEQ ID NO: 446771 - DNA, 645 bp, Serratia marcescens
atggcaacgattctaccttctatttttggcgcagacatactccgcttgcaggaggagattaaattcctggaagcagagaacacggcaattttgcatgtggatttgatggatggtacctatgtcagtaatattgcattcgggcccaaccaaatcgcagcaatgaaaaaagccagttcaatgatctttgatgtccatatgatgctggcaaatccggaaagacatattgatgaggtaatcaaaactggcgcagaaatgatttcggttcattatgaatcaacgcctcatgtgcactatattattcaaaaaataaaacaggctggacgcaaggccggtgtggtactcaacccggggacaccggaagtcatgattgaatatctgctggatgacattgattatattttaatcatgactattaatcccggccaaccaggccagaagtttattgaaaagagcctggagaaaataaaaaacactaaaaaaatgattgcaggccgtgccattcaaattgaagtcgatggcggcgttaatgctgaagttgccagaaaggtaaaggaagttggtgctgatttaattgttgtcggtggcgctctgtttaatggttccccgcaagaaaattatcaggcactaagaatggcgatccagtaa

SEQ ID NO: 446772 - DNA, 855 bp, Serratia marcescens
atgttaaaaaatctgccgattacaaaatttgataatggtttgaatactattgcatatcatcatttaattccatttgatgagtcgcatggggacgggggatatgccatccgtactattgaaatataccggttgcataaaatggagccgcttttaaagaaatttgaacaattgaccgggtatgcgccaccccgtgcaaattgtacggcgcaagagattcattccctgatagagcaaggtgaaaaggtttgttttgatgccgaatcaaaagtatccgggggggagcatgaaattacgctctgtgagcgagaacttggtaatgccaagcgtggtgtcagtgacatctctcgttggaatggcaacatgaaagaagccattgtccaggcgaacgccaatctcgaaagggcaaatgcgaaattggttgaagctaaggccgctgtcgccgctcgtcgtgggctactggggttgctgcgcgagcctgtagagcagatgttaatgtgcggggaaaaggggtttaagggaaaagtgttaacgcatatcccgttggagcctcttcctgcttacacctaccgtaaaggggcgtatagcgagggactacgttctcatatctatgcctggggattaatggatgccctagaaaaagcattacgtgaaatagtccaaagatgcacaccaccaatagataaatacgcgcttaatcatggcgggttagaacgtgctgctttggctgtagagtattacaacgtgtctggtgagaaatggcgggatttaatgacggtagatgaatataccgctcttaggatggatggcaaactatccctaaagtctaaacaacaagaaatgtgctcacccctttaa

SEQ ID NO: 446773 - DNA, 990 bp, Serratia marcescens
atgaagagaaagtttgtaactgaatatagtattggttatctaaatagttatacagcgatgctaacagctaatcaattgttaagcgatgacaagatgaccccagcgcaaattaaggcaatctcagagtgccatatatatactattgccgcgaggccggctccgtactttaaaaatggttcgattaagcatgaagggaataaattatctggttgtctctgctataaaatagatggagtggaaaggagtgttgagtttagtgatttcccatgggagttagacgaagatgtaatttctatttcttgtgactatccatttaagaagataattagttatgactctaaaggacatgagtgtacttacatacctgcagattatcttgcaaatatgtatataacacacggagttggggaggttactgaactcaataactatgaagttttatatgttggccaagctcttgggaatcaaggggatagaaatgcgatggatagattaagaagccattcaacgttacagaagattcttgcaagaactgcttatgactacccagataaagaaataatgatcttcatgcatgagtttaagcatgaaaatttattttcgtctattgatggacgagccgttggcgcagatcgctctgacaaaaacgaaaaaagacttttaaatgcaattagaaatccaccaaataaaaaacaaaaaataggattgatagaggctggtttaataaggtatttccaaccttgctataatgaaatatataaaataaaattcccatcaacaaaacataaggttttgcagtcttgttatgatctggatatatctgggtttgtagttgagttaaattcagataatttaaactactttctttattcaaagttaattccatcaagcaatcatcatatagctaggattgacttgttcactgcaatcgataggtcttctttcttttcacctactggatttaaagtaagtccaggagttattagttaa

SEQ ID NO: 446774 - DNA, 813 bp, Serratia marcescens
atgaatgaactcagtattgttagtggtaaattgcaactgttgtcgatcatcggtgacccgatcgctcaggtcagcgctccactcatgataaatgccgccatccttgaaaaacaaatccccgacactttgatggtccctctccatataagctctgtaggtctgcaagccgctgtaaatgctctgaaatgtattcagaattttcgtggtgccatcattacgatgcctcacaaacaacatgcgctttcattaattgattcagccagtgaatctgctatggcaatcgagggatgcaacgtcatcaggaggaatgctcaaggtcaactacatggggatatgcttgacggtgaaggtttcgtatcgagccttttgaaaagaggcatcgatgtgacagctaaaagagtttatctggctgggacaggcggtgctggctcagctattgcttatgcaatggccgccaaacaggttggagaattaattatttacaaccgtacacctgataagtccgctaacttgataagtaagcttttatatcgttaccctggtgtaaatatttattctggttccagcgagccagaacaggtggatatcgcgattaatgcgacatcagtgggtatgggggaaaacaaaaatattccattctctattgaaaaacttggcagtaaaacagtcgtttgcgatattgtcatcttcccggataaaacccctcttctttgcctggctgaacagcatggactccccatccatacggggagagctatgcttgctgctcagattgagctgatgcttgattttatgcttcatcaggtcgactaa

SEQ ID NO: 446775 - DNA, 813 bp, Serratia marcescens
atgatgcgtgctgttaaacggggtcttgcccggataaaaaaacctttatcggcacgtcatctctgcgtggatgaagtcggcttcaaaaaaggacaccagtacgtcaccgttatctctgacaggcaggggcgtgctttgcaactgacagatgatcgcggtgtagagagtcttgccagttatctgcgtagcctgacggatcatcagcttgatgagataaaaacgctgtcgatggacatgaacatggcctatatcagtgccgcccgaatccatctccccaacgctgtagataaaatcgccttcgatcacttccatgtggcaaaaatgctgtgcgccatcgttgataaaacccgccaggcagagatgaaacagatcccgtcatctgacaggaaagacgcccaccgttcacgctatctgtggttttacagcaaacaaaaccgcttcgggcgccgggcagagaggctagaagttgcccgtctggtgttaccccaaacgagccagtgttgggtgatgaaggagcttgcacgcgatctgtggcaccgccgctatgacgaccatagccgtaagctgtggcaggaatggatggtgatggccaaagacacttgcataccgctcatggttagcgttgcccgtatggtagcaaagcgtctttacggcatcctgaatgcaataaaaaaccgggtatcgaacggcaatgcggagtcgctgaacagtaaaataaggctgctgaggattaaatcacggggctttaggaataaagaacggttcaagctgggtgtgctgttccactacggaaagctaaatatggcgttctga

SEQ ID NO: 446776 - DNA, 360 bp, Serratia marcescens; identical to SEQ ID NO: 101522

SEQ ID NO: 446777 - DNA, 138 bp, Serratia marcescens
atgggatggggtcagccagcggcggggattctctggatttatcgccagcaaaagccaacacagcaaaacttggcgatccaatccgtgaagttcttggaagagatcgcgtttatcctgattatctggtgcagccggtaa

SEQ ID NO: 446778 - DNA, 351 bp, Serratia marcescens
atgaaattaactctggaatcgttgaaagaaaacggtgccttcactggccgcccggtagaaaaagaaattacctggaagcagggtgacaaagagctcactgccaccgtatatgtgcgaccacttggctatcatgcgactaaagctgacttgctcgctttcgatgggaaaattgataacgttgcaggccgaattgccgcatcaatttgcgacgaaaatggaaacccaattttcacccctcaagatatcaccggcgaggctgaccctgagcgaggctctctcgacggtgccctgaccattgcattgttgttggctattcaggacgtcaacagtctgggaaagaccaaagcctaa

SEQ ID NO: 446779 - DNA, 498 bp, Serratia marcescens
atgtctgtattaacacaaggcacgcagttgtatgtgctcgctaatggagtcgtaagcgagattgaatgtattaccaactttacggcgggcgggaacccggcggatcaaattgaaaacacttgtctttcggaacgcaaatctaagacatatgtaaaaggtctgcagacgccgggccagtcttctgtaactctgaacgcggatccgaaaaacgccagccacctgatgctgcataacttggctgagactgatgatgaaaccccactgacctgggcattgggttggtcagacggtgagtctgtaccaacagctgccgcgccaggcgcaccaaactctgttgatggcctgttattgccagaagatcgcacctggtatgttttccaggggtacgtgtccgatttcccgttcgacttccaacaaaataccgttgtcagcacggctgcaactatccagcgttccggccctgctgtttgggtgccaaaggttcaagctggcagctga

SEQ ID NO: 446780 - DNA, 477 bp, Serratia marcescens
  misc_feature (447)..(456): n is a, c, g, or t
atggctgatggcgttgaatacaccctcactggcgttgatgaactgatgggaaaattggagtccatcagtgatgacatgaagcgaaaaggagggcgtgcggcgttaagaaaagctgccaacgttatcgccaacagagcaaaggaaaatgcacagagacttgatgatccagaaaccggccgcagcattgccgacaatatagctgtgcgctggaatggtcgtgagtttaagcgcaacggaaacctggcatttaggatcggtgtgctgcatggcgctgtgctgaaaaatcatcctgataaagccaagaatgccccaacgccgcactggcgcctgctggaattcggcactgaaaaaatgcgggctcaacctatcatgcgcccggcggcagatagcggtgcgtatgaggcatccaatacgttcgttgtggaatatggaaaagctatcgacagnnnnnnnnnngccaagaaaggggccagatga

SEQ ID NO: 446781 - DNA, 645 bp, Serratia marcescens
atgttctatagcgtcgaagggcaaaaaggcagtgcggtcaataccaacatggatgaagtcgatgccatcgaacagttgctcgataaactggaagacgccggctatgacctgacacaagatatcggtatcgttaccccgtactccaatcagaaaatgatgttaatacatagaattgggaaaagactggatcactatacctccccccgaatcggcaccgtgcatcaatttcagggggtaggttttgaagtaatcatttatagtccggtaatttatcacgcccgcgatggtgaaattttccagaataaagcgccaaatatgttgaacgtagcggtctcacgtgcaaaacaacaattcattatcgttggcaattatcagcgattggtcagagccgggggctatttaaaaacactggccaatgcggcagcggaagatttcttactggaattcggctcacagcacccgcagttcgataccttgcaaaatagtccgcatcgcttagcctattatcacgattgcgagcacatagcggcctttaccgcccaagctgccatgtgcgaaaaagagttaatcgtgatttcaccgtggattcgctatggggaaaaaggcggatttggccaaccaccgcagctaaaactattggcatag

SEQ ID NO: 446782 - DNA, 516 bp, Serratia marcescens
  misc_feature (353)..(362): n is a, c, g, or t
atgaaaaacagaaaagattttgtaaatgacttaattatctggataagcaaaaatatagagatgccactaaaaattgatgatgtggctatcaggtccggatattcaaaatggcatttgcagagactgtttttttctgaaacagggcagagcctgggaggttttatcagagagaaaaaattatgtcttattttagaggctgttatcacaacaaatgaacctttgataaatatcgcgatgcgatttggctttgactctcagcaatcattaaccagggcatttcggaaaaggtataatgtcccaccgcaccggtatagaaaaaatgccgtaaatattaaaagcaagtcttctagggnnnnnnnnnnactatctggattacggacgggttcatctagtaatcatggtcttagtacctcagttatagatttgttgaacgaaatgaaatcactcatttatttcattgtaaatgaatctaagtctttctgtgcaatgtatgttttcgtgtttttacatgtgtaa

SEQ ID NO: 446783 - DNA, 630 bp, Serratia marcescens
gtgcctgttgttccattattcgatacaccactaaatgggataaataaagttttcaaaagagttgaagatattttattgtcaactttaatattgatattcatctctcccgtacttgctttgatcgctttcgccgtcaagttcacatctcatggaccgattatatttcgtcaaacacgttacggcatggacggaaaacctattatggtttggaagttcagatctatgactgtcatggaaaataatgatgtagttatccaggcaaaaaaaggagataccagagtgactaaggtaggtgcatttttgcgacgtacctctttggacgagttgccgcaatttttcaatgtgctgattggtgggatgtcgatcgttgggcctaggccgcatgccgtggcgcacaatgaacaatatagaaatcttattgaaggttatatgctcaggcacaaagtcaagccgggaatcaccggttgggcacaaattaatgggtggcggggtgaaacggacacgttggataagatgcaaaaacgtgttgaatatgacctcgagtatattcgtgactggagtatttggctcgacttaaaaataattttcctcactgtatttaaaggttttatacacaagtcggcttattag

SEQ ID NO: 446784 - DNA, 1425 bp, Serratia marcescens
atggggcctttcctttgctgtccagaaaatgaaacaacgactcaaatagagctaaatttcgtctatccacaggggttgtgcgatgtgggaagtaaagacggagccattcattggcatgacgtagcgatgaccgttcaatatcgtttgtcaggttctgatgactggatcagcgtacaaataaagcatggaaataacacggttaatgaggttggttacactgaagtacggattaagcgagatacgccagtatggggtggtactactcgagactccgtccagtggcaagcaatgcgcgctaaactttctgctcgcaagaccagttaccccaatgtgacgacgatcgcgctaaccattcgaactgggaaccgtttggccgctcagtctgaccgccgcgttaatcttatcgcaaccaggctctatgatgggcatgcgtcgagaagcatcagcggggcgttctaccacgtattgaaagaccttggctatgcagataaccagatagacttctccactatcaatgcacttgaggctaattactggacgccacgaggcgaaacctttgactggtcagcaggcagtgataacacttctggtttggaagtactgcaacggatcgccaatgcaggtatgggttactttttactgagtgatgggctggcgtctgccggcagagagggggtaaaaaactggtccggcgtaatcagcccgcaggaacaaaccgaggaactccagacagctttcaaggcgctgtcgcaagatgactatgatggtgtcgatgttacctacattaacgccactacatgggctgaggaaacggttcaatgccgtttcagcgacaatccaacacctcagaaggtagaggactacacccttgacggagtgaaggatcctgatagggcttaccgtataggcatgcgcaggctgatgaaatatcgatatcagcgtctaacgcatacaaccagcacagaaatggatgctctttgctataactacggcgatcgcatcgttcttaccgatgatattccgggaagcaaaactattagttgccttgtggtagatgaacagcatgatgctaacacggtgcgtattcacgttagtgaggctctcgactggtcatttgaaaacccgagatgcttaatccggtttcaagacggttcggcatcatccctgctagttccaactcgcattgatgattacaccctatcactgagcaacacggtagatgttcgtattgatgaatggataatgaatgactcatctgtagaaccaccaaggattgtattctgtacttcttctcgggtgggatacgattcaataatggattcaattgaacctggttctgatggtacgtgtaaaattaatgctatgcagtatagccctttgatttataaatacgacgacgccatttatctgggaaacgtccagtaa

SEQ ID NO: 446785 - DNA, 351 bp, Serratia marcescens
  misc_feature (320)..(329): n is a, c, g, or t
atgtacctggttgatgaaaggagaaaactgatactcgaagagattatttcggcaggtaccgtgtatgtcagtgaccttgcgaaaaagtatgaggtgacttatgagacgatacgaaaagatctgacttaccttgaacaaaaggggctgttggttaaaagtcatggcggcgcaaccctaaaacaaggcgccatcgaacatcccttccaggttagggaaaaagagaacagttccttcaagcaagccattgccagaaaagctctggaattcatcccaccaaacagttccatgataatcggtaccggcagttccaactttgaacnnnnnnnnnngtgttctcatcgaatcggataa

SEQ ID NO: 446786 - DNA, 300 bp, Serratia marcescens
atgaaaacccgcgcccgttacatcagcatcattaacagtcatctgaccgccagcgacgccggacgctggcattacgtgatatatgttatgccggatgataaaactaaggagtcgctggtcaggctgtttggcagcatcaggacggtgatgagaaagagcgttcctgttccatttgatgtgaagaaccgagaaatgtttatcttccgcgccctcgatgaactggaaaatagtgtcaaggataaacaagggcccccctccccatctgtcggtgatgatgaagggagggaacgccatgcatga

SEQ ID NO: 446787 - DNA, 921 bp, Serratia marcescens
atgattgctctcaacacagtcaagggaatcattgagatcagcagttggcatgatatcgttgagcgcccgcattttcgctcaaacatcaaccctacaaacgttgaccttaaagagatcatcggtagctaccaatttccagaagatgttccgtgtggactcacaacatgtcatcaaccacataaacgtggttatatcgtagtaacaaaggaaggttacgaaaccaacatcggaaaagattgtggcaaaaactacttttccgtagatttcatcgaaatgaagacgcggtttgatcgagatgttaaaacctcactacaacgcgacaatattcgcaaggcaaaagaaacagcaccactactccttgagcatgtcgagggattacggaaacaccctaaaggggctgattggatctactctcgtattgagaaactccgcaatcgaggtgtaattggtgaggctgcggctaacgaaattcgtaaaatgcttaaggagagacgtaaagagctactctcatctcgtcttgcaacgaaagaagaaagagagcgggatttttccatgaatccgtctttggaggataaataccgtggtcaaccttattacgttactatcgttacaggctcgattaaccacctcgaagcaatgtctaaagacaatgatctcaaagaactattgatccgtggcgttacacaaacactgaggcaattaatagattgtgatgtcgataatttgaagtctcgtgaacttgcacaactgtccaaagatgcaagcaacattcaagcaaaaattaacatggcccaagagatcataccgcttgcacaaaaattactaacagcttcaaatcttgaaccgcttgccttttgggtggaagagcatcatggagagcgagcagcggcaccctttaaacgctttattgaacaactctaa

SEQ ID NO: 446788 - DNA, 213 bp, Serratia marcescens
atgctcgttagccacagtagagagctgttgcaggcgttgctcgaaataggcccggaacgccgtcagatcgggaaacgagagcaaggcctgtttggcttgctcgacgctatcgtgatattgggtaaaacagtggaggatttccgcctgacctgttttcaacacgttggcatgggccgtttgcagttgttcttcatacacttcgctttgccatga

SEQ ID NO: 446789 - DNA, 216 bp, Serratia marcescens
atggatgagaaagcgacgtttcgccatgtgtggctggatagcgaagcaccgcaggttttcagcacctacctctggcacgacgagcaaaagaaaacgattcaagcatttggacaacaggctaaggccattaacagcatgaatatgctgataccactgcaatatttttgtgtttttaacgccaacaccggggaagtcatcgcggcttcatttgagtaa

SEQ ID NO: 446790 - DNA, 534 bp, Serratia marcescens
atgacgttgctattctgggcgatcaataacgctatctttgacaagaacacgccagagcggctcaagatcattacggatttggtcaaggcgggagcagacccattgcagccaaggccggaagggagaagtagcccggctgagtatgtcatgaaagcggataaaggcgtctggatacaggctatgcttgaaggcggactatcgcctaatgcaagggatgaaataaacaatcagccaataattttcaagagttttcaagcggttaatacagagacattgagtactctaatagcttacaaagctgatgttaatatcaaaggcgctatgaacagaacgccattaattaatgcgctgtataacagttgcccagaacacattgaggttcttttggctcatggcgctaacccattagccaaagatgattttaatgacagcttcctttctttgatttctgcggaaatagccaagggagacaaaagtaattcttatataaagaaattaattaaaattaaagagaaaataaacattatgaattag

SEQ ID NO: 446791 - DNA, 141 bp, Serratia marcescens
atgcgtttgcagtgcattggccttttgccgggcggtttcaagctgtatctggagatcgatgaccgcctgtacgtcttccctcaatgcatccagcgcagcgctgtgctgtgggtccgtagcaggttcttgcagagtatttaa

SEQ ID NO: 446792 - DNA, 981 bp, Serratia marcescens
atgttgggtgatattcttttcaagtttggggcgtttggagttgatttgtttttcgtcataagcgggtttgttatatgcttagcgacggagaaaaaagaaaacgcccgccccgcagcattcatactacatcgtttttttagaatataccccctgcttgttttttgcatggcttttttttattttttgtttaataaagggagcgaaatcacacctttcctaagaggcgtgatgccgttgaatgctaattatagtgctggagctcctttctttgggtggaatattttaattcctgcgtggacgcttacctatgagttagcattttatagtattttcttatttgccatgacaattagtcacaagaataggattttgatctctacattccttattctttttttcataatttcgtttcaatggttgttttcttcaagcgtaacgctatcagcttataacaataattcatttcttgaagatagctggcttcacgcaccggtaacatttctggcatcccctctttttattgattttatttatgggatggtgatatatttattgtttaaatatataaaagaaaatcacataacactccacgcttggttgtctgtttttcttgtttttgttttatgctcatcttttgtactcgcgatattatacataaatgcaggtcatggtcctttgcgttgggggatactaggtgcattgattgtaatttctctggtaatattggaaatccaaaggagaccgagtgatattaaacctcttgccttgcttggtgatatctcttactcgctgtatttatctcatgagatagtcattaaaataatcacgaagaatgttgttgaacatgggtatggtgaaaagctaacgggggttagttcttttgttatgatgatattgatttgtatcagtgtggctatttgcttaaacaaatttatagaaagaccttttataaggttgggtagaagaatcttgcttaaatag

SEQ ID NO: 446793 - DNA, 369 bp, Serratia marcescens
atgtcaaccgggaaagaggaattattgttcctgatcggtagccgtctgcgcgaagaaagggaaaaatcaggtaacagccaagagtccatcgcctccacatttggcatatctacccgcacctggggtaaatacgagagaggggaaaccatgcccgacgccgttactcttgcgctgcttaacagccattttgggatagacgttgcctatatattgaccggggttaaaacccccgaatcaaatatatcaacagaagaacaaaagctagttgataactatcgagcaatggatgactcggcacggttaaatatacaggcggttggcgattcgttcgcgcattcaaaaccaaataaaaaggtagagggacaatga

SEQ ID NO: 446794 - DNA, 363 bp, Serratia marcescens
atgaataagattatgaatttaattgcaaataaaatcatagacatattacgcggaaggcctgcattaaaggtgggtaacgtgtctgtatgggggagctttaccactgatgaaaaagaacgcctacgccagcttcttttagatagccaaatcgcaagagtggaagaccaaaaattagaggaacgcatcgcagaactggaaaagcggctggctacgccggtgcagttacaaaattgtgacttcgagtcagtagccatcatggcccattggtgcacagacgagcagctggaagcatgggtgaagggcgttgaacacgccaaaaagcaaatccgcgccgctgggttcaaggtcgagggggatgcatga

SEQ ID NO: 446795 - DNA, 435 bp, Serratia marcescens
atgacaccaaccaaatccgaaagaaaggtcaagttcaagccggggcaggtgttctatacctgctggccctacacgaacgaggcgggacgcgtggagatcaccatcgatgaatgggaggttagaaccattcgtcgcaagcgcaacagccaatcgcggttcggggttaagaaagcatacgcggacgatacacagtatgtgaacctcgtccagcgtggctcgttgacgcaggacaaaaaggggaactggctaaaaaacatcccggcgtgttgccgccaccagttcccggccagcgggacaccactgtccagtatgtttaccaccccgttgcaggcgctcaagtttgcactgacggtggcggaaggagacgcggagctgcgggcggtcaaatcgcgcatcaccaagctacgcaacgccaagaagaagggggatgcatga

SEQ ID NO: 446796 - DNA, 450 bp, Serratia marcescens
atgacactaacgactgagcagctgaagacgagaattgaggcgctgagaaactcagcaagcggcatcgcgtccacgttttctggggatgctgatgcactggaagagctgttgcgttaccgggaagcgcagccggtgtatcagtaccgcatgcgaaacccgtacaacagacaggtgacagattgggaaaccatcaagcctgaacaggtagatttcatcctgaaggaaaccattgcggccaacgttgagtttcgaatcattgccgccccgccagcgccagaagtgccggatgggttcaagcttgtgccgacagtaccaacgccagaaatgatcgccgctgctatgaactgcgacgacgtgaccttcatcaacctcgaagacttctgcgttaacttcggcaacatctacgccgccatgctggcagcagcacctgagggccgctcaaatgattaa

SEQ ID NO: 446797 - DNA, 1191 bp, Serratia marcescens
atgctatcacgagaaatcaatgatgaacaattagctgaaattaataaaaattatctaaaaaaatacccacatatatttagccctttatcagaaggtgattttgttccgaattatcatcttgatttgagagaagtgaatcctgcctctagtaattttaactaccttgattacgataatgttgggctcttaattttatcgctatcgattcttccgacagagacagtatttcaactgttggatgaaataacatataaacatcctgtcaaagccgtacttcattacgactttcgttccggtatcatagaagatgatgccattcgtgatgtgaaaatgttgatccgtatagcaggctccgatcaagtaaggccaacaggaggccgaacgacagataaccagtatgagctttatgagttagaatatctgtctggagaaatcactctcgaattaagtgatgagactgttttaaacagacttcgtgaagataactactatgattctttcgcattatttaaaagacttaacaatattcaacagcttggcataaagaactgggatcgtacatctcgtttgaaattgatgaaagatgattttataggtacgttaaaaaaaccactccagtcaagattacctttatctgttgttgaattattaatggctaatgaacagggggatgtcgtgaggtttgatgatttatctgacggtgaagctcaattgattcaggttatcgcggccacaaggatatttagtcaggctcaaacactatttctctttgatgagccagaaacacaccttaatccatcttggcgtacttattttcaccagcgtttagccgaagcatttacgcctgaaaatgagaggaaaggtcaatcgcattttattttatctactcactcaccattcatgatttcctcgctcaaacgcgagaatgtatttttctttgagcgcaatgatacaggttgtatcagtatggaaccagtatccagccagacttatggcacctcatttgatattttagttaagaatcactatggtttacgttcccttatttcacagacagtggtagaggatgttaaaaatagattgccagaagataatgatcctgaagcagttatagctgcgcgacgctggattgaggaaaatcttggggagtcaatggaaaaggcttatcttctaaggaaattagagaactaa

SEQ ID NO: 446798 - DNA, 585 bp, Serratia marcescens
  misc_feature (504)..(513): n is a, c, g, or t
atgcaactgatttctttagacttgagtggtagctacaaaggcttgaaagatcaattctttgattttagttatgcccaagataatatatttgcattgattggccttaatggttctggtaaatcgcaattgcttgaattaataggggagactttttcttatcttgagcgatggcaacgtgcagagttcaaaaataaaacatcgctgggttttagcgtggcggtacactatcaatgggatcttagaaatgatagcgatgttctgtcttacccagacgaactcattaatcatggtgagagtattgagttaaaggtaaccattgagcttaacggtgatgtggttttaaatgttcgtggtactgatgtgtggcatgtaatacagcttggtgagcgccagtttcccatccctctcgtggttggttatgcttcggggctaaacgaaaatttacagcgaagttttatgaaaaatgctgtgcaatattttgaagtccgtcgaattagtagccannnnnnnnnnattttgaagtccgtcgagttagtagccagcgtcacaaaatgctatcacgagaaatcaatgatgaacaattag

SEQ ID NO: 446799 - DNA, 1383 bp, Serratia marcescens
atgggtgagattattctacctgaagggtggtccaattgtactcttgcagatattgctgaagttaaccctaaaaaaatagaggctgaaaaagacataaatgcaggctttgttcctatgtctcatgccccaacaaactataatgggaaattaaagtttgaagagaagacgtggggtgagattggtaagtcttacactaactttaaaaatgatgatgtgatttttgcaaaagtaacgccctgttttgaaaatggtaaagcagcaattgtaaaagatatgccaaatgatatcggtgcaggtagttctgaattttatgttctacgcgctcgtaatcaagaaataccagccagttatttacttgggattattaagaccagaaaatttatgcaggaaggtgcaggaaatatgacaggtgctgttggtctacgccgtgttccaagggctttcgttgaaagttttcctttgatacttccccctcttgcagaacaaaaaatcatcgccgataaactcgatactctgttagcacaggtcgatagcgccaaagcacgtcttgagcaaataccacaaatcctaaagcgttttcgtcagactgtgttggcggctgcggtgagtgggaaattgacggaggaatggcgtgaacagaataagatatcctcagactggaaaagtgtacagtttctcgagctaataacgaaacttagaagtggttcgggagatacgccaagtgataatgtttgtgggatcccaattcttcgctctagtgcaatacgaccgcaaataatcaattatgaggatgtaaggtatttgagtagtgaagaaacactgaatgaagataattatctgaaaaatggcgatctattatttacgagactcagtggctcagcagactatgtgggcaattgcgcattagttaaaggtcttactaagaaataccaatatccggatcgcttattttgcgcacgattaaaagatcaacgaaatgctaattatctagagtatttctgcagctctaatatttttcgagagcatattataaaatcaattaaatcctcagcgggtcatcaaagaatcactcttaatgcaattagaactgcacaaatttttatccctgattacttagaacaaaccgaaatcgtccgccgtgtagaacaactcttcgcttatgctgacggtatcgaaaagcaggtacaaaacgcccttgagcgcgttaacaacctcacacaatcgattctggctaaagcatttcgcggggaactcacagcgcagtggcgggcagaaaatcccgatttaaccagcggcgaaaatagcgcacaagcattgctggcaaaaattcaacagcaacgctcaaacactaaaaccatcaaacgcagcaaaggtaatagttga

SEQ ID NO: 446800 - DNA, 3525 bp, Serratia marcescens
atggatgctttaagggctacaacatcgacaaatttcagttttctcgctgaacatgacccgctgtttctacaaatcgccactgctgcagaaaacgccttctcaggcgatcccaacaccaccttgattaagttgcgccaactaggtgaagccttagcacaacatattgctgcgctggtcgggctcacgtttgatgaaccgcccattcaggctgatttactctaccgcctcaatcgcgagctaaaatttgaacccacggtacgcgagctatttcatctattgcggatagagggcaacaaggccactcaccagttcaaaaccaagcacaaagaggcgctagatggcttaaaagtggcgcgagcgctagctatctggttccaccaatctttcggcaagcagggcgcggcctttaaacccggcgcttttattgctcctccagacccgagcaatcagcttaggcaactccaaacggaaatcgatcgccttaaaagtgagctcaccaccgccaacatacagctagattccagccaacagctgcaaaggttactggtgcaggaaaagagtgaatatgaaacgctggcgctagccatggatgatgaaaccaaggtgttagcatcgcaggcgaaagaacaggaaattgcactcgaaaagcttcgacaacaatacgatgaaaaactgaaaaacctacaagcacagctgacagaaaaagatgaaaagcaggcccgaacacaacggcaagagtttgtccagaagagccgtcgtgccagtcaacatatcgcgttaaatgaagaactcacccgtatactgattgaccaaaacttaaatgatgcgggctggcttgctgacagtcaggaactgacttgggctaacggaactcgccctgaaaaggggatcaacaaagccattgccgaatggcctacggagcatcagggtaaaaaaggccgcgctgattacgttcttttttgcggcttaactccgctggccacggtcgaagccaaaaaagaaaacaccgatgttgcgggaaaaattccgcaggcagaacgctacagtaaaggcttcaaaatcactttccccatgatcggtgcatgggagcgggaaggcagaagcattgcatgggcggatgaaactgacgggcattacattatcccgtttgtatactcctgcaacggtcgcccctacgtgccacagttggccgagtcatcaggaacttggttcagagacgtgcgcgaaccgtccaacatccgccgtgcgctgcaaaagtttcataccccgcaaggcttgctggataagctcgatcgcagcaaagacagcgccgaacagaagctaaagcaagaaggcttcgcttacctccggttacgcgattatcagcaaaaggccattctcgccgttgaaagcacattggcgcaaaacatccgaaatgcccttctggcgatggcgaccggcaccgggaaaacacgcaccattgttggcctgatgtaccgttttctgaaaacggaacgcttcaagcgtatcctctttctggttgaccgcacggctttgggagaccaagccatggacaccttcaaagaagctccgctggagcaaaaccagacgctgtctcagatttacaatatcgctgagctcggcgatatggcaacacaagcagaaacccgagtacaggtcgcgacggtacaggccttggttagtcgcatttttgcctcggacacccccccgccggtggataaattcgactgcatcatcgttgatgaagcccaccgaggttacaccttagatcaggaaatgacggaaggggagctctcgacccgtgacgccagccaatacctctctagttaccgtcgggtgctcgattatttcgacgcggtaaaaatcggccttaccgccaccccggcgaaacacaccagcgatatcttcggcaaaccgatttacatctactcctaccgagaagccgtggcggatgattggcttatcgatcatgaacctccaatccgttatgaaacgctgctgacgcaaaatggcatccactttgacaaagggagtcaggtacatgctattaatatccacaccggagaggttgagattgaccagctagaagacgagctggatttcaacgtcgatgcatttaaccgtggcgtcatcagtgaaaactttaatcgggttatttgccaacaactcgtgaaagagctcgacccctttggcgaagagaaaacgttggttttctgcgttacagacaaacatgccgacatggtcaaacgcctgctggatgaagcgttttctgtcgaatatgaaaactataatcaagcggccgtagaaaaaatcaccggtgaaagtgacaaagtcaaacagctgatcaaacgttataaaaatgagcgctatccgaatattgcagtcaccgttgatttgcttagcaccggcattgacgtgccgaagatttgtaatctggttttcttgcgtcgggtgaagtcacgtattttatttgaacagatgatcggccgtgcaacgcgccgctgtgatgacattggcaaaacggtcttccgtatttacgatccagtggatatttatgaggccctcagcgacgtcaacactatgaaaccgttggtcaaagaccccaatatcacgcttgaacaattggtcggcgagctaaccgatactgaacagctcgaaaaagcgctcaacagccccggcgaacagacaggtgaaactcaggctgatgtggtgctcagtcagttaagccaaaaggtgatgcgcatcctgcgtaaagcggaaaaacgggcagaaaatcgcccagcggtgaaacaaaaattggctgatctccatcaactgtggggcgttgagccaaaacagctgcatcaacatctgcatcacttagggccgcgtcaggcggcagccttcatccaacaacagcaagggctaattagccagctcaacgagatcgctacattactcggcagtgaataccggccgattatttctgagcatcatgaccaactacaggaacgtaatcagagctacggtagccatcaacggccagaagattacctggaaagctttgcggattttattcagcagcagcttaaccaatccactgcgctggccgtggtggtcaacaaaccccgcgacctcactcgtgaacagcttaaagagatccgcttattattagacggtgcgggctattccgaagctaaattgcaaaccgccgtgcgtaatcaaaccaatcaggatatcgccgcaagcattgtcggccatattcgccgtgctgcactaggggaaccgcttgtgccttttgcacagcgcgtatcacaggcaatgatcagcatttataacagccacgcatggacaacccagcaacgaaaatggctggatcgtttggcaaaacagctggttcatgaagtgatcattgaccaccaatttattaacagtagctttgctgatgacggcggcgtaaaacagcttaataagatattggtagaccaactggacagcgtgctggatgaacttaacggtgcgatctggccacaacaaagcgcctga

SEQ ID NO: 446801 - DNA, 609 bp, Serratia marcescens
atgaatagcctgttgccacctggttcatcgccgcttgagcggcgcgcggcggaggcttgcgccggtatcagcgatctgaacgtcccgctgcgtgacctgtggaacccagcgcgctgcccggtaaagtttttgccctatctggcctgggcgttttcggtagaccggtgggacgaaaaatggacggcggcagagaagcgcaaggccgtgatggatgccttttacattcatcgccgcaagggaacggttgccgccatccggcgtgtcattgaggcaatgggctattcaatgacgatcgccgagtggtgggaggtcgccgacccgcgcggcacgttccgcctaacaatcgacgtgaacgacgtcgggatcactgacgaaatcgtccaagagctggagcgcctgattggcgatgccaggcctgtcagtcgacatatggcaggcatcaacattattgttaatgcgaccgggatgttgaatgtgggtgttgccagctatgagggggatattgtcgatatatacccggccggatttataccagaaagagcaatttattacgatgcatccattcattatgacggcaattatcattataccggggtagcaaatgagtaa

SEQ ID NO: 446802 - DNA, 579 bp, Serratia marcescens
atgatacaattgagagtgtttttaaaaaccttacttttaatttttttactctgtgccggagcatattcaacattttcctccattgcgctcttcatcgtctctgactctcgaaccaatgctctctggccctatgttttcttggctcaagggcttggttttatttatttattttatcgtattaataaaaagttagatgctaaaacagacaagactataaacggttacttttgcaaaaacttcactccaacagatggatatgaagttaaatctctttatgatggtaattattttggtgtggatacaaaaaatggaaccatgctcttggtttcaaccgccaagtccatttataaaggcatgagtattgctgacctggttggatacgagtgcagagggaatatgctcacattgaaattcaatgatgttcttttctcaaatttcaccgtcggcgtcgataatgaaaggaagtgtatggagttaggccataatcttgatgtattactttcatctacttatcggccagagcgagatgctggaaatgattttagcgaatttgtacaaaaaaaatcactagcactttaa

SEQ ID NO: 446803 - DNA, 492 bp, Serratia marcescens
atgcaattacgctcaattttactggccgcgttgctggccagtacgtttacgttgccgacgcatgccgcaacgtgtcgggcagcctcagcggctcaaatcggtgctcaaaacggctatgaacgggatcgtaaggcagcagaagcctggtctcagcgcgaaaatcaggtgtccagtggattgcagcagtgtttaggcgatatcagcacagcgatcaccgtgccaacctttcccgatctgagcggtattctcaacggaataaaagacaagatttgccgcgccgcacacgacaagatccaagagtatattccgagtcaaattgacccctggggggatttatcctctcgcagcggtggcctggtcggcacatcttcccgttcggccaatgtgccaaagaattacgctccaacctcttaccaacaggcccctgttgcttcctcaccgccatcgcaaccctctaacgcgaccggcggggattacctctttagccgttaa

SEQ ID NO: 446804 - DNA, 390 bp, Serratia marcescens; identical to SEQ ID NO: 106559

SEQ ID NO: 446805 - DNA, 345 bp, Serratia marcescens; identical to SEQ ID NO: 118661

SEQ ID NO: 446806 - DNA, 1983 bp, Serratia marcescens
atgaaaaaaaccctacagggcacggttaaccgttatcgcaaggacattgacggcttgcgcgccatcgccatccttctggttgttctttaccatgctggcataaaacaaataagcggcggattcatcggcgttgatatattttttgtcatctctggattcctcatcggtggaattcttcatcgcgaacattcgcaaggacagttttcttacctgaacttctacagcagacgaataaagcggatagcgccggcgttgctcttcatgttaaccgttatctccgtgatagcagcattttatctctccccgctggaaatgaaagacttctcattattttctggcgcaacaatcttatcagtgccgaatattattctttggcacaaaaccaactatttttcacccaatgctgaactaaacccgctattgatgacgtggtcattaggcgtcgaagagcaattttatatttttctacccttgcttttgagtttcctgtttagaaaaaaactcaacacgctgttctggatcgccgctatcaccctgttgtcctttatcacctgtctttttgtcactcaggccaatccactttttgcattcttcatgttgccaacgcgtgcctgggaattgggtatgggggtagggttagcgatagcccaacaacagaatcgtctttccgcccaacctgcctggctaaaagaattgcaatttatcctcgggtcgattttgattatcatttcggcatcatacttcaacagcgaaaccccttttccgggcgcggcggcgctcgtgcccacactgggcgctttgcttcttattttaggcaacggccgcctgagcggctggctgctgggcaatcccgtgatggtatttgtcggtctggtgtcttactcgtggtatctatggcactggcctctgctctcttttgccaggctatctgcaagtcagcccctgccactcagcgcgacgttaacaatcgtcagcctcgcgctggtcattgcctatctgtcataccgctatatcgaaaccccttttcgccagggttggcggttgcaggagagcagcattattcgcggttacttatccttgattgccattctcatgctgcctacttctgttttttatttaactaaaggcgccacacaacctgtctcacaagccgtcgttcaagcggaagccgacaaacttgaacgggttgccgacaagtgcctgatcggtcaaggccacacgtcatattcaaccgagagcgtttgtctggatagcagcaaaaatgccggtatcgccctattgggagacagccacgctgcttcactccgcggtggcgtcgaccattatgcaaagcggcaccaaatgtctgtttatcagttgacaaaagcgacctgcccgatgcttattggggtgttcagaaccatgaacgcatatccttcgcatgcaacagaatgcgcagaatacaacgctaaagcgcttgacttcgtaatcaacaaccccaagataaaaagtgtcattattgccgcctcgtgggattccggaataattaacgacaacgaaggttactctgcaccaggaaagcaactcccaaaaatagaggcgctaactctcggaattaaaaatgttgtggagaaattgaatagtgctgggaaaagcgtcgtattaattgaagatgtcccttatattaagttcaacaccgttaaagcgctcgatagtgaagagatcccgcttagaaagctagtggcaaaaatcctcacccccactaccaccgtcatgtaccatactggcaattacactgcaaaatactcaatgccgcgaataaacctagaacatttaatgatacctttcagagataggttattatttaagatcgtcctccccgcaaaaaatttatgtaatatacatggatgtcaattcaaagaaaaagagagattattatattacgacaaccagcatatgacttatcttggcggcatgattgccttacgggatttaacaatataa

SEQ ID NO: 446807 - DNA, 1086 bp, Serratia marcescens
atgaaagcaattaccattgatcagtttataaaaagagaaaacaacaaccttgatttaattaggattctatgcgcttattttgttatttatgcccatgccttcgtcctatctccatcagagggcagtaatgacatcttatacaaaataaccttgctgggacatgtttcattcggtgggttggccgtaaaaacctttttcctaatcagcggcctactcgttaccaatagtctccttgtcaatggcaaaataataaattatgttagctcacgctttctcagggtttttccagcttatgcgctaacggtcatcgtatcagcactcatcattagcccttggttaagcacactaagtctttccgattatttcacatcaagtgacgtttggtcttatgtcattaaaacattaaaacttgatgttcagtaccatctccccggcgtctttagcaacaatgccaccaacgccataaacggttctctttggactattcctatggaagcgaaggcatattcttatttgctcttaatatacctgaccagccttatttttggcccctacaagaagctatttatcgcattcatatcaatcgtcatactcgttgagccctttacgccgttaaaaggtcatctgattgcgaaatcagacagcccaagcatctatttactttatcctttttttgcaataggttgccttctggcaatactgaaagatcgggtaaccacccgcgacctgttggcaatagccattatcgcactcatcgttttctttatcgtcaacgatgaggtcggcaagaccgcgttattttacgttttcgccactatgcttctattatactgcgcatcgacgtcctatctgaaaaagtttaagataaaaaatgacatctcctacggcatttatctttgggcatttccaacacagcaagtcatcgcatccgtatttgtggcatcgccctacatcaatattgtactgtcgatgatcatttcaagtgcttttgcctatttaagcttcaaatgggtagaaagcccggccatgacaatcaacaaaaggctgcaaaaaaatcacgcatcactgcaaagcgatcgtatttaa

SEQ ID NO: 446808 - DNA, 249 bp, Serratia marcescens
atgaacgaagaatcgaaattatcggaacttcttgagcatatgatattgaacctgcgcatgatctatgcgcgttccaccatggtagaaaaggcgctggcacacatcctcgccggcgacgcaggcctgaagaacgacataatcaaacagctgcaggtcgtctccgccaccaccgagcgtgataagatagatctggaagccgcccgcatccatctgatcgatgtcatcaattcggtaccggccaagaaataa

SEQ ID NO: 446809 - DNA, 870 bp, Serratia marcescens
atggctgattttgtaagggaaacggtttccaaaaatcatttcaaattattacaggatctttatggcagagatctgggcggggaacgtttcctgcactggaagcatctgctcgatccgcattgtggcgcgccaagggagaagacgggcatattttacaaggatcgggaacgttatctcgggatgttcgtttccagcttttatccctttaagatcaacggggttaatgtcaatgtcaatatgcttggcgatcttggcatccatcgtcaggtaaagtccgccaccgtactgaaagattttttcctgcaggccagacggtcggacgtggcggcggatatctgcttttccgatgacaggaagatccgggtttacgaaaaaatatttagaaagtatttaacaaccaatacccaaatctatccttatgtcgaattaaccttaaagcctgacaagtttatggcatttcgttttgctgaaagtgggctcgcacagcaggcaagcttcatcaataatttagggcgggaaaaagatcgccgcgcctttgagtatattgaaaaacaccccctgtaccataaaattcattatatcaacaaaggcagccactacgccgtgattggctgttctcatgaatgtgccgaactcttggatatttccaacccttccagggagtgtttttcctgggccatcggtgtgtgtcggcatctgcatagccgttgcaaagtaatgatccccctcgctttttataagtcggtttgcgctcaggcggcggaggtcatttcagaaaaacgcatcaacatgcttatcggctattactcacaaaagataagcgatctgatgccgaaagaggtttgggtatgccgcatggatcgccgttaa

SEQ ID NO: 446810 - DNA, 576 bp, Serratia marcescens
atggagcgcgtcaatattgctatcgtcgatcaaaatcaatttttcaagcttgggttggggctcgccttgcaagagggttttctccagaatggtgtcaaggccaagatcacgggagaggaacgggccaacattatattccgggcgccggataagcgggtgtccatcaatttttgccatacccagcttttgcagggcaacttttcttctattccgctctatttttcaatactggagcataaaacgatttttccaaaaatccattgcaatctagaggccggaagcattacgcgcaaagacggtgtggcggcgatcgtggataaggtcatgttttgctatcgcaagaaaaacagtttggtttcaagctattgcccgcgttgccgcacccagttgacctttagcgaagggaaggtgtgccgtctgattcatctgggatactcgcaaaatcaaactgcgatgttgctcggcatcagcccgaaaacggtcagcattcataaacgctctgcgatgagaaaactgaatatcgataacaatattgaattcttgcgctggttaaaaatgcacagcgactcttgttaa

SEQ ID NO: 446811 - DNA, 678 bp, Serratia marcescens
atgatgccaaaccgcctcgagccggaactcgacatttaccaatacccggagcacctgcgcgcctgcctggcgccgttgcccaaagggccgggcgtttatgtgtttcacggcgaaagcgaaagcctgccgctttacatcggtaaaagcgtcaacgtacgcagccgcgtaatggcgcatttccgggcgcaggacgaggccaagatgctgcggcaaacccggcgcatcagctttatcgagaccgccggcgagttgggggcactgctgctggaggcgcagttgatcaagcaacagcagccgctgttcaacaaacgcctgcggcgctcgaaacagctgtgcgcgctgcgtctgcaggcggacacggtgacgattgcccacgccaaagagatcgatttcgccgtcacgccccacctttatgggctgtttgccaatcgccatgccgcgctggaacagctacgcatcacctgttggccgttcgccgggcgcgtggcgttggaagagcagggcgagacgctgcggcaataccatgtgattcacaattggttttatctgggctcggtcagcagcctggcgcaggcgcagcggctgcagagcgcggccagccactttgacagcgatggctacaagattttgtgcaagccgctcatcgccggcgattaccggattattgagctgccgtaa

SEQ ID NO: 446812 - DNA, 2652 bp, Serratia marcescens
atgacccaggccatctattatgtgatcggcggcgcagcggcccaaagcggcattaactattggggagaaaaactggctaatggcgccaacgtggccaatgtggcgcaagttttcgtcaatgatcgcgcctatttgacctcactgaacaataccgacttcgtcacacgcctgtacgaaaacaccttccatcgcgcacccacggccattgagtcctggttctttgtcgctcagttagaaggtggcactccccggggttccattgtcgttgatatgatcaacctgattagaggccaggtatcggacatagatacagtggcgcaacagaacttcactcaagcaaccgaattatacagcccggggcaattgcctgctctaagttaccaagaacaagtggcatcaatttacctggctgtgccagggcgtgatattgatgcctcggcattggatacctggagcaaagagctttcctcaggcaagagcttctccaaattgctctcttctttgatgagcaccaaagagtttcaggccaaaggcggcgccctgagcggtgaggcattcgttaccaaggtctttacggacgtttggggcatcccacccacgatgacgcaattggagaactacgccactaaaggcgataatacagctattgctcaggcaatcatcaatgacctgcgctcatcctcagcaacggacaatgcgacggtcagcgcgcaacacgcctttgatgccgacatcggcaacagcctgctgtataaaacgtcggctactctgagcagtgccgccaatgacggcaacgcaaccggtacggtaaacaccggcagcagccatgtgttgagcaatgcagaaactgccgtgttgaagaacgtcgtcctaaacgccaacaccgcgaccgtcaccgacttgaaattcgccgaccagttggccaatctgaccgttaacggcaacgccgccgcgacggtcaagctgtccgataacggcgtcaacaccggggtcaatgtcaccgtcaacaatgccaacgtcattctgaacgccagttctggtgccgatgatgtcaccgtgacgtctgccgcggccgtcaacactggcaccgggcaattcaatctgggcgacggcaatgacactctgaaatgggcaggcaacgcagcggcgggcagcgccaacagcgtcagcaaaacattcaaggctgacggcggcgcaggcaacaacgtgttgtccgccaactttatcaccaaggatgtcaatatcagcggcagcggtaggctactcgatcaatataaagcgacaatttccactaacgcctcacagtttacgaacttcgaaaaaatcgatttggggggttacattggcaaggcgaccgtcagctccggttcaatcgccaccgctaatacgttcgactttggtgtgttgaccggtgatgcatccactgaatccagcaatgacgtacgcagcataactcagcctgatgccaccattgatgatcgccagggcttcctatctggcctgattgataaggtgttcggagactggtcccaagagaactatgctcctaccggctctcagggcttcgtattatccggtctggccgaaggggtaaaagtgatcaatgccgccggcggcagtaccgcgaaactggaagtgaccggcgatgccaccgcggccagcagcctggacttcaccttccagcaaaacgccaccgacaagtttgatattgtgttcaacgcgaacagcgatgcggacgtcaacgccggttcaattagcctgcacagcagcaacagcttattgttcgatacgaaattgaacaccgtcaatgtgacctccggtggcaatggcaattttggcaatatcttgtcgctggatggtggcgataccgacgtcaccaagattaacatcgcgggcgatcatcaccttgcactgaccgtcggcaacaactacagcaatatcgacatcgacgccagcggcaacacaggcggtgtagatctcgatgtgcaagcgaccgtcagcggaaatagtgcattttacaatttaatcaataacttgccaattgctgctatcgctacaaatgcgcttgaggtattaggcctggagccagtgaataccatttcaataaccggtacccaggcggacgatatcttttgggtgaaagacaacaccgtcatcaacggtggcaacggcaacgacgtctttaacatagtttccagcaagcgtgaaagtgcggtcgtcatcaacgacttcagctatgccgaagatacgctggtcgatcaacagtctggcttggtgttctcaaatacagaaagcggtaccaaagtggctaacttcggttcatatggaggcgaaggatttatcgataaaatagtacagcgcgtggctgattcccttgccggcgctactctttccaatgccgcgggagagatcatcaactcactattcggcctgaatgatggaatactgaccgccaaagtcgggatttccagcgtcggcgatgatcacttcctgattatcgatcaaaacgacgaccgcgtgctggacagcaacgacaccgtagtcgtgttgcatggcggcagccatgcggatctgacgaataacttgtactactcaccggtggaattgaacggcatcaacctcgcacagttccaacacgaacaggttgcctga

SEQ ID NO: 446813 - DNA, 1746 bp, Serratia marcescens
atgaagtttagcgcattttttccccccaatgagataatcaacgctatccgccaacaccgacgcgccttctggagcctcggctgttttaccgcagccatcaacctcctgatgttagtaccgtcgctgtatatgctgcaggtctacgaccgcgcactgccttcgggcaacggtatgacgctgctgatgctcaccctgatcgtgctgtttcttttcgttatgatgggcgtgttcgaatacgtgcgtagcatgatggtcatccgcatcggcaaacaactcgacgccacgctcaacgaccggatttacaccgccgctttcgaagccaatctcaggaactacggcaccgatgccggccaagtgctcggcgatctgaccacggtgcggcagtttttgaccggaagcgcaattttcgccttcttcgacgccccctggttcccaatctatctgctggtgatcaccctattcaacggctggctggggctgttcgcgctagcgtcggtgctattgctgatcgcgctggcgatgctcaaccagatcaaaaccgatgagcctctcaccatggccagtcgtttctctatcgaatccggcattgccgcaagcaccgggctgcgtaatgcggaagtgattgaagcgatgggcatgttgccagcagtgaggcaacgctggaaatttctacataacaagtttctcgatactcaacgcgccgccagcgaacaagctgccaatatcggcgccatcactaaagtggtgcgcattgccttgcaatctttggtgctgggactgggcggctggctggcgatcgacggccatatctccgccggcatgatgattgccggctcgattctgctcggccgcacgctggctcccatcgaacaagtcattaacgtctggaagagctggagcggtgccaagctggcctatctgcgcctggtcaaactgctcgacgccttcccaccgcgcagcgtcggcatgaccctgccccgcccacaaggtctcctacgcgtcgagcagcttgccgccggcaccccagctgcgccgagcgccatggtattgcaaggtattgatttccagctgacgcccggtgcagtgctcggcataatcggcgccagcggttcaggaaaatccactcttgcccgtctgttggtcggcgtctggcccgcagccaaagggcatattcgccttgatgacgccgatattttccagtggaacaaagatcagctcggcagcgctatcggttatctgcctcaggacatagaactgttcgccggcaccgtggcggaaaatatcgctcgtttccagcagattgatccccaaaaggtggttaccgccgcaaaactcgccggcgtgcatgaactgatcctacatctccccgctggttacgataccgtactcggccacggcggcaatggcctgtccggtggccaaaaacagcgtatcgccttggcacgggcgctgtatgacgacccggtgttgctggtgctggacgaacccaacgccaacctcgacgaagccggcgagcaagcgctcaaccaggctattctgcagctgcgcgcggcgggtaaaacgctggcactgatcagccaccgcccgcagttgatctccaccaccacccatctgttgctgctcgagggcggcaagatgcgggctttcggcccgacggcccaggtggtagccgccatgcagcgagcgcaacatcaacaacctgctgtgaatcagcctgcggaggaggtgccgcatgacacaatctga

SEQ ID NO: 446814 - DNA, 1320 bp, Serratia marcescens
atgacacaatctgaaatcctgaaaccgcaggcgcccgacgatgtgcagcgctatggccgcttcggttggctcacattattgatcgggcttggcggattcctgctatgggcgctgtttgcgccactcgaccaaggggtgaccgcgcaaggcaccgttcaagtggtaggtaacagcaaaacggtgcaggccgccgccgccggctccatcgccgccattaaggtcaaagaaggcgaactcgtgcgtgccaaccagttactgatccagctcaacaccgtgcaagcacaggcgcaggttgacagctaccgtgaacactacctgacggcgctcgccatggaagcgcgcctgttagccgaacgggacggtaaatcgcaggtcggctatccggaagatttacatcgacaggcgcagagcaccccgcgcctgaaagatatcctcacgttgcaggaacagctgtttgtttcgcgccgaacggcgcttgacagcgagctggaagcctatcgccaatcaatggcaggggtacgttttcaactgcagggcatcaacaacgctcaaagcagccgccaactacagttgcaaagcttcagcgaacaactcaacagcatgcgaagcctagtaaaagacggttacctaccgcgcaaccgctatctggaaatgcagcggcaatatgcggacgttcgcagcgcgcaagcgcaggcgcaaggccagctgggccaattgcagcagcaactgcgagaagggcagcaaaacatctcccgccgtcaggccgactaccaaaaagaggtgcgcacacaattgacccagactcaactggacatcgccgaataccgcagcaagctgacattggccaacaacgacctgcactataccgaagtgcgcgcgccgctggacggcaccgttgtgggcctgaaagtgttcacctctggcggtgtggtcagcaccggcgaacctttgctggatatcgtccccagcgaccgccgtcttgaggtagaagcacagctgccggttaatctggtcgacaaagtgaaacccgggcttgaggtcgatttaatgttcaccgccttcaaccagaacgcaacgcccaaggtacaaggcgaagtcacgctggtttctgcagatcgtcttctcgatcaacgcactggcgaagcctactacagcatgaagatgaccgtgccaccggcgcaaataaaacggctgggcgacaacaccattgtgcccggtatgccggtctcaatctttgtacgcaccggcgaacgctcactgctcaattatctgttcaagccgatcgcggatcgcgcgcgcatgtcgttgacagaggaataa

SEQ ID NO: 446815 - DNA, 1368 bp, Serratia marcescens
atgatccagcgaatttctatagctgctcttgccttattactggcgacctgttggatcctggccactcctgcacatgccttgtcgttgacggaagcctttgcgctggccatgcgtaacgatcccacgctgcaagcagcaatacaggagaaaatagcgggtgaagaggagcatgcgatcggtcgcgcgggcttgttgccacaagtctcggcaaactatcagaatgcgccacgcaactggcaacaccaaaaatatcaggggacggatattttcggccagccaacaggcgagcaaagcgccaacacgcaataccgtagcagctcgctgtccgtgaccctcacccagccactgttcgattacgcggcctgggcgcgctatcagggcggcatggcgcgggcgttgttggcagacgaacgctaccgaggcaagctgcaagagatgacgacccgcctggtcgaggcctatatcgaggtagcatatcgacgtgaagtcatcgagctgacacaggcgcagctagccgcatacgcggaacaactggcgctgaaccaacggctgtcgagcatgggggaaggcaccgtcaccgacgtggctgaaaccgaggcgcgctatggcctagctcaggcgcagcagattgaagcgcaggatgcgctgcatgtcgcgttgggtgcgctcggtcaccttgttgggctaccggcggccaatatcggtgccatcaagggccggcaagggactttttcgccgctgacgttgaagttcaccacgctggaagcctggcaaagccaggccaaagacaacaatccggaattgcgcaccgctcgacagggcatcgccgtcgcgcattatgaggtagaacgcaaccgtgccggacacttacctcgcctcgcgttatatgcttcgcattcggagaacgactcaaacagcgataatacggtcggaaagaaataccgcaccgattcgatcggcatacaggtcagcgtgccgctttatgccggcggcggcgtatccgcttcaaccacacaggcggcggcacgctacctgcaggcaaagtacgagatggcagcgcagtcagacaaaatactcaatgatctgcaacagcaatatcgtctatgccgcaacggcgaagccaagctgaaatcctacaagctagctttggaagcggcggacaaacaggtggtggcaacccgtcaaagcgttcgggccggcatgcgggtaaacgtggacgtattaaatgcggaacaacagcgttacaccacgcaaaaagagtatgcggaggccaaatacggttatctgaaggcctggatgacactacaaagcttggccgggacgctcaatgaaaaggacattgcactgatcgcacgctattttcactaa

SEQ ID NO: 446816 - DNA, 1419 bp, Serratia marcescens
atgaccaactatgctgcacaaatcagacgcctgaaagaacttggccctcgcacctcaggcaatgacgcccaccgtgcgctaatctcagaagtcgcaaccgagttaagcgaactcggttatgacgtgcaacgtgataaacacaccttcgagcgctgggatgcattgccaaataacaccacactacacattgaaggcgttgatatcccactgtcgtcgatctggccgtactccggggaaaccggccctctaggcatcaccgcgcctctcatattgttgcagggccggcggaaaaagtggaaagcggcggcaggcaaaattgcggttatcgaagtgcacaatattgacgtaccggctcgactgctctttgacgactggggaggaaaattgcccttcgacaccatagccaatccggtcatcggaagcgaattcgccaatatcgaattaacaaaggctcgccaagccggggtactgggtatcatcgtggtctggggtagcatagccgatgaagcagcaagtggtcagtacctgcctttcactcgtgattatcagggtattcctgcggtgtgggtccccgaatcacaacgaaacactcttctcgccgccgccgaatgcgggaaagaagcgacgctcatccttgatgctcagaaaaccgcgggagcaacgatggacaccttgtgggccgtctctcgtggcaccggtccacaggcagaggaagctgtcctggtagtcacacacagtgatggaggaaatagcgttgaggagaacggccatctgggattgcttgctctcgcccgggatgcggcaatactcccccataatcgcacgatcatttttgtctacactgcaggacacctgcgcatcccctgtgtcacgaagcacggccaagctaccacggcatggctcgcagctcatcccgaatattggtccccttcgcacaaagggctcacggtggttgcaggccttgtcatcgaacacttgggggctaaacatttctgtgttgacccaagtagcggggaatacggccccgacggcacgttggaaccagaattgctctacaccacgaccgcagaactgacacagctggccctgaccacatggaagggagccagcatgaattcaatcattcccgtcaaaccgggcgcattggttcatctgggtgaaggtgaaccccttttcgagcacgggataccagccatcgcgctcgtcagcgggcccatgtatcttcttgcagaaacggatgcggacttggtagacattgaagcgctgactcgtcagatcgacagcttccggcgattactcactcatcttgccaaccatgtcgacagcgccactttcggtgtcgttaagtccccctcaaaattgagaaaactccttgcgctggctcgcatccttcttttcatgcacagacagcggatgtaa

SEQ ID NO: 446817 - DNA, 1299 bp, Serratia marcescens
  misc_feature (1047)..(1056): n is a, c, g, or t
atgagagcggtaaccacatgcagtgaagtggaaaacggattgacggtgactcagttcgaataccagcaattaaaacgcttggcgctggcgataatggataaggtttcaacgtcatggcctgtcgtttttatcggcgtgggacgttccccgacgccattgatggcttttctcgagtgttatctaggaaaagcgtttgttattaacttgccgctgagtggctttcgtcataactatcccggggagaatatttcactgctaagagaaccgttgagcgatgagcagaacaaagcactactgctccactttcaacgttttattccaattgaaaaggtgcgtaatagctacgtggttacgatcgactttatcgattctggggcttctctagtggccgccacccattatatccggcattatcttcaccgatacggcgataccgagaacatgggtgcggtatcgctgcgtgctgaggtgctgcctgaatgttttcgttctgcaatgcagacgttggaactggactatgtagatttccctattcacgccaatactgaagcgtgctctgaacaacattttaagttaggccgtggcaattattatgacgctatctcaccggtaaaaggggcatttaaaatatcggaagggcatctcacggagatgttggtcgaaaataatgcggcatatcaggactatatgcggcaaattgccgagtatatgttcagggatggcgatatcgaggatccgattcgcgggcctgtgcaaacagtgattgacggtatgcgaagcgttaaaaagacctgtcattcgcggggtgatgccagagcattgtatcgtcagtaccgcacgtttccctctcatgtgggctgtcagttaaaggggaacatagtcaactattcctacgtggccggtgagacgttggagagcgtggtgttacgaaaggatgaatgtgcgccattattgctgacacaactcgccagggcgcttgggcagctgcattggagtcatgtactgatagttaagcattatgagagaatctgttcggagagacgaaannnnnnnnnnttttattcgttggtgagcgtgttttttcaatgttatgagaattatgtcgatgataaggttaatttttatcgtgcattcatggttaattttataaattacgctaaaatagcgtatgaaaattataacgacgccatgcctccttttaaagaatggaaagtggcgcaggagttggcagaggcgactaaaggctatggcgattttaaaacattcttaatctcatatttcggtcatgataaagcgtaa

SEQ ID NO: 446818 - DNA, 654 bp, Serratia marcescens
atgatatttatcgaagggttgccgtgcgcggggaaaagcttgttggtgaatgctttggcggagcagggggcgagcgtctgttttgagctggggaaggtgttgaacagggcggatttcccaggcaacggtctttctttggaagaggtcgaaaaaatcaacgattggtttatcgctaaagaatgtgaacgtatgcagggagaggcgcagtgcttcgatcgttcatattttacccatctttgttacgcctatgcctacggtagatttatgtcgctcgatattttttcagcaacggtgaaaaagtatgaggaaaaaatctctgatggaaatttacccctgccctggggggttgtttatgtcgatatagaaagcaaagagtcgattgccagacaggaaaacaagatagccacgcgcgtttctcgtggcctgccggcattctggcgaaacgaacagtttttgaatgatacccgctatgcctatcaaaatctattttcttctttttttaacattccagttatttctatagacgcgaggctcagtacgcagatgaaattaaatcaattgaatgagtggatgtcaggcgtggtggcgcggtatggcgcagacattgattgcaatgcgtttatagaaaaaaccctcatggatgaagccagatga

SEQ ID NO: 446819 - DNA, 654 bp, Serratia marcescens
atgcacacagataaacaggagcaaacgcgtgttaacactgccgctgcagcagtgacggcaccacgcagcctgagcattatcagcggctgcgccttgacacaagtggggctgacagaattattgacgccgcatgttgaaaatttcagcgcttacgcttcccctacggcatttatacggaagcagagtttaaagaggcattcaggattgttactgtttcatgtttgtccgcgcaacgtgtcttacctgagaaatatcgttcaactatatcgtcgcctacaatgccatccgaattggcggtctgcattactgctggatccagcgtcaaccaatgggcgttctttgacgaaaaacgtaggatcaccggtggttctccaccttcatctgccaatcgacatattactgcgcaatcttttagcctggatgcatagcgaagagaaacagacaatccgacgcggcatacggccggtgtcactgtccgataaagagcgtcaggtcgttttggccacgctgcaaggtattcccatttcttcgctggcgcgtgagagaggtgttacagccaaaacggtctatacccaacggcgaacagcgttggataggctcggcataaaaaacacccgcgaattgctttgcctgagcatacagggcctgttgtaa

SEQ ID NO: 446820 - DNA, 600 bp, Serratia marcescens
gtgcttgcgattcccgcagtggaagccatcagagaactgttggttaacagcgaggtccccattaaactggtagccatggggccgttgacaaatattgccatattgatccagacgtacccggaaattgaagaaaatatagatgaactcgtcatcatggggggcagccttgtcggtggtaacattactgagcacgcggagtttaacttttgggctgatccccatgccgccaaactagttatggattcaagtatcaggaaaacggttgtcggactcgatgtcaccagtcaggcactggtgacagataaggagcttctcgcaggaaaaaataaatcctctggcatgtttaaaaaaacatttaaatattatgacgatggtaatctgatagaaggtgtctggatgcatgactcctgtacgatagcactgctatgtgaaaaagatatttttacctttgaggataaaactgtcgatattgtcgttagcggtgcttcagagggtgccatgattgaaagggaagacggggcgcttatttcttatgccgtggcaattgattcggataagtttaaaagctgggttgtgagcgtattgaaacgcttgccttag

SEQ ID NO: 446821 - DNA, 1734 bp, Serratia marcescens
atgaccaccttatcaatgacggattatccggttgaactgacaccggaaacagaaaacctttcgttcaccaacatcaacaacaccaatgtaattatctctccaacatcagacttaaccatttccaaagctcatataaagataggcagcggttttaatatgctgagctgggccggtaattcgaccaacggcggaccaaacattatcagcgccaatttccgcgccaatggcagcgctgagttcggcacaaataacacgacgattctatccgccaacttcatcaccaaagatatcctgatcgcgaccgccgccaatggcacgaaatccgcaatcatcaacagtaacattggcaacttcgaccaattcagctacatcgatctcgcaggctatgtcggcaccggcagcatacatcttgacggacaaaccgtagcgaccgagggcgcccacacctttgacgccggcattatcttcggcaacgccatcatcaacaacaccgcttatgctgatgtcagcaacatcgcgcaatctccctacttccccagcgcgccactcgctttttcccttagcggatttgcagataacgtccatttaattaacgctaacgcctcttactcggccggacaatatattcccacaaccattcgtatatttgatgacgcaacggccgccagtaagttacatgtcgagctggcgaaagttcagggaaaaaatgtcacgacagatttaaatattgatattggtaaagagtttaacccttataccgatacgccccccgcctatagcaaccagaaaatcaacggtggcaccttcgccgtcaccagccattacacgaacaccccggcaaaggaaatattaaatatcaccgccaactttacccattctgaattaacgttatccggtggaagcaatcacatcacggatatcagcctcaacggattcgccctgggcggtgcgaataattatgtgctgaagctcaatgtcaaagcgggctttaccgattcgctggcccgcatcgccgtgggcgaactgagcaacccgaacggcaatctcgcgccaatcagcgtggacattcacagcgagatcggcggcaccggcggcggcgacttttataatacgctgggtagcctgcaaaatagcgggcagttcagcgccatcatcaacacgctggccggcaagcaattggaggtagaaggcgcttcgcaagacgacagcttcagcgtcatcggcaacacaaccatcaccggacacggttcgggtttccacggcgacacgatcaacttcgcgcacagctccatttccagccaggtcaagatcaccgactatcatgcggccaacgaccggatcaatgcaggcgacaccacacaacaatggacgttctcagcggccggcggcaaatcactggtttcctatggcgactacggcaatacgagcaatttgaatgccttgttctccacattgggtggcgctgcagatgcgcaatccctgttcagcgcagcgctcagtacagccaccggtggcgccagcgaacatgcgctggcagaagtcggtgccataaagttgggcaatgcgctgtatatcatcatcgacagtaatggcaaccacggctttgacagccaggatatcgtcttctcgttaggtaaccgcgatctgcaacaaacggtggcggacatgcactacaactcgccgtctatcgagctgagcggcgtgacgccaccgcagttggaagcgctggcataa

SEQ ID NO: 446822 - DNA, 360 bp, Serratia marcescens
atgaaaaaaatagccatcttggcagtggcatctgccgttcttctctctggatgttccattcgtgttgccgatttgaccgttggcagcactaagaactacaacatcaatggtaataagttcgtcactggacagcgtgttaccgccgaagattcttacccggtaatcatcttcccgatgggtattccgaacatgaaaacggcgattgataaagctattgagaaagataaatgtgctgtcggtttgagcaatgtggttattacccagcttaatcacgcgttcttatttggcaagatcggtctccgggctgaaggtaacctgatcatcgataaaagcctgcctggatgtgaaaaccacgcatag

SEQ ID NO: 446823 - DNA, 3132 bp, Serratia marcescens
atgagcttcctggcactggaacgtgacgtagccgcactgtattacggtatcctgggtaaacaggccgaccgcgcgacacttgaatttttcgccaaaaaactgcatagcggcgagctctcgaataatatgctggccgacttgctgatcggtgcggatgatgggcaaaaacggctgtcggcactcgatgacgcgggtaagatccaatatatttaccataatattcacggcgtctatgccgatacagagcagcttgccacgctggaaaatcagctgagtagcggcgccacgctcgggcaaattgccgtgcagctaagcaatggactacgcgactatcacggcaacgacgccaccgcgctcgctcaacaacagcaattcgacaacaccatccagcaaatcctgtatccgtcctttaacggcggcgaaagcgcgacacaaagcgcggcggatattcaagccatttactatgtgctgaattccaccatggtgccgcaaggcatcaactattggggacaaaaattggccagcgctcaggccacgctcaacaatatcgccgacgtgttcgtcaacacccgcagttatctgacttcattgaacgatcatgacttcgttaagcggatctttgaacaaacattccagcgctccgccggcgaagaggatttgcaacactatttaaccggcctgcaaaatcgtacccaatcacgcggcgatgtcgtggccaaaatgatcgccgaaatccgcagcgatacctcatccgaccatgccacagccaaaaacagtttcctgcttgccacccacgtttataaatcgggtgaattgccggaaaacaaataccttgaaaccgtgaccgcgctttactacggcgtcgccggctacaccatggatgccacggcgctggaggtatacagcaaacaactggctgccggcctgagcacggcggatctgttgcgcggtctggccagctcgccgtcctttgccgacgcggtgtattgggaacaaacgtacgccaaactgttcaataacgtgctaagcgcggccgacagaagcaaaatctggaatgaaagcggtaagaatgcctacgtggcgaccagtatagtgatcgacacctttctcaatggcggcacgaataaatcttacgttggctggacttacaatgcgaaaagctacgaacgcatcgccgatgctctgggctatgccaagcaggcagtgctgacaataaacgatgcaggcgaatgggtcggcatcgtcaaccgacagcccgctcacaaactttccgacatcgaatggcatgctcttagaaacgccgaaataaacatcacgaaagcagccaatatcgtgctttcttttgccccgaatctgcaaacgctcaaaatgaccggtgacaagccagcgacgctggattttagccgcaataacgacgttactcctcaaatcatcctggaaaatacgcatgtctcgtttatcggttcggccggcgatgaccgaattatcatctccgccacggcagacatgatcaacgccgatgcccaaatacagatggatcggggcgcagactggcttctctggcagggcaacgccacagcgggtaatgccaatatcgtcagcaagcattttaaggcgatggcggcgctgtatgacgatcaggatgccacccacgataatgtgctttccgccaacttcctgaccaaggacatttatctgaccaccgcggagaatggccaaatacaaggcaagatagtcagcaacatcaataactttaacttcttccaaaaaatcgatttggcaaactataaaggcacgggctcaatttatctggacggtaaatgggtggctagcgaagggaaaaacgtgtttgatttcggcgtcacgcgcggcgtcgccagtattcacaatacagagtatgccaacgtgagccagctgacgcaggcaacgccgcctcccgccagcgcttaccaaaatgcgaccggtgacgccgggtttgccttgaccggatttgcagacgacgtgaccgtactcaacataccggtagatccgtgggggctaaattatagcttccgcacgctcagcgtattgggtgacgccacggccaatagccgcattcatttcgattatctgtatgacgatcgctacacacgcaccacgccagtcatgacgattaaattcaacggtgcgaatgtcagcaaaatagatgccggcacgctgagttttgcgataaaacaactgcaaggccctacgccggaaagcaacatctatggatatatcgatattctctcatccggctcggcggagaacaccttgcggttggccggcgatcagaacgcgatcggcacgataaccgtttccggtgacaagcggctgaatctgaccatcaagcaggatttcagcacccatctgacgctgatcgacagcaacggcaccccgctgaacctcgtggcagagaagggcggtaccggcggcggcgcgctgtacgatctcttgggaccatcctatgcgaaatatgcggcgatacgcagcgaactcagcggctatcaactggctatcaacacccactcgcagaagagcgatacgcttaacctacaagggaacaccaccctaacacgcgatctgcaaaacaagtctgccggcgacaccattatcttcacggagagcgcaatagacagcctggtgaccttgaaagccgtcgccccctggtcctctaccaccacaccgaccttgggcaacaatgacacgcttatcgtaggagacagcgccaatccgtggatcttctccagccaggggcggcaaaccatgatcggctatggcgaatacagcgccagtgaaaccaccgccctgtttaattcactgaatctaagccccaccgccactgcctttgatttgttccgagagacgcttgccacggccacccatggcgccagcgaagatcgtttaagcgaagttggcgtgctgaaactcgataaaaacagttttgtcattatcgacagcaaccataatcacaccttcgatcgtgacgatatcgtcttttcgttgggcaacatgagcgtcagcgatacgcttaagctggcacactacaccccgcctaaaattgaaatcagcgcctccgcggcgcattctcaggtgcttgaaagcgttatttaa

SEQ ID NO: 446824 - DNA, 711 bp, Serratia marcescens
atgaatgtgacattgatctcgagtatcattggtggagtttttgccatagcttccgttattatttccgtgggaattactacatataatcagaatagagttaataaaataaacaattccatggagacaaaaaagagaaatcaatattaccttgagccattgattaggtcggctgcggacttgcaaagccgaatttataacatactagaaggtggattcattgaaaggtactatcataacggaagtgaacgaaatcaaagctatgttataaataatactgtttttcttgtggctcaattttttgcatggaccgaggccgcccggattgatgttcagtttctcaatcttgaaagtgatttaaagacccgcaagctatctgaattgcagagtaaaatacattcattgatacaaacagatagcattggtcctcattttgttttctttgcgggagagcaaagggctattggtgagcagatgttaataaaaatggataaaggatacaactgtatagggtatggtgaattcataaaaagagatgcattctgtaacgagtttttatttaaagagctaaaaagtgaagttgttaaaatggcggcgaacatacaaggttatcacattagactacaaaaactgcaacatgcgctaattgatttgcttgactatcttgatcccaatgaaattagagttaatggtaatgagcgttctaaaatataa

SEQ ID NO: 446825 - DNA, 381 bp, Serratia marcescens
atgagtaaatatttattacttctttttcctctttttctctctggctgccctatgggagataggttcaacttataccctgcgcaaagcaagattgtagacggcaaagtctgcgtcttttttgatgacaacgaaatagtcagaagtgaatctattttaaagatagccatctggaaacagggaggtgatgactacgtttacgaaaaatcatatggttacagcgcgctgacgttggagaccgggaagtgtgtccccggcatcagcgagtttaattttatccccggcgaagaatacacagtgttggtaagaacaccgctgaattcatatcgaaccagttttattgtgtggaatataaatggaagagttatggtaaaggcggattag

SEQ ID NO: 446826 - DNA, 510 bp, Serratia marcescens
atgagcgaagaagttaaaaatagatatacgtgtactgtaactgaggaaaacctttgcgttaacaattgccttgattctttcaaacgtcatgccgaaaaagaaaaagaggggaatgtggttgcgccgagagaaactccccatgttggttattgctatataataaatgcgagcggacagaatttcaaaaaagtttatttaaggcataccattcaaaaaataaacaacactattgtaaatgagaggacgtttaatgacattaaaaacacagaatccacgacagagccattaatatttgaatatattacaggcattggttcccccttcgattactggtttattgatttggaagttgaagccggatacaaatataaaacaaaggataatttttactgtagcgttagcagtagtgataatggaatcgtgacaatcacaattagtaatgacttaatcgcctactttagcttttcctcttctagcggctgttatgttcatttgttagggccttattag

SEQ ID NO: 446827 - DNA, 579 bp, Serratia marcescens
atgagtattgacattactgatttagaacctatcaaaatcctcgagcgcatctgcgaggtctacggtttttcgcagaaaattcaactagctaatcactttgacatttctgctagttcccttcagaaccgctataccagaggcacaatctcttatgactatgcagccttctgttctctcgagacaggggcaagtctgaggtggctgcttactggcgacggatcaaaatttgaacgctcgcccacagaagaacgcccaatcgagcttgagctattcactattgagaatggcgagttaacaaaagataaacccctgagcattgaccctgattttttccgtaagaagcccgctaatggaattgcagttcgtaccgatggaaaattacactttatagataaagcatcttcgttagctgatggtacttggctggttgatattgaaggggtggtgagcattcgtgaaatcaccgtgttaccagctaagaaactgcatattgcaggtggaaaaataccgtttgagtgctcagtggatgaaattcaggcgcttggccgtgttgtcggcacctatagcgaggtgaattga

SEQ ID NO: 446828 - DNA, 264 bp, Serratia marcescens
atggcttctgaaattacaatcgtgaaaatccccagtgagaaggtgttcgctaaagagttcgctgctcttgaaagggtttctatgtctaccgttcgtcgctggacaactggcaacaatccatgcttaccaattgaacctcgcgtgatcaaacccggccgcaagcgtgctagcggcttggtgcgcattctgtatgcgcagtggaaggaaaaacaggttcgtgaagcattggggcattcccgttttcaaatcgtcattggttcgtga

SEQ ID NO: 446829 - DNA, 219 bp, Serratia marcescens
atggctgacccaatggactacgaacaggagcggcaagcgctggtactaaacgcgcagatcgccaacgcccgcaaatcctccgcgctgccttctgcctttgtttgcgaggaatgtgacgctccgattcctgccgcgcgccgcgccatcatttccggtgttacgcgttgcgtgacatgccaagaaattcaagaagcaaaatcacaacattttaaagggtaa

SEQ ID NO: 446830 - DNA, 585 bp, Serratia marcescens
atgactccacaacaaagagcacaggaatggttagatgatgactttctcattttcgatacagaaactacggggttaggtgacgatgacgagatcgttgaaatatgcctaatagatcgcaacgggttcatcatgcttaatacgttgataaaaccgacaaagcctattcctgctgaggctacagctattcatggtattacgaatgaaatggttgcgaatgctccgacgtggcgcgatgtacatggcgctgttggcaatttgttttttgaatacggatttgtggcttacaacgctagttttgattcccgaatgattatccaatcagccagtttgcatgggctaggtgacgatggcttgtgctcgtttatcgaagagtattcacgttgcgccatgttgacctatgcggagttttacgggcaagaaaacgatcgcggtggttatcgatggcaaagacttaccgcagcagcagagcaacaaggtgtcattattgagggaacgccgcaccgtgcactctcagattgcctgacaactatcggcattattaaagctatggctgctggtaaacgcagtaaaggaattaatgaatga

SEQ ID NO: 446831 - DNA, 576 bp, Serratia marcescens
atgaatgaccattttaatcccggctattacgaagaaaaacaattgaaggagttcggcattaagtctgtcggaaaaaatgttttggtcgcaaaaaactgtacaatagtggggctggagaatattaccatcggagataatgtcagaattgatgggttcagcacaattattgcggcaggcgatggctttcttgatatcggcagttatgttcatatcggtgggtattctgctattttcgctggtgcaggcgttaccatgcacgatttctctggtctatctcagtccgtaaaaatttatacaaaaagcgatgactatagcggaaaatttatgaccaatcctacggtgcccgaacatcttacgggtgtggtgtctggtcctgttatgattgagcgtcatgcgatagtcggttctcagtcaatcatcatgcctggcgttaatctggctgaaggcacggctgttggcgctaactcgcttataatgaagaatacagaagagtggtcgatctattttggatcgccggccaagaagataaagaacagaaaaagaaaccctttggaattggaaaaagagttgaagtag

SEQ ID NO: 446832 - DNA, 759 bp, Serratia marcescens
atgtgtgtctctaactcatcgttttttaattactttttcaagaaagaaaggatcattacatttaacttattgatgagttttattctctcaaacggtgtttcctcgttgagtgagttttatactttatgtgataaaaacaaaatttcaggtaaaaatagtgcgataggctttgtggactatatggtgcatagcgagagagtcgttttcataagggggggtgatcgaagaaagaaaaaactagagctaactgagaagggtcgaaaagatttagattacctgtttctaaaaaaactggcaccgctgagaatttatgactcgacaattgattattgcgcattattaaccgatggtttttatagaagttattataacaagaaaaacattgcattggtgacttcatcacgacatgattatgactctatttttgatgataatcagcactttttggaaatacaatctaaatctgcaggattgattcttttaatgaaaatcttgctcgatgtcagaaagggtaacgtgaatgttggtgggcggttgagcggttcatactttaaaactatttccagaaaagttggagcgtcgccttcacagtcgttaaacttgattactctcttggttgaaggcggcgcggttgaaaaaattggtgttgattacgtaatcagagatgaactgctgaaaggggttgagcaaataatatcactgaacttggctataaactattgtttaatcaaggaggctttagatgatgttgagatatga

SEQ ID NO: 446833 - DNA, 825 bp, Serratia marcescens
atgaatattgacgagaattatattaaagaaattattattcctctgatgactttattattgccggtattgatatcggtaataaaatggtggttctcgcgctggtcaaaggggcaagacaaccgacgtaatcaccgatttgatgctgtcagtgcagataaacggatctccgtgttggcacatattgagagattgcgagccaagccgcaggaaggcattacgcaattgcaaatcaaggcgctgtatgaaagcatcggcattcgcctgccggtctggatcgcgcatcaactcacggtgtatctgggtaaggcgcctttgccgttaaccagccccattcttaacagctttttacgtcatgttttgctctgtgtagtgaaaaacggtgttttctctttcagtgccgaacggtggaagcgtcagcgccggggactggtgggattcctgatactgagtttagctgccatcgcttatggtttctttgttaccgtgccgcctttaggcatgagtgcacccagcgccggcaacacgttctggtttttctttttcctcttaacctatctcgccatggcgatttttgttgtggcctggtcgatcgacgaatgggtttcgcttaacggcgccaaagctttctggttgatatggcaaccgaatctgtgccaacaggaagaggaatatcaggcgcgttgccggcatcagcaggatcaagcggtgaaagaacatgtggattcagcctttattccgctgagtgaaagcgatgtgtgcgaaaaaccgctgcgtagttggctgttgcggcgattgggagggcgtaaggcggctgtgaatatatga

SEQ ID NO: 446834 - DNA, 594 bp, Serratia marcescens
atgaggcctgagcgtgctgtaatatccaacgatatagtccgttattgcatgaactgcatcactgaagtttatgtaacccgtcaccggcacccactcattcttcaggctccggaagaagcgttccattgggctattatcccagcagtttccacgccggctcatactctgcctgatccggtatcgccacagcaactgccggtactgcctgctcgtgtaatgactgccctgatcgctgtggaacatcactccggctggcttgccgcgcgtttcccatgccatttccagcgctttcatagtgagcctgctgtccggcgagaacgacattgcccagcccactggttttctagcgaacaggtcgagaacaacggcgaggtacgcccagcgttttcctgtccagatataggtcacatccccgcactacacctggtttggctctgttacggcgaactgtcgctcaagatgattcgggaaagcaacgtgctcatgaccaccacgcatataccggtgagtcggctgctggcaactgaccagtcccagctctttcatgagtctgccagcaagccagtgccccatctggtagcctctctgggttga

SEQ ID NO: 446835 - DNA, 963 bp, Serratia marcescens
atgacactggtttcaaaactaaagaaagtgttgaagaaaaaagaagttgctgccctcgtggcttctgtatgcctaatggcatactcatccagcgctgatgcatttacttgtcgagattcacgcggaaacactttgaacagtgcagcgggaactggctcgctaaacgtttatgctaatctaacgcccagcgtacaacctgggcaagttctggtagtagatctttctcaatctatcacctgcagaaatgaccaacctgatatcagaaacgatttggttagcttattatcaggttctgcttatggtggggttttgcagagttttaatggcacagttaagtattatggaagtagttatccttttcctacaacatatgaaacaaaacaagtaaacaataggtctggttcatttgttccatgggatacgcaattatttctcacccccgtatctacagcgggtggggtcgtggtgaatcagggaacccttatagcaagattagttatgagacaagtcggttcaaatatttctaatggagggaatgtccatacagcaactttcacatggaatgtttatgctaataacacagtggtggttcccactggtggttgcgacgtgtcatcgcgcaatgtgacggttaccttgccggattaccccggcacggctgctgtaccgctgactgtccattgcggacaaaaccaacagctggcatattatctgaccggcactacggctgatacggcaagcaccatatttaccaatacgtcatcatccaatcctgcaaccggtgtgggcgtacaactgtctaaccgtaatggcattgtagctaccaataagaatgtctctctcggtacggtcggtaccagtcctgtcagcttgggactgacggcttcctatgcacgaaccacggggcaggttgtggcaggcaatgtacagtctatcatcggagtgacgttcgtttacgagtag

SEQ ID NO: 446836 - DNA, 183 bp, Serratia marcescens
atgggagcctggctggaaagccaaaagatgggtgagctgcaaacgcgcgccccgaaaacctgccgcggtgatgatattgcccgtttacgtggattcgaagcaggccagaacgcccgtttacaccagggtgttcagggggcagtgaacactggcattggttaccagggaggacgcaattcatga

SEQ ID NO: 446837 - DNA, 279 bp, Serratia marcescens
atggggaaaacagttgtttcattgattctcgcctgctcgatgctggtgacttacgcgcacgccggtttcaacggtaaccaaggtgtgtcggggaacgaagggagcggcgccggcaacagcaatgtcggcgtatgtattaacggcaacggccaaaatgcggggcagtgtgcaggagaaagcaacggcgccgccaaaccgaaagaaaaagacaaaagcgagacgttgaagtccatttgttcttcactctttatgaaaaagtatgccgctatttgccagtag

SEQ ID NO: 446838 - DNA, 549 bp, Serratia marcescens
atggagtatttaaacatcatcgttgatgatgaaaaccactattttgccgccgggttacggcatagcattattgagtatgcccgggcccatagcaaagctatccgtgttatgacgccagaggcggaggtacaacctgatgtggttatcgcttcatcacggcgccgcgatcgacgttggcgcagaaattattattgcgctgcggcggtgcctgtggtcactataaaagaacggcagactgctgccggtaataagctacctcgtgttctgtaccgtaccgatagcccagaaaaattatttgagttgcttaccgaaacgctatcaaattcgcaagatacaggattgtttgagcgtcaggcactgactcgtcgtgaacaacagatattgaaatatctgaggtttgggtttgaccaatctcaaacagccagattattggggatcagtgttaagactgtgcacagccataaacgctcggttatgaagaaactgatgctaagtagaaatcatgagtttatctattggttgctctcacatgagggagaatattcctaa

SEQ ID NO: 446839 - DNA, 801 bp, Serratia marcescens
ttgataaagataacgtcttttatatcactcgctttttttgcagccaaagcagtggctggatgggatatggcggtcagaattgatccagtgagcgtatattatgggtactattatgccaagttaacccgctgggacacccaggataatacacccaatccgatgtatggttgtagaatgagtgataccggttgtagtattcactttacatataacaattcagcatttgatgaccttatctactttcccgagatcagaactagcaagacagtaggggagttggcgcagcattttattgataaggggtatctaaataaggaatatagaagcaggcagttatcaccagactctaaacactgtatttctttcgcctatagatacgaaataaatggtgggcaaacttccggtaacgcgccatttcctggtggtactcaacagtgttatgtaccggaggtgactccggggatttgtgacatttatgcaccaaagttggagcttgaacacggaaaaatcacggctgaattggttaatgggcataccacgcagatggagttaacagtggcttgtacattcgattacaaagtacagatcatgtcttccgatcgctcaggtagcattttttttaatgcgaacaaacaattccgcagtgacctgaaagtcaacggcgctgatttggggcgtggggtggcggttaacgcaaccccggctggaacgagagtgacattgacatctacgctgaatggttatgatggcagtattggagggtttcgcggttcgaagagcattattgtatcggtgccttag

SEQ ID NO: 446840 - DNA, 522 bp, Serratia marcescens
atgaaacgacgtttaggattggcgctcgggttgtgttgcctgtcaactttggccggtgcggtagacaacctgcgctttagcggcgcgctggtggcggaaccctgcgtgatcccgcccggccaggagagtatcgagctgaacttcggcagcgttgtggacaaatacctctataccaaccagcgtacgccgggcatgccgttttcaatcaatctggccgaatgcgatcttagcctcgggaagaccgtaatcgcgactttcaatggtcatgaaagtatgccgctacctggcttattggcgctagcgccgggtagcaaatcctccggcatcgcgatcgggttggaaacgacggcaggcgaagcattgccgataaataatgctagtgcccggatacggctatctgccggtacgacagttattaacctgcaggcttatgtgcgcgcagaacctgctgctatagctaataaaggtttagttcacggcgattttaatgctgtggcgacgtttggccttgaatatgaataa

SEQ ID NO: 446841 - DNA, 513 bp, Serratia marcescens
atgaaaggggcgaagaggatgaggcatgtctttgtcgcaatagggctgtgtggtgtcgccgtgttaagcgcacatgtttcggcggcggtcgaagccgatttacgttttcgcggcacgttgcgcgcaccgccgccttgcaccatcagtgacggcggcacggttgcggtggatttcggccagcgcgtgggtatcaacaaggttgatggcgttaactatcgccaggcggtggattaccgaatcagctgcgactcaccgggggcgctgctgtgggagatgtggctgacgctgaagggtaacgccaccgcctttgataaggcggcggtacaaaccgacaatgccaaccttgggattcgcatctatcagaacgatacgccgtttacgctcaacggcagcctgaaaatcaatcctgccaatcccccacggctggaggcggtgccggtagctaaaccgggggcgcaattgaaggaaggcgcctttgtggcgacggcgacgctgcaggtgaactatcagtaa

SEQ ID NO: 446842 - DNA, 432 bp, Serratia marcescens
ttgccggtacagtcagcgaccaatatcacggtaagtgtcaccgtgctggcaccgttgccttgcgtgtttgacggcaacaaaccgatcgaagtgaatttcggcgatgaggtactgaccacgcgcattgacggtggcaattaccgcatgatagcctactcactgagttgctccggacagggaaaaaacgcgatgaagctacaaattgcgggcaatggagcaagcttcaacagccagctgttgcaaaccaacgtcaatggattggggattgcgctgctgcgtaatggaacgcgtattccgctgaacagctggcaaagctttacttattccaccactttgccggtgcttgaagcggtactggtcaggcaggtcggcgtggagttgccgaccggtgagttcaatgcttccgccacgctgcgcgcggattaccaatga

SEQ ID NO: 446843 - DNA, 657 bp, Serratia marcescens
atggcaaacaccaacgccaaactgcgcgagtgggaatatctgttgggcgaactgcgttactacgccctgttggcggggctggtgctgatggcgccgctcagcctggcggccctgctatggctgttgccggcggcgcaggcggtagacaactgggaagtggatggtgccaacggcgtgctgtacatcgaaggggcgctgaccgaaagcgcctgtcggctggagatggacagcgcgcgccaggatattcgcctgggggacgtgtcgaccgggcggctggcgcaggtgggcgatcgcggcgtgccggtggcatttgaactgcggctgcgtgattgcctgcgtagtccggcggtcagccgggatgaacgtactggcgcgctaagctgggcgcatgaccaaccggcggtgcgggtggccttccacgccccggctgacgccgataacccgcagctggtgaaggcgcagggcgtgagcggcctggggctgcggatgctcgatggacgcggcaacgatgtgcgcctgggcagccgcggtgcgccgctgtggctgacgccgggtaacgacgtgctgagctatacggtagtgacggagcgcaccgccgcgtcgctcagagccggtgcttatcgtgccatggtggattttagcctgagctatgactga

SEQ ID NO: 446844 - DNA, 543 bp, Serratia marcescens
atgacatttcgggttcaagaaataaaggcagtttgcctattgccgttgctgattttctttatggggcaggctatttctgccgcgcaagggcaggggcgcgtcaatatgcaaggggccattatcgatactgcctgcgccatcgcgacggagagccgtgagcaaattatcgcgatgggcataaccccggtagcggacattgttcgggacggaagaggaaaagaggtgcccttcagtattgaactaattaattgcgtgctggagcgtgcggataacaatttgccggattggcggcaattccaggtgacgttcgatggtcacaatgacggggggatgtttagcgttaatggcgatgtttccggtctggcgataagaataactgactcgacgggaaatatcgcacgcccgggcatgccgttaccggcgcttgatattttaccgggaaattatcggctgaatttttcaatgtcgctggtaagcaataaacaggtgttgaaggcgggaagttatttttcatcggtgcgtttcaaaatggattattactga

SEQ ID NO: 446845 - DNA, 555 bp, Serratia marcescens
atgaaactgaataaaattatgctggccgcagtgatggctctgggtgtttcctctgtagcgcacgcagcagaccagggccacggtaaagtgaccttcagcggttctattatcgatgcaccatgctcgatcgcccctgattctctggaccagaccgttgaactgggcgctatctctaacgtagcgctgaaagacggcggtaaatctactccacgcaacttccagattaaactggaaaactgcgaactgatcaccgagaccaaagacggcaagaccaagaataacagcgttgcgctgaccttctccggcgcggcttcttccgtcaatgctaacttgctgggtattaccggtaccgctaaaggtgcgggtatcggcattaccgacggtgctggcaacgatatcaagctgggtactgccactggtgctcaaactctgcagaatggcgccaataccttgagctttgccgcttacctgcagggcaccaaagcgtctgaagcgggttctatcgtcccaggtgagttccagtccgttgccgactttaccttagcttatcagtaa

SEQ ID NO: 446846 - DNA, 753 bp, Serratia marcescens
atgatttttatcatcaacaacagtatcctctacaatgaggaagaaggtacactggcgcatattgataatgccaacaataaagtagctttacttaaaccggccagccgactgctatcgttattcatcagaaataatcatcagcttctgctacgtgagcggctgattaatgatgtttgggtcgagcatgggctaaaagcttcaagtaataacctgaataattatgtgtccggcttacgtaaatcgctggcacagttcggtatagaagaaattatcgtcacctatcctcgacaggggtttaaatttagcgcgttgagtattcatagaactgatggagagaaagagactgataataaagagagtaatattgcagaatcagcgacggttgcatcgtcaaataatacggccgtcaatcttcgccgcttattacaacgtctgctgatgatcgccgccgcctgcctggtgccttttgcgatcgttatcctttaccaaaacagcacgcgtatcaacgtctacccattaggcagctatgagaattgccagatatacagtatgaggctgggcagcggcaatgtggattatattaagcaggtgatacggcgcgccgggttcagctgccaaaaacgagcggatgtctattactacgacaacattcgcaatgaaggtaccgagaacactgaacagtggctcacgttttgcccgcgttcgggtaacagcccgtgcatcaacaattatatcgacaataaacagccttaa

SEQ ID NO: 446847 - DNA, 498 bp, Serratia marcescens
atgaaagcacggggctgtagttttttccgtacctattgctacggcctgttggccgctctggcgttggtttgctgcggtgcctccgcctacctgctgtttttaaagcctcaggtaccggaatgtcgggcggtgttgtggatgagcaaccagcagggtgataagacgctgcgacgcgctttattgatcagtgtgctgcccgacggcgcgcggcgcgcggtggtgcggatcaacggcagtttgtttgataatgaagtgagatacaatgtcgatcgggcgctcgagctggactatcgtcgacaggggagcacctatattttcaatctggtcagtaacaaccgaatgccgcaggatacgttgaaatcacccgaactgaatctgcgcctgccgttggaaggacggcagtatcatttacgtatcgaacaggtggataagcaccactttctttttgtgaacaactacgggccgatgttcgtctgcgccacggcatctggcggatag

SEQ ID NO: 446848 - DNA, 828 bp, Serratia marcescens
atgggcgttaaccagtttatcgcgcagggaattatgagatatataattaataataatattaaatatcatgaggatagatcggagctgatctcgctgcatgatgacatcccgccgattgtgctgacggccacgctgaaccgcctgctttccgccctggtgcgcaacaacaacctggtgctttcccgcgaaacgctgctgatgcaggtgtgggaagcgcacggccaggtcgcctccggcaacaacctcaacaacaccatctcgattctgcgcaaagcgttctcctcgctcggcgaggaagagatcatcgttactctaccgcggcaggggtttatgtttaccgcccgcgagctgaagacggcggacagtttggcaacagcgttgccgacaagcgaagaacagcctgccccggccccagtggcatcatcttccgctgtgccggggcggtggaacagattgaaagttctcgcattgagtgtgctgttgatcgtggcgatgattgggagcatttgggcctggcaagattccggctatccggcaattagcaccaccacggtggggaaaattggccagtgtgaggtgaaatttatcacttcctaccacaaggtcggccctaatcaggtggatttagcgcatctgcaacagatgttggatcaaaaaaatcatatcaaatgcagtgagccggcgaccatcttctattacgacaccccgtcaataacgccaaacacgacagggcaggtcagagcctcttatttctattattgtccgtcggaaaaaatgtcggcgggcgaagtgcaatgcgagaacttctatgaaagcacggggctgtag

SEQ ID NO: 446849 - DNA, 1050 bp, Serratia marcescens
atgtcaaataaaggcctgcgcgttaaaaatccggatggaacaagcttcctgtttaatgaaagtacatctcctgcattcatagtttggagcggaaatgtagatagaaactcacccggatattggcgagatagtcatgggcacaattggcggtgtccgaataaaataccagatggatataattatgtaattgtatctggcaacatggctgggatactttatcatattgaaaatagtcagtgggcacctacaggcgatgtatgggaacagagtttaactatagatgacggccatttatatataagggacggagtcatgaaggagtatatagttatagtcgcatggccaaatgcaaaaaaaggtaattatggtgttaaagttttcggaaattctatatttacatcaatatcagacatgacacatgcttcttatgtcctttataaagggtatactacaattgaaggtgactggcggccatctattttgaactcgtcatttacaatggataattgtctgtgttttttttactcagaaagccccgatgccaccataaagctctggaactcctttgatgacagagacagatatccatttacagatcaaattgctgactatgtataccgagcaatggatagatggggtaataaaacgtcactgcgctgcagggtagttgtgtttggtaacaaagatttaaataccattgaatcagagcagcgttatggctttaagattagaaacccagaggggaagattacgttttctaattcagagggggttttggtaaaaccaatgtcaataacattaaatgataaaggagtagagatccccttcgaaatacctggtataagtcggcctatgtatttagcagcaatgataggtcaggggtttaataatcgaacacagtataaatatggattaaaagcctatggctcatacgttcaggttgggataacagaatctaactatcaagcggcctctcacggtgacaggattgattatataacaaaaaaaccttttctttttctggatgccaaagattactttgttttttaa

SEQ ID NO: 446850 - DNA, 138 bp, Serratia marcescens
atggtgaccccgtccctgcaggccagagcacaagcggccgcggctgaaaggggagtgcaggtcgccgacgggtatcaggcggcgtatgacgccgggctgtcggtgcaaatccaagtgaacgaagaaaagggaagatga

SEQ ID NO: 446851 - DNA, 243 bp, Serratia marcescens
atggaaatggcaaacaaattcaacaacaaagccataggagctaaatgcatactgattgatcgcgacaagaagcactaccttttttccagggaggagtttataagaagaaaagatatttataacaaagagctcgttgaaagcaagttcaatatatcaatatcgttagtaacaaatgccgtcgccgttttcgaagatctaatcaaggaagaagagactgaaaatgagcaaaaagaagagcagtga

SEQ ID NO: 446852 - DNA, 573 bp, Serratia marcescens
atgagcaaaaagaagagcagtgatatagggatgttcgttattggctggatagcttcagccttggcggttgcgctaccgttagtatccttgatattaataaaaaaatatgctccagacacatatagtaactacggtgaaaaaataaatattttcgcgtaccttataggcgcattctttagcggattgtttacttcttatcgtgtgtcttgtaagtccgatgaaaaggatgagataataaaaaaacttgaaggtgatattgaaaatgcaaagaaatcgtatagcgcactatcccctaaaagcaaaataatcggattactacacgaattacacactgcatctaatacccttaataaaccatcaatacaaaaattaataatgaagaaaatcggggagataaacaaggattcatcattcgacccgagatatgatggaatgataagtcaaatagatgatgataaattcaaagagagtaaatcacaaaaagaaagcgagccacgaaaaatgaaaataaagtcatcatcaattattattggcgatctaatttcattcaaagtcccctccggcggacaataa

SEQ ID NO: 446853 - DNA, 597 bp, Serratia marcescens
atgaatatcatcattggcggttttttgccagccagagcaatgacatccctaccattgatatttgcgtttgtaggcatgtttttttgcgaggtaattaaatcaaaaactatcaaaatcttgttacctttgctcgtgctatattgtggttcaatcgcatcaaacgcactattttatgctgattacatttcgttcaatagagactataggatttcctcaaatataatttacgacatagaaaaacaagaggggatttctctattaaaaccaacaaaaatatacttctttggtggtctggaaatgcctcctattgataaacctgaaaactctgatatgtttggctcttcctttcttaattgggatggaggaaactcagctagaatagctgcattcatgaacactaatgaaatagctaacatagcaccagtcaaatatgacagtgtcatttcacacaaaaacaaaatatatgaagcccccacatggcctttagatggttcgatcatgaaatttgatgacatcatcgtagttaagcttggaaataaccctggaagttgtattaatggagtgtataaaaatatagacccctcacgatgtcgctaa

SEQ ID NO: 446854 - DNA, 516 bp, Serratia marcescens
atgagagtcatttcacactcgcacaaagtacagattcggttgtgccgaggcatggagatcatgctgttgtttttaatgagcacgctcccgattgtatgtggctacttgctgttttggccagtgagtgacggccagtctttttcttttgatacggagatagaatggacgtcaggggataatatcacttttattgttgataacctggtcacttttcttgtgttactgcaaatgtttatcttctctaaaggtatacgcaatggtgagctgtttactaaaaaacgaattagaaatgtaagaaatataggcttaatccttgtgcttgggtattgctttaatcttttcattcgcatattttttgactcctcgcttgatgaatggaactccgactatgtatccgtagccagctcagagctatatagcttgcaacaactactgctgggatggggagtgctttctctgagctatatctttgagaagggaaaggaactggaagaggaaagggagttggtgatttaa

SEQ ID NO: 446855 - DNA, 741 bp, Serratia marcescens
atgggcgtgaatcactcagttgtgcagactcttggtggaggggggacgatacggcgtggtggctggaggcgaagtggtggtgatgtaccccccgatgctcgctggcagatcacggtagttgacgcgtgctgctatgggcgtgcaggaatgaaggcggctttgcaaagcgacccctgcgtggcgcgagttgtcgcgagagaggcgctggcggagatgttatcgatgctggcggtttgtcctggggctgcaacgtcgccatcgggtctggtattgcgattacctatgcgggcacaggaagcattgtctgtgttactgcaattgagggagctgcacatggcacgttatacgcgtgtggtggtgatgtcgaacgtagcgcctgatattgttcgtcgagtgttggcgcatctcggtgtgaacggcgaggcgcgggtagtcgatgccagatgcacgttgcctgtgctgtgccggaccgctatatcgtcaataggggagatagacggctctgatgaggccttttattgcgaaccgcataacttgttgtctcaccgggaacgctacgtgctgggtaagacgctgcgtgagatatccatctataaccaagctcgccaggcgcagctcagcgccaaaaccatttatacgcatcgtgcccgtgcattattgaaactgggtgctccggatgttttgaccttgttgcgtcagtttacgccggtggcctatggacgtgatggattgcggtattaa

SEQ ID NO: 446856 - DNA, 1791 bp, Serratia marcescens
atgaaaaataaaattggcactgtaatatcaagcgcccccggaagtatttcggtggaaataaatggcctaagtacatttgagagtaacaagcaacacctacaaataggaaaatatatttgtatatcagatggaaatcttgattatgctatttgcaccatcaggaatataagtagcatcaaaaaagaaaataatgaaggggaatggatcttcacgctcgaaacaagccctataggggctttagttcaagaaacagaagggaccgtgtttaaaaaaggtacccctgtactccctgtcccctctgaagaagcttttataatgggtgaggcagagttcaattcaatttttaagaaaaaagataagtatgatttttacttagggaatttatcaggaaatagggatatagaaatatttttagatggggacagcttctttagcaagcatatcggtgttgttggttctactggttcagggaagtcctgcgccgtgacaacactactacaaagggccgtcggaataaaagacagtaattacgaattgttcccccaacaaaataacacacatattgtaatgttcgacttacactctgagtacaaatcagcatttacaataccgggagaaaaaaacaatttcactctaaacaatcttaatgtggaaaatttatgcctcccatattggatacttaactctgaagaacttgaaagcttatttattgaatcatccgagaacaacagtcacaatcaaattgccattttcaaaagagcaataacggaaaataaaaagaaatacaacaaacatcttaatgatgtaaactatgatactccctgctatttttcaatgagcgaggttgtagtttttattgataatgtggatagggaaattattggcaagcttgataatgaaggcaagcccaaaaaaagagacggaagcttagtagatgcaatagaaattgaatattttgagtcgagaattgattttgcacttcaatcctccgccaaggaatcaaaagcttcaaacgggccatttaatggtgagtttacacgttttgtttccagactagaaacaaaaatgagagatgaaagactgtcattcattttaaaacccagcaagtttaatggaacagatcctacctcatcaaacttccttgaaataataaaacaattcattggatactctaataaatcaaatatatctattattgacgtgagtggcgtgccattcgaagtgctaagcgtaactataagtctaatatcaagaataatatttgacttctgtttccattattcgaaaacaaaacattctatcggtgaaaaaaatgacattccagtcttgttagtttgcgaagaggcacacaactacgtaccagcttccgattacgccgcatacagagcctcgagaaaatcaattgagcgtatagccaaagaaggccggaagtatgggctgagtctaatggttgttagtcagcgcccatcagaagtgtctccgaccatattttctcaatgtaataatttcgttgcattaagactaacaaataaggcagaccaaaattatataaaaggtctgctcccagaaaatacaaactccatctctgatttcctacccagcctagcatcgggagaggctctagtagtcggcgacgcaatacttatgccttcaatagtacagttgaaaaaaccatcgccagagccacagtcagcaagtgtggatgtattcaaggaatggtcttgtgggtggagggaaccatcttttgatgacgtcatttctaaatggctcaagctcacaacacatccatag

SEQ ID NO: 446857 - DNA, 1215 bp, Serratia marcescens
atgtcccgaacagccgaagacacgataaagggttttatttatcaatttcataaaactgcgaagcaaatacttgaagctgactctgattcagaaataatgatcgaaggaaccattgaggatattgacattactgacgccgctggagatatcgtcgcaatacaatgtaaataccatgaaacaaaagaaagcttcacgccaagcctaatatataagccaatccttcaaatggccataaatgaattagaaaatccactattaaacattaattatgttctattcatccataccaaagactttcagtcacagaacggtagaaatttaaaaatagaagagtttgagtcagctctggggagtactcaagaaaaaataaaaaaactcgcagataaaatcccaacaaattttaataaagaagactttttaaaaaaggttaggatagattttgctccttcgctagatattctttctgatgagctaaagaaattactaggaatgattaacattacgcattctgatgtagatacaatactatatccaaacataataaattacatagcattaagttcagcacaaaaagatgaaagcctgaggaaggtaaaaaaaagcattgtgttagattatttgaagaaaacaaatgacacagcaataacaaagtggactttatctctaaaaaacagaaacaacctactaaaagccaagcgcttacagttaactggagctttaaaaacaaacagcagattgcgatgcttttacttcagaaaagagaatttacgagatttccaagatgaaatagtgatctttatttgcaattatttggataagtatcacttcaaagtcgctcatgttaaaacacctacttttgttattgaatgccactacgaagaattatgtgatattcaatatcgattacatcaaaaaaatgttagagccaacactggctacataggaagtagatttgatgggactgtattttatcgagaaccaatgtccccgtcaccaaaatcaaaagcatcagatagagagttccaaataagattgttatctgaacataactcccctcaagtcataaatagcagaaaaaatgacgacatttttatcgtggcagagaagaaaccagactacattgaccaacaagatgttcaaatatacttatcgggaattgagactagagaagaacttgaatatatacttagcatgagggaaacctatgaaaaataa

SEQ ID NO: 446858 - DNA, 174 bp, Serratia marcescens
atgcgctacaatgaagcgaagcaatgggcaaagtcattgacggaaaactatccgaggcaagaggttaagaaggtaagtgttaaaggaaggggttttgaagtgtcgtataaaggaggagtaactactttgaataacttcattgcgaagcataaaggcgataggaaattgggttaa

SEQ ID NO: 446859 - DNA, 2790 bp, Serratia marcescens
atgagcaatttcaacccgtcgcggcgccgctttatcaaaagcgccgtgattgcgggggtgtctgtgtatctcgcgcccctgtacagccgcgcctacgccgcgctgttcgagcaaaaaatcctccagtcacccaactgggatccgcagaccaaacgcgtccgtttccgtatcgatggccgcgccaaggtcatggggcagaaggtgttcgcgcgcgatatccgcgcggtggacatgccgcactggccgcagaaacaggcgcacgccttcattctgcgcgtcaccaaagccgaccggctgttcgaaggggtcgatctgtcgctgttgggggacgacctgcagccggatcgcctggtgacggcggaagatctggcgcgcgacggcctggccttcccggcgttctacggtgatgacatgctgctgccgagcggcaaaaccccggcctacctcggccaggcggtggcgatcctgatctatcacgacttcgcccgtttccgcttcgccaaggacaagctgaaattccgcgaagagaccatcaaatacggcgcggtcaccggcccgctggagcgcgatccctggggcagcttccgctatgtgcgggtgggaggcgatcaaccgttcgacgacgatcgcttctccagcctgaaggacacgccaatcttcccggtatcgatgaaaaaacatctgccggtgtggccggaagggcgcgagggcggcaagctggatcaggaaggcatgcgctatgcgggcctgatcgccgacgagatggcaaacccgccggccgattggctggtgatgtcacgccgctacactacgcagtcgatcgacacctcggcgctggagccggacaacgccaacggctggttcgacgccgagacgcaaacgctgcatctggtggtgccgacccagtcgccgcaggaagtggccgacgagatgccgcgcatgctggccaagcgcaacccgccggtgaaacagctgatcctgcacccatgctacaccgtgggctacggctcgaaagatcactacaactttccctattacggcgcagtggcggcgatgtacggcgacggccaccctgtgcgcctggccaatgaccgcttcgagcagttccagacggcgctgaagcgccacgcgttcgatatgaattaccgcatcgcggtgaatcgccagaccggcgttatgcagtcgttcctcggtgacatgacggcggacggcggcggccgcagcaactttaccccttcggtggtgatggtcggcgcgaccgcagcccaatcgatttactacttcccgaaaagcgatctgtcgtcggtcgggctggcctcgcgcgccatcgacgccggctcggcgcgcggttacggcacgctgcagagcatggccgccaccgagatgatggtggatgagctggccgccgagctgaagatcgacccgatcgaattccgcctgcgcaacgtgttgaaatccggcatgaaaaatacccaaggggcgatcccggccggtgcgatccgcgccgatgaagtgctggagaaggcggcgaagcatgagatgtggctcaagcgcgccgaacgcaaggccgagtttgagagccgccatcccggcaagcgctatggcgttggcttcggctgcgtgcagaaagacttcggcaccggggcggaaacctcattcgcccgggtggagctgagcgaagacggccgcatcacgctgcatcacagcggcgcggagatgggcaccggcatgtcgacctcgcagtcggtgctgtgcgcacagtggctgggcaaaccggccgacgaagcgcatttctcggtcaccgactggtcggtgctgccgatggtcaccagcggcgatccttacctgatgtcgcaggcagagcaggacaaactgcaaaccaaccctaactggacgccgagctactgttcgccgtccagcgccagcaactcggcctattacttctcgcacagcacccgcgaagcggcgcgcctgatcttcgatcgtggcctgtggccggcggcgatggcgctgtggcaggccggcatcggcggcggccaggcggcgccgctggtggtgcggcgtgaagatgcgcgttgggtcgagggcggcctgacggcggcgggcatgtcggtgctgagcctcgagctgctggccaagacggcctatcagatgggcggcgtcaccggcgcggcggtgcacgttttcaaccgctggcagtgggcggaggccgatttcacgctgaacggcaaaagcgaacgcctgccgatcgacggcatggcgctgcgcaacgccggcggtgaattcaaaccgctggcacgcgggcaggtctactacccgccaacccagcgcaacaatgcggcggtgacctactacagcgccgttggcacgctggcggaagtggcggtggatatcgccaccggccaggtggaattgctgaatcaccattcgatcatggagtgcggcaacctgatcgtgccggaactggtttccggccagctgcagggcgggctggcgatgggtatcggccatgcgctgcacgaatatttaccgctgtacgaagacggcccgggcaacggcacctggaacttcaaccgttaccacctgccgcgcgccagcgacgtggcggtgtggaaacagagcggcgacatcctgccggcgctgtcggaaaccgatccgccgaaaggcatggcggaggtggtgatgatcccgatcgtggccgcgctggtcaacgccatcgccgacgccaccggccaccgtttccgtgatttgcccgttcgtgcagaaaatattcgtgaggtattacaatga

SEQ ID NO: 446860 - DNA, 522 bp, Serratia marcescens
  misc_feature (487)..(496): n is a, c, g, or t
atgacgttaagtctggcacaactccgcgctgacacgccagggactgagcatgttattcattttaacaatgcaggagcaagcttaatgcctgtcccggttatacaggctgtgcatgaacactatttaaaagaaattaccctcggtgggtatgaagccgcagagagtgagcgccaatggcttagtgatatatatggttatctggcgaaaatgatccaggcaaagcctgcagatatcgcgcttgtggaaaatgctacccgggcctgggacatcgcattctactctcttcccttgcgccctggagatatcatcctgacttcgaccactgaatatgcaggtaattatataccttacctgcaacgacaaaaacgtgatggcattcagatcaacattctggaagcggatgaggagggggctgtttgtctgaagcaattacaacatgcccttggcaaccctcgggtcagattaatcagcctcccaatactgggannnnnnnnnntcatgggggaccaatacagccggtag

SEQ ID NO: 446861 - DNA, 1041 bp, Serratia marcescens
gtggccggagatgtcgttgctccagaagtccaggccgcaaagatcgctgctgcagacgcgctcggtcggtttacccttgtccagcaccgcgccgacgcccggcagatccaccacgaactgggtcgggccgtaagccacgcccgtcggatccggaatacggaattcttcgggaatatcctcgacggtcaccaacatgcccgggccgttgatggccttgcccaggttgatcatcccccagccgtagagcgcgtcgatgcccggcgcgcccatgtcggtggcggtggttttcagcacgtccgccacctgtgcgccattcaaatacgggaaacgctccatcagcaccgcaacgctgccggccacgtgcggcgccgccatcgaggtaccgctgtatttggcgtagccggtcgtcagattctccacgctggtgccttcaatcaccgagctgtacacccgggtacccggtgccgagacgcacaaactggcggtatagccgcagcgggaagagaaggtgctgatgctgtaatcgccggtattggtgggatcctgcaggctggcgaccgacagccagttcggcgcgatatccggcacgaaatacgccaggccggccatggcgtccgggttgttcaggttgtaatcgttcccggcggcgaagatggtgaccacgccgctgcgcgccgcgtcgatcgcgccctgataggcgccgccgggcttggtgcccaggataaccttgatctgatcgaactgcttttgcgcatcgtcgaccgtgaaatgaggataagcgggatctttgcctcccttggcgaatttatcggtaatgccgatgccccagctgttattgatgatgcgcgcgccgctggccaccagcgcctcccagccggcttggtaaaccgcaccgtcgttaccgagcacaatgccgtcctccgggccggggtcgccgttttctgcgctgatgatctgcgcgttgaacgccacgccgtgcatggcgccgccgtcgcggctgccggcggcgatgccgcccacgtgggtgccgtgcgagcctaa

SEQ ID NO: 446862 - DNA, 555 bp, Serratia marcescens
  misc_feature (529)..(538): n is a, c, g, or t
atgaagatttcactaatcgtacccgtttttaatgaagaagacgcaatccctatcttctatcatgccgtcaaagaaaatctttcccaatataaaatagagattctatttattaatgatggtagcacagataaaaccgaaagaataataaactcaatttcccatactgaccctgatgtcaagcccattaattttgttcggaattttggtaaggaagcagctcttcttgcaggttttgaacatgcctctggtgatgcagtgattcctattgacgttgacctccaagacccgatagaagtaataccaaaactaataaacaaatggttagagggatggccgatagttctagcaaagcgtatagatagaagtgcggatagtcatttaaaaagaaaaaccgccgcttggttctatcacttacataataaaataagctcacctaaaatcgaggaaaacgtaggagattttcggctaatatcacgtgaagccgttgaaaatattaaactattacaagaaaaaaatttatttatgaaannnnnnnnnnatgaaaggtattcttag

SEQ ID NO: 446863 - DNA, 582 bp, Serratia marcescens
  misc_feature (566)..(575): n is a, c, g, or t
atgtaccaccaggcgggttgcacccagctcttggagcttgcggcgtgcgcgggtcgcacgacggatacgagcagatttcttatccatagtgttaccttacttcttcttagcctctttggtacgcacgacttcgtcggcgtaacgaacacctttacctttgtaaggctcaggacgacggtaagcgcgcagatctgctgctacctggccaataacctgcttatcagcgcctttcagcacgatttcagtttggcttgggcattcagcagtgatacctgccggcagctggtgatcgatagggtgagagaagcccagggccaaattcaccacgttgcctttaacggcagcacgataaccaacacctaccagttgaagctttttggtgaagccttcggtaacaccaacaaccattgcgttcagcagagcgcgcgtggtacccgcttgagcccatgcgttagcaaaaccttcgcgcggagcgaaagtcagtgcgttagcttcttgcttcacttcaacggcgtcgtggatagtacgagtcaactcgccgtttttacccttaatcgaaataaccnnnnnnnnnngaaataa

SEQ ID NO: 446864 - DNA, 1350 bp, Serratia marcescens
atgatggcgaccaaccccagcaagaaccgcctctttttttctcgcaggcgaatgaccatggctgcattgatgttgatgagttccagtcaggtaatggcgttggatgccataggcattcacagccattttaatcactacccagattcgagtgatacctatctagccatgattaagcagtttgggtttaattcattccgctcggatctggcatggaactccattgaatcccagaaaggggtgttctcgattaatgatgcgggtaaccagaaagaggatctggcttttcagacaggtttctctcaatatgggctcagtgccttaatggtgctcggttatggtaacaagctctacagcaataatgcgattgatttcccaagaacgccagagcagatcgcagcattcgcaaactacgcggcttgggtcgctgcgcgctacaaaggaaaggtcaagtatttcgatatatggaatgagtggttgtatggaacagggctgacgtctaaaccccgtaatgttcctcccgcccaggtctatttcgacgtggtgaaagcgacatcggccgctgtgcgtaaagttgatccgaacgcggtgatactggcaggttcctttaacacgaataagcccagggacgtcgcttggtttgaagagctgatgaagttagggattctgaactatattgatggcgtttcaattcatccatattcacttaagttgcccgaagataatttagcgactatcgataaattcgaagagcttgccaagcgttatgccggtaaagaagtccctgtttatattaccgagatggggcaatccagttcgacagcaccggggtatgtctccgatgacgccaccgcgcagtttgttgtcaaatatacattcctggcaaaagcgcgaccttatatcaaaggattgtggtggtatgacctggtggacgatggccccgacgtcaaaaatcgcgagcaccgctttggttttgtcacgcagagcaatcaaccgaagtccatggcgttgcaattccaaaaaatcgccgaagttgctcgcgactacaaggttgaacgctaccagacgaacacggatggcaatgtcagcatatcattgagccatggcgggaaatatgctctgctcgcctggcagcaaacacccgttcaggctcaggctcctcagcaggatctactcaagtcagtaaagagttttgtgaagatggaaggcgataaaagcgaaggggcgatacgcatgattgatccgcatttccaggggcagtcattgtatgaagaaaagtctgccttgacgaaaaattacggcaatgtgcctgtattggtgcaatccgataagcctatcgcggcgccgcaataa

SEQ ID NO: 446865 - DNA, 2955 bp, Serratia marcescens
atggcttctctagcgtcacagcaagcggcagcggcactctactacgctgtcttgggtaagaatgcgtctcaatccacctatgattacttcggccagtatttgcagaccgggcaggccaccgctgcgcagctggtcaacgtattcctgaccggtagcgatggacaggcacgctttgctaccaaaacgcaagcggagatcctgacgcagatttacaccaacatttttggtacagcgccgaccagcgcacagctgacagatctgttgaatgtgggctcaaccacgacggctgtgtcccaactggtgactaatctacttaattaccaagggtttgatgcaacgactcttgctcagcaagccactttcgagaacacgattaacaccgtgctttacccagtcgcccaatcctccgcagcggctggcgcctctgcggttgaagccatttactatgttattggtgtcgatgcagcccagtcaggtattaactactggggcactcaaatggccaacggggcaaaccttgccaacgtagcccaggtatttgttaacgatcgcgcttatctgacctcattgaacaatacagactttgtcgcacgtctgtttgaaagcgccttcctgcgtgcgccaacttccagtgaatcttcaacctatgtggcgctgttggatggtggtgcaacccgaggcaccgtcatcgttgatattatcaacctgattaagggcaccgtcgccagtggcgatctggccgcgcaacagcaattcaacctcgcgacccaggtatacagtccaggccaattgccgggtttgagcttccaggaacaagtggcgtcgatttaccttgccgtgccgaatcgcggcatcgactcgcaggcactggacaccttcagtaaacagctggcctcaggcacgacgttcagtaaattgttgaccaccctgctagctactaatgagttccaggccaaaggcgcggcgctaagcggttctgccttcgtgaccaaggtattcacggatgtgtgggggtcagcaccgacaccaactcagctggcgacctacaccgcattgggcaacaataccgccattgcgcaagcgatcatcaatgatctgcgtagttctaccgctacggataacgcgaccgtcagcgcacaacacgcatttgaagacgctatcggcaccagcctgctatataaaactaacgccacgttgtccagcaccgccgccggcggtaacgccactggcaccatcaacaccggcagcagccatgtgctgagcaatgccgaaaccgctgttttgctcaacgttatcctgaatgctagcaccgccagcacggttaacctgcagttcgccgatcatctgtccaacctgacgatcaacggcacggcggcgtctaccgttaatctttccgccaacggcgtcaacccaggcgttgcggtatctgtcaataacggtaatgtaatcctgaacgccagctccggtaacgacgtggttaacgtcacatcaacagccaacatcgcaaccggcacggccaatttcaacctgggcgccggcaacgatgcgctgaaatgggcaggtaatgccgcagccaacagtccgaataccgtatccgccgcgatcaaagcggatggcggtgccggcacggacagcatttccgctaacttctttactaagtcggtagtgaccaaccaaaacgccttgggtattcgcaccagtacgatcagcagcaacgccaacaacttcagcaactttgaaaaaatcgatctgaccggctatatcggccagtccaccggtacgctgatcaccacgccactgatcggcagcccgaccactacaccggttaccacgccgtcccacgtttttgacttcggtctgctaaacggcaccgcaacggtagaaggtacagccgggggcaccgtcacccaggcaaccacgccgaccaatatgggttcgcagggatttgtcctgaatggcctgacgaacgccagcgtcatcaacgccgcaggcggtgccgcagccgcattggaagtgaatggtgatgcgactgcgtcgacaacgctgaacttcagcttcgttaacgccgcaacgcagtttggtatcaactttgacgccgtcagctcatctaacgtcaatgctggtgccatcggcctgaccggcagcgcgctgacggcactcaatatcgcttccggcggtaccggtagctttgcgaacgtgctgtcattggccggtagcaacagtgtgttaaccaacatcaacgtgaccggcgaccaccagttagacttaaccgtaggttcaggcttcacctttatccatgacatcaacgcctccggcaacagtggcggtttgaatctgacgaccagcaacggcggtacgggtgacggcctcatcgttcaattgctgaatatcctgccgttgagcgccttgacgacatcgctgttgacaccggtgctcaacacgttgggattgaacggttatcagatgaccgttgagggatccagcgccggcgatacgctgaacgttgccgcaaacaccacgttgaccggcggcgccggcgccaacacttacatgctgcaatccagtacctcgcaagcaggtaacaccattaccgacttcaataccgccaaagacaagatcatcgaccatctgtcaggcctgaccctgtcgaacacagggacagcggttgcggactacggtacccgttcggcggatatcctcgacggcgtattgggtagcttgctgggctcgttgaccggcggggtcgtcggcttgctgggcggtattctcggcttgagtacaggctcattgactgcgaaagtaggtgttgcttccgttgcctttgataacggcaccaacagcaactacgttattatcgataacaacaataaccactctctggatgctggcgacaccgtgatttatctgacgggtcaaagtcatgcaagtctggttagcgatctgcactatgcctaa

SEQ ID NO: 446866 - DNA, 1380 bp, Serratia marcescens
ttgattcgatttaaacgacaggttgctggccttactatcagtaccctattgtttgcgatatctgcgccagtttattccatagggattttagacgcatattcgctggcacttgacaaggatccgacctttagggcggcatttaaagagaaagaggcgggagacgagagcaaaaatatcggtatggcaggtttattgccgaaggtggcattaaactatcaaaattcaccgaaaaactggcaaacggtaaagtatccgcagagcaacatatttaccggcgagactatcgaggcgacgaacagccagaaataccgcagctactcaagttcggtctctgtgacgcagccgctatttgactacgaggcctatgctcgttacaaggcgggggtggcgcaaacgctgatgtcagacgagcgttaccgtgccaagtttatggatttggcggtgcgggtcgtgaccgcctatgtagaagttgcttacgcaaaagatcagatctctctcgcgcaagcgcagaaggccgcttatgccacgcagttaagccaaaacagcgagctgttgcgggcgggtgaggggacgattaccgatgtctccgaaacacaggcgaggtatagcctggcagaggcacaagaaatagaggctcaggatgccctggactctgccaaacgcgatttggaagtcatcatcggggctccgcttgagcagtacggttcgcttcagttgcttaagccgggcaaattccaggttgccccattgatcccttcgaagtttgaagagtggcaaaagattgccctggagaataacccggagttagctgcatcccgccacagcgtagatgcggcaaaatatgaggtcgagagaaatcgggccggttttatgcctcaggtgcagctttacgcttctcattctgaaaatgactccagcagcgataacaccgttaaccaaaaataccgtactgacagtataggggtacaggtcagcatgtcgctttattccggcgggggcgtagcagcttctactcgccaggctgcggcgcgttacggccaggcgatgtatgaaatggatgcccaggtcggggacaagctgaacgatctgcgtaagcaattcaatctttgtctgagcagccgcgcaaagttggccgcctatgagctggcggtgcaatccgcgacgaaacaggttgaagcgactaaaaaaagcgtcgttttggggcagcgggtcaacgtcgatgtgctgaatgcggagcagcaactgtactcggctcgccgcgatctggcatcggcaaaatacacctatattaaatcttggatcacattgttgagcgattccggtaccttggataagagcgatattaatcgtgtcgcgcaatactttgagtatgctcgttag

SEQ ID NO: 446867 - DNA, 1002 bp, Serratia marcescens
  misc_feature (941)..(950): n is a, c, g, or t
atgaaaattattgttaccggtggcgccggctttattggttccgcagttacccgacatattatcaataaaacgatggatcaggtactggtgctggatagcctgacttatgcaggtaatcttgagtccctaaaaccggtagcgggctctgaccgtttcagctttgaaccggtggatatttgtaaccgcagcgaattggaccgcgtgtttgctgattttaaaccggatgcggtgatgcatttggccgcagagagccatgtggatcgctctatcgatggcccgacggctttcatcgagaccaacatcgtaggcacctacacattgcttgaagctgcccggcaatactggcataccttaccggaaacagcgaaaaaggcatttcggttccatcatatctctactgacgaagtgtatggcgatctgtacggcaccgaggatttgttcactgaaactacgccttacgggccaagcagcccttactctgcatcgaaagccgccagcgatcacctggtgcgtgcctggttacgaacctacggtttaccgaccctcgtcaccaattgttccaacaattatggaccgtaccattttcccgaaaaactcatccctttgacgatcctgaatgcgttagaaggtaagccattgccggtatatggcgacggcgcacaaattcgcgattggctgcatgtcgaggatcatgctcgcgccctatacaaggttgtgacggagggcgaagtaggcgaaacctataatatcggtggccataatgagcgcaagaatatcgaggttgtgcagacgatttgtcggttgttggatgagctggcgccgatcaagccggcaggactgaataactactcagagttgataaccttcgtgaccgaccgacccggccatgacatgcgctatgccattgatgcgacgaaaatagacagcgagttgggttggannnnnnnnnncgacgaaaatagaccgcgagttgggttggaaaccccaagagaccttcgatag

SEQ ID NO: 446868 - DNA, 870 bp, Serratia marcescens
atgaaaggtattattcttgcaggcggttcaggcactcgcctttaccccatcacccgcggcgtgtcgaaacagctattacctatttatgataaaccaatgatttattatccgatctcggtgctgatgctcgccgggattcgcgatattctgatcatctccaccccggaggatctgccttcgttccggcgcctgttgggcgatgggcagcgttttggtatcaaactcagctatgcggtacagccgagtccggatggattggcgcaggcctttttgattggcgaagagttcattaacggcgagcgctgtgcgttggtcctgggcgataatatttactttggtcagagtttcggcaaaaagttggaaagcgttgctgcacaggaggaaggcgcgacggtattcggctaccaagtgatggatcctgagcgtttcggggtggtggagtttgatcagaactttagggcgttatcgctggaagaaaaaccaccggtgccaaaatcgaactgggccgttaccgggctctatttctacgaccgccatgttgttgaattggctaagcaggtaaaaccttcggcccgcggcgaattggaaatcaccacgctgaatcaaatgtatctggaacgcggggcattgaacgttgaaatcctggggcgcggttttgcttggctggataccggcacgcacgatagtctgattgaagccgcccagttcatccatactatcgagcatcgtcaaggctttaaagtcgcctgtctggaagagatcgcctacagaaaggggtggctcagtacagaacaggtggcgcaagaggcaaaattattgagtaagacccaatacggtcaatacttagcgcaactgttggtggagaagtaa

SEQ ID NO: 446869 - DNA, 534 bp, Serratia marcescens
atgcaagtgagcgatacccgaattcatggcgtcaaaatcgtccagcctaaagtgtttggcgatgcacgcggtttctttttggaaacgttcgaaaagaaacgttaccaagaggcgctggatatagagttcgagtttgtccaggacaaccattcgcggtcttcaagaggagtgctgcgtggcttgcattttcaaacggtaaaccctcagggaaagctggtgcgcgtcgttcgcggtgaagtgtttgatgtcgtcgttgatattcgtaaagactcgcctagctacggtgcctgggagggcgtcgtgctttccgaagagaacaagactcaattctggatcccgccaggtttggcacatggcttcgtcgtgctctcggatatcgctgattttgaatataaatgtacggattattacaatgccgcgcatgaaggatgcctgctgtggaacgatcctgatgtcggtattgagtggcctctcgacaatccactgttatctgaaaaagataaacagggcaattttttcaaagcgttgaagtaa

SEQ ID NO: 446870 - DNA, 2130 bp, Serratia marcescens
atgtcagaaaagaataaattgcctagtggttctgcagagaggcctgaagaaatcgacttgcgccgcctgctgggggaactggtagacaacaagtggctgattgtcggcatcaccagcctgtttagcgtgttgagcttgctgtacgttttatttgcgacaccggtatatgaaacggatgcattggtacaagtagagcgtaacgttggcaatacgctattgacggatatttcttccattcttccagacagtcaaccgcaaagtcaggctgagattgaactgattcagtcacgaatggtgatgggaaaaacgattcaggatcttggcctcgaaacgagctccgtggtgaagtatttccccattttcggccgcggttgggctcgattgatggatgaagagccggccaagatcgccttatcgcgcttggtagtgccggagaagtggttgaatattccgttggaactcaccgttggcaaagaggggcagtatcagcttactgcggatggttcaactgtgctgaatggcaaaattggccagttggcgtcaggcaatggtttcactttactggtcagcgatattgatgcggatgtcggcactactttttatgtcatcaaacgcaccccgctcaatgtcatgcaggaaatgtccaaaaacctgacggttgcggataaaggtaaggataccggcgtacttgggctgacctatacgggggacgatccggtactgattcaaaaaattctgaacagcatcgcgcaaaactatttgcagcagaacgttgagcgtaaatcggaagaagccggtaagagtctgaaattcctagagctgcaactgcctaaagttcgcgagcaactggagattgcggaagacaagcttaatagctatcgccagcgaaaggattcggtcgacatgtcgcttgaagccaaatcgttgctggattcggttgttggtgtcgaatcggagctgaatcagctcaccttgaaagaagccgaaatttcgcagctatataccaaggaccacccggcatataaagcgttgatggataagcgccagacgcttaccaatgaacgggatcgctttaataagcgcattagcaccatgccggcgacgcagcaggaaattctgcgtttgactcgtgacgttcaggctgggcaagaaatttacatggagctgctgaataagcagcaagagttgagcatcagcaaagccagcactatcggtaacgttcgcattgtcgacagtgcgatcacgtcgccaaatccggtatcgccgaagaaaacgttgatgatcctgttattcaccttcctgggcgctttgatctcctccggggtggtattcctgcgtgcattgttgcacaaagggatcgaaacgccggacgagcttgaggagttgggaattagcgtttatgccagcatccctatttctgagactcagcagaaaaaggatatgctgttcagccgcagcaaaggacgctccaaacatagtgacatgctgttggcattggcaaacccggctgatttggcggtggagtcgattcgtagcttgcgcaccagcttgcacttcgccatgttggaagcgaagaataatgtgctgatgatttcaggggcatcgccagaaattggtaagacattcgtatgtagtaaccttgctgccgtgattgcccaatccgggctgaaagtattgctggtagatggcgatatgcgccgtggccgtgtgcatgaggtcatgcatgtgtctaacgataaagggctgtcggccgtgttgtccgggcaagttactatggaggaagcgctgtgcaaaacggaagtcgctaaccttgacttcattccgcgtggcaaggtgccgccaaacccttcggaactctgggcgcaacagcactacgatctggtgctggtggatacaccaccgattctggcggtaaccgatgcttctattgtggggcgtcatgctggtaccaacatgatggtaactcgctttggtgtgacgacgcagaaagaagttgaggtgagcatgtctcgctttgaaaacagcggcgtagagattaaaggggttatcttcaacgccatcgtgaagaaagccagcagttactacggctatggttattataattatggttacgaaagcaagtcagaataa

SEQ ID NO: 446871 - DNA, 438 bp, Serratia marcescens
atgaagtttgattccattctggtcatttgcgttggcaatatttgccgctcgccaacgggagaggcgctgttgcgtcaaatgcttcccggcaagaaagtggcctcggcaggattgcaggcggttgtgggagaaggcgccgacgctaatgcgaaaatcacagccgaaaagcatggggtatcgctggacggacatgtcgcgcgtcaactcacatcagcactatgccgtgagtatgatttgatattggtgatggaaaaacgtcatatcgatatggtcggcaatatcgctccggaagtcagaggaaaaaccatgttgttcggccattggatggggcagcaggaaatcgatgacccctatcggaaaagtttggaggcctttgaatatgtttatcaaatgttgtccaactctgcgagtaaatgggccaaagtgctagcttcctaa

SEQ ID NO: 446872 - DNA, 1134 bp, Serratia marcescens
atgaaaactaagcgagtcgccgttctgatcgctagtgcgctgctcgctggttgtactatcgctcctggacagcatcttagtaccagcaacaaggatgttgtccgacagcaggatgaagatttcgatctcaacaagcgggtcaacgtttatccgatgacgccaaagctgctcgagagtttgcgcggcaagccggtgatcgcccaagcgaacccgcagcttgatcgtgagctgaaagcgcatcagtaccggatcggcatcggcgacgtattgatgattaccgtatgggatcaccctgagttgacgacgccggccggtacttaccgcagcgccagcgatagcggcaactgggtccatgcggacggcaccattttctatccgtacatcggcaaggtaaaggtggtggacaaaaccgtggtggagatccggcaggatatcgccaatcgcctggccaaatatattgaaagcccacaggttgatgtcagcatcgcggctttccgttcacagaaagtctacgtgacaggtgaggtgaaaacctcgggtcaacagcctatcaccaatattcctctgaccattctggatgccatcaatgccgccggtggtttgacggaaaatgccgattggcgtaatgcggtgttgacccataacggcaaggaaatccctatttcgctgcaggctttgatgcagaacggcaacttgcaggaaaaccacctgctttatcctggtgatattctctatgttccgcgcaacgacgatctgaaagtctttgtgatgggcgaagttaagcagcaatccacgctgaaaatggatcgtagcggcatgacattgacagaagcgttgggtaatgcctccggcgttgatcaggccatgtcggatgcgaccggtattttcgtcatcagaccgctgcgtggcagacagccagaaggcaagattgccgatatttatcagttgaacgccagcgatgcgacggcgatggtattgggaaccgagttccagctacagccatacgacattgtttatgttaccaccgcaccaatagttcgctggaaccgcgttattactcaactggtgccgaccattgcaggtgttcacgatatggttgaaaccgtgcgttatatcaggagctggccgcaatga

SEQ ID NO: 446873 - DNA, 789 bp, Serratia marcescens
atgggaaccatgacatcgttcatcaactctggcacgttgatatttttcgctattgtttgtctcctggaaaccaagttgtaccgcggttggaagaaattggtcatgtttgccatgctcgtagcggcaatggtgctgacgacctataaaacgacattgctggcgattgcgctgtattttggcgtaaaagcggtatatatgatgtttagccgcgtgcgcggcgcaaaaatgatctatttctttgccaccgttgtggtgttcacggcgatgacctacgtctttaacagcatggacgtctataataaactcgccttcacgcggtacaaggatgtggcttataactctatctacattcgtgttttacaacatgctgatattatcagggatatggagggtcgtggccagttctacaccgggttgggcgttggcgtaaacgggacttcagggccgagtgaagatctaaaggtgaacagtaaggcgctggatagcacttacatttacatcatgagcaattatggctttattggcgtgtttatctatgtctccacggcgttcctcatcttgctctacctgtgcctccaggggcgtgagaacgataatatcgcgattgttcttttattctactcattgtcggttgagttctttaccaacaatattttcgccaatttcccctgtaacttgctcatgtatacgctggtgtatctttcgatgatttattgccggccgcaggtcgtcagggagaaaaaaatgccggcgataaaaagtgctcctgggaacatgttgggggcgtaa

SEQ ID NO: 446874 - DNA, 762 bp, Serratia marcescens
gtggcggcggggatcaaggaaattatcctggtcacgcactcttccaagaatgcgatcgaaaaccatttcgatacctctttcgaacttgaagccatgctcgaagccagggtgaaaaggcaactgctggacgaagtgcagtccatttgcccgaaaggcgttacgcttatgcatatccgtcaagggcaagcaagggggttggggcatgcggtactgtgcgccaaaccgctggtgggcgatcacccttttgtcgtcgttcatccggatatcttgttggacgatgccacctcggatgccaaaaaagataaccttgcccacatgatcgcgcgttttgaaacgacgggcgttagccaggtgctggtgcaggaaatggatgccgctcttttgcggaattactctgcggtggcgtgtgaaaatccggatctgcagccgggagacagcagtcgcatgctctccatcatcgaaaaaccggagcctgaagttaaactcagctcaaatttttccgcagtaggccgatatgttttatccgcggacatctggccagtattggaaaggacggcacctggtgcttgggggcgcatacagctcaccgatgccatttccggactgctccgggataaagccatcgatgcggtgcgcctggtgggggagtcgtttaactgcggcgaaaaaatgggttacctgagggcgtttgtcagctacgggctacgccaccctgtgcagggggaagcgtttcgcaaatggctggcggaattcgtagcgtaa

SEQ ID NO: 446875 - DNA, 846 bp, Serratia marcescens
atgcttcccgccacaaaggcgattccgaaagagatgttgcctgtcgtcgataggcccttgattcaatatattgtggacgagtgcgttgcggcagggatccgagatatcattttggtcacccactcgtcgaaaaacgcgattgaaaaccattttgacacttcttttgagctggaggcgatgctcgaatcccgcgtcaaacgccagctgttgaaagaggttcagtcgatctgtcagccagatgtcaccgttatgcaagtgcgccaagggcaggcaaaggggctggggcatgcggtgctttgcgctaaacctatggtgggcgacgacgctttcgtggtggtcttacccgatgttttgcttgatgatacgacgtgtaatccgctgcgtgataatttggccaaaatgatctcgcgttttgagcaaaccgcagtaagccagattatggttgaacccgtgccggaacaggatgtatcaaaatatggcgtggttgactgcggcggcgttgaattgaacgccggagagagtgcggccatgtcagccattgtggaaaaaccggagcgcgacgttgccccctccaatctggccgtcgtggggcgttacgtgttgtctgccgacatttggccgttgttggaaaagaccccgcccggggccggcaatgagatccagttgaccgatgcgattgctatgttgatgcaacggcaaaaggtagaagctttccatatgagcggtaaatcacatgattgcggcgacaaactgggttatatgaaagcatttgtgcagtacggcgtgcgccatgcgtcggaagggcaagccttcaatcagtggttgaagcagaaaattaaaggctaa

SEQ ID NO: 446876 - DNA, 960 bp, Serratia marcescens
atgttgctgctgtacaaaaatgatccaagcctgaacgtgctggtcaaagagctacgcccggacgtcgaagtgacgtatctgaacatctccgggcgggccagattctctttcccaaaaattttgaccgggatccggcgagtctgccgggaaaaaaatgtcagcacgctgttcatcagttcaggaacatccaatgcggttatttcacctttcttgttcctgttcggcaagcgagtgaaaacaattgcgcgagagtcgaacttgccgagtttgtttgaaaagagcgcgatcgttaagtttctctatcagtacagttacaagaattatgacaaaatcgtcgcgcaaagtgatgatatgcgtgaagatttgattaaaaacttccaaattcctgccgataagatagttaaaatcaacaaccccctcgattatcgctatatcaacgcattatcgcagcgggacggtgaaccatgtttcaacgagaacaagattaacctgttgagcattgggcgactgacataccaaaaaggtttcgatttactgctgaacgaattcgccaaggtcgacgatccgcgctatcacctgactattatcggtgagggggaggacaaggccgctttacttgccttacgtcggcagttgacgttggaggagcgggttacttttatcgatagcacggataatccgtatcgcttcatgcggcaggctgacgtgtttatttcgagttctcgttgggaaggatatccaaacgtcgtcattgagtcgctgctgtgcggtacgcctgttttggctaacaactatccgggtggaatcaacgaaatcatcgacagtgaaaacggccaggtttgcgatctgacccgagatttttcgtcggctctcaagcatgtcagcggtttgcgggatgtgagtttcgacgtgaaaaaggttgatgaaattttcaataaatataatgagctggttgattaa

SEQ ID NO: 446877 - DNA, 798 bp, Serratia marcescens
ttgcatccgcgcgtaaccgaatctcgcgcggattttaaaagcatgttaagagccgccaagtccttcttgcgagtgagcttcggtaaatataatactaatccttcttttaatacgccagttaaaagacgaatcactaaaaaagagctggaagatttttgcgtagtttatcctgagaacattagcggtaaccctatcgggggcaaacaggttgtccgttggtttctgcatcaccctggctatcattcaggccaggtaaactatttttcaggtgagttgtatttttcatacgattcctttggcagcgacttcgccatccatggttcgaaaacctctgagcatcctctgcgcgtcacgcacttctttgacgaatattataatgatattggtacagagaaagagcgaacggctgtcgcctactgtttacgtaaaggtaaagaccgtgagatggttcatgatgtggaccgttcaacgttgattgacggcctctctcaccgagaagtggcctctattctgcggcgttctgatatttttgtcagctacgatctttatacggcatatagctggtttgccattatgtgtggttgtgtaccggttattattcctcaaccagggcttagtattgaagagtggtatcccaactcacagtctagattgggatttgcttatggctttgaccaaatagaacaggccagagcggagatggaatcagcgaagaaaaacttgaaaaacaaagaaattgaaacgatagaaaacgttaaggtatttttggcagaagttgaaaactatttttcaaaatga

SEQ ID NO: 446878 - DNA, 1029 bp, Serratia marcescens
  misc_feature (596)..(605): n is a, c, g, or t
atgaaaaagaataatggtccatttcatcaacgactggaaagtgagctttgcgattatttaggcgttgagcatatttctctattcaataatgcgaccatcgctttgattacggcgcttcaggcattgcgtatttctggcgaagtgatcaccaccccttactcctttgttgcgactgctcactctattctttggaatggtttgacgcctgtttttgttgatatcgacagcgatagttacaatatcgatcctaaaaagattgaggcggcaattacgcctcgaacctctgcaatcatgcctgtgcattgctattctaatccttgcgccgttgaagagattcaaaagattgcagataactacggtttgaaggttatttatgatgctgcgcatgcctttggtataaactacaaaggtgagagtctgctgagatatggtgatctttctatcttgagtttccatgccacaaaagtatttaatacttttgaaggtggagcgatcatcagccctgatgcaaaaaccaagcaacgtattgatcgcctgaaaaactttggtattgctgatgaattgacggtaacggctcctggaattaatgggaaaannnnnnnnnngagtgagatcaatgcagcctttggtttggtacagctgaagtatatcgatcaagcaatcaaaaagcgcaaagagattgatgaaaaataccgtcaagtgctgtcgacagtgaagggcattacgctgtccaaattgtcacctgactccaatagtaatcattcttattttcccgttctgatcgagaaagaatttccactcactcgtgatgagctctatgataagttgaagaacaacaatattctctccaggaaatatttttatccattaatcagtaatatgccaatgtaccgcggctatgcctccgctgctcctgagaatctgaagcatgcgaacaccatctctgataaggtgctgtgcctgcctattttcgatgcgctggaagatgacgatctgaatctgatcattactttgatcagggagtgctag

SEQ ID NO: 446879 - DNA, 306 bp, Serratia marcescens
atgactaaagccaccaacaaggggctgcaggtaaccgttgaccctgagatttcccgcgagctggcctacatgctgaagcttcagcagacctgtggcgccgccgttcggtatagaatgtcaacagccttatccattacattctggcaagcatcgctgatggtagcagacatccgggttcatgggagcgcggaatattggtacagctgggattggtcgctaatggcgacgaacatcaggtataccgggctcactatggcgagcaagcccactaaggacaggatcagcgtcctggccatcatgaggtaa

SEQ ID NO: 446880 - DNA, 1530 bp, Serratia marcescens
atggtcctgggactagcaatagcggtaggtgttcttgctgttttattcgtggttatgattgcgatgcatattttattgaagaaaaagcatgcaatcgaacttttacgttacagcaagattgttgatcttgaagaagaagcacgaaaaatgaaaaaggctatggatgatgaagaaaagtccagccgcaacgctattgataaagaagtgaaagacaagcgtactgagatagatagtgaagtgaatgaaaaacgccaagcgatagataaagaggttaaagataaagatgcagatatacagaggcgtgaaaaaatagcgagagagctcattgcgtctcaggagcaagagctaactgacttaaaaaaatcgtataatgaaaaacgccagctcttgttggatctctctgcaaaattagcagaagttagtgattccgttgatatgattgattatggtatgtataaaccgcgtttcgactaccatgattccaaagctttccaggaagccattagttacaataaagaaaggcagaaaagtctaattcgacaagatgctgcttgtgactttaatactagttgggaggtgaatggtagtaagtctgaaggtaaaaaaatgatcaagcgttatgtgaaattgctcgtcagagcattcaatagcgagtgtgatgccgcgataggaaaaattaaggcgggtaatgttgagcaacttaaaaaacgtattgaaagcgcttttgatgcactcaataaatttggacaatcaatgaatataagtataacttatgattatctgaatttgcggctggaagaattgctgctttgccacgaaaaagaacttaaaattcaggatgagaaagatatccttagagaagaacgtgaattgcaacgagaggaagagaaagcacagcgtgaatacgagaaagctattcgcgatgaacaaaaggcagagaaagacttccagaaggtaatggaaagagcaagaaaagagcttgaaaaggcaaatgctgaagagaaatcccgtattgaagccaaaattgctgatcttgaacttcaggttgaagaggcaagggctttgtctgagcgcgcaaaatctcaggctcagttaactcgaagcggccatgtctatgtgatttctaatattggagcgtttggagagaatgtctataaaattggtttaactagacgacttgaacctgaagatcgtgttaatgaactgggatctgcatcagtgccgtttaaatttgatatccacgcgttaatttactccgatgatgcaccagcacttgagaccagcctgcataatgaattttcttcgcaccggataaacatggtaaataatcgcaaggaattctttaaagttaatctatcagatattgaggtaaaggttaaatcacttggttttgatgcgtcatttacggagtatgcacttgcccctgaatatcgtagtacgctctctattttgaatgcaaaagacaaagcgaaattaattgcagatgcagtagagaataaagttgaagagttgttccccgaaatggcttaa

SEQ ID NO: 446881 - DNA, 663 bp, Serratia marcescens
atggactatagcttcagcggcaccgagtcatggcaacatgggaatgcaaaaaagggtgacaaccaatatttgaacctgcgcagcggcgcaaatttcggcgcctggcgattgagaaactacgctacctattcaagccagagcagcaccaagtggaaaagcatcaatacctatgccgaacgtagctttagagatagcaaaaaccagctggtgatgggcaacagctcgacctctggtgacgtctttgacagctttcaattccgcggcctgaaactcgccagcgatccctccatgattcctgacagccagagaggatttgctcccacagtgcgaggggtggcgcaaagcagtgccgaggttcttgtaaagcaaaatggctacatcatttatcaaacccatgtacccgcaggcaattttgagatcacggacatctaccccaccacgtcaagcggtgggctacacgttatcatcaaggaggcagatggctcagaacgcagcttctatcaacccttttccgctgtacccatcatgcttcgggaaggaatgaagaagaacgaattaactctgggtgaatatcgcgctgcacaaaacgatcgcccaaattataaatttcttcagcaatcattaatttatggcctccatgacgataaaacgctcggcgcgtga

SEQ ID NO: 446882 - DNA, 870 bp, Serratia marcescens
  misc_feature (844)..(853): n is a, c, g, or t
atgagtgatgaactagatgatttgattattgaaagcaatagggaacaagttgaaagcgctggtaacgatatagatgtcggtgagctagttgtttattccagagactggacggtccaaacaattctccatcaaattgaggaggggaatattgatttgaatcctgattttcaacgaagaaatgtatgggacaatgataaaagatcaaaacttatagagtcattgcttgtgggttatcctgtgccggaagtagtgttggctgaggttataggtgaaaagaagaaatacatggtcattgacgggaaacagaggttgttagcgataaatggtttcattgaccccagttttaatacatgggatgctaatgctaagttaaagaatttaacaataaagaaatcaatcgaaggattgaggttttctgatttctctaaaaatgatgccagatacttactcaatgctgatctacgctgtactatactttcaggctttaaggattatagtgtcctatatgatatattttatagactaaatactggctcttcaccactgtctatgcaggaactgaggaactcgatatacaaaggtgattttagtaacttcattacaaggcatacagataacgatttacatctgcataagataatgaagcttaaatcatctgataaaaggtatagagatgttgagattatactgaagtttttggcattaaatctaaacccagagaaatacaatggctctcttagggtctacttagataactttacccaatttatgaatgataatttcgcatctaaagaagccggtgtatctggttgtcttgacctttttgatgaatcatgtggtgtgnnnnnnnnnncttgtcgaactttttga

SEQ ID NO: 446883 - DNA, 246 bp, Serratia marcescens
atgatgcgctgtcctttctgccgcagcggcgcacatacccgcaccagccgctatctgacggaacagaccaaagaggcttattaccagtgccagaatattgactgctccagcacctttaagacgcgagagagtatcgaacacgtgatccgccagccattgccgccacaaccgataatggctccgatattaccaccaccggaacgccaagtattgaaccgttacggcaataataattttcttcattga

SEQ ID NO: 446884 - DNA, 351 bp, Serratia marcescens
atgacgctggataacggttctgcctcctgcattccactggaagtgcgcaccgcgctgtttcgtcgcgcagtggccgaagcctatctcgccgcctgtgcggcgcagggcatgacgcttccccacacgctggacagcctgcagatgctgattgccagcgacatcgaagcgctgtttgtgaagctgcacggcgttgacgaaggcatggcgattgcctgttcgttgctgggcgacatggtggccccggacattctgctggcggcaccgcaactcacggcacagggctgcaacatcatggcggagctgtgcggcgtggcggtcacctccggccatccggcaccgacgctgcattaa

SEQ ID NO: 446885 - DNA, 657 bp, Serratia marcescens
atggataacggcaagctggtgggatgccttactgctagagagatatctgaaattatagaagcggaaaatacggagagagcccaaagacaaggagccaaccttccttttgataaaccctatcttgatatgtcaccttttcagctttggaagaagcgctgcgtatggttgctgctactgtttgtcgcagaagcttacaccagtaccgttattcagcactttgaaggtgctctggaagctgcgatttctctggctttctttattcctttgctggtcggcactgggggtaacagtggtacacaaatcacttctacgatagtccgagccatggccttaggagaggtacggctacgaaatgtcgggaaggttttacgtaaagagatgacaacatccattatggttgcactgacgttggctagcgccggtatgtttcgtggctggatgatggggataggctacgaggtaacacttgtggttagtttgactctaatatgcataaccctctgggctgccattgtatcttctacgatacccatgatactaaaacgcatgagtatcgatcctgctgtcgtgtctgctccttttattacaacgctgattgatggtaccggtcttatcatctatttcaaaatagctcagtggacccttgggctagattga

SEQ ID NO: 446886 - DNA, 267 bp, Serratia marcescens
atggtgccgttggaagccatgagctatggattaccggtaattgccagcaactgcacctcttttcctgaaatgattgaagatcgccgtacggggctgctctttgatctgcaacagccggaaatgctcgtccgctacttaatcgatacgcctaaagaggattggaagcgcatggggcaggaggcaaaacagctgtttctgctcaaatttaccgctgagacgatgattggcactacggcggctctttataagaaggttttaggcgcttaa

SEQ ID NO: 446887 - DNA, 1413 bp, Serratia marcescens
gtgaaaatgttgccaattatcatggcgggcggaagcggtagtcgtctttggcctctgtccagagaacatttcccgaagcaatttctagcactgcatgatcaccagtccatgttgcaaatgaccatagagcggctggggggattagaggccgggaatcctattgttatttgtaatgagaatcatcgctttatcgtagcggaacagcttcgtcagattggacaactatcccacaatatcatattggaacctattggccgaaatacggcgccagccgttgcccttgctgcgctcagagccgtgagtgacggcagcgatcctttgctgctggtattggctgcggaccatgtcatcacggatgctgaagaatttcaacggcaggttatcagggcgatgcctttcgctgagcagggcaagttggtgacgtttggcattgttcctcatgtacccgagaccggttatggttatattcgcaccggtaaactgatggatgatggggtactggcgcaggtagctgagtttgtcgagaagcccgatttgccaacggctgagcagtatgttgcctcgggcgaatacttgtggaatagcggcatgttcctgtttaaagccagcacctatcttcgggagctaacccgtttttgtccggaaatcgtcacctgttgcgaagcgtctttgcaaaatttggcggaggatatggactttgttcgggtcgatcgtgagattttcgccacctgcctggacatgtcgattgactatgcggtgatggagcatacgcaagatgccgttgtggcacccttggatgctgggtggagcgacgttggctcatggtcggcattatgggacatcagcgagaaagacggcctgggtaatagtataagtggcgacgtcatttgcagggataccgctaatagctatattcgttccgagcataagctggtggcgaccgtaggtgttgaaaacctcatcgtcgttgaaaccaaggacgctattctgatcgcaaacaaagatcgggttcaggacgtgaaatcggtcgtggcagatctgaagcttcagcagcgcagtgagtatttgcagcaccgagaaatctatcgtccgtgggggaaatatgactccattgatgaaggagaacgctataaggtgaagagagtgacggtaaagccaggagaaggattgtcgttacagatgcatcatcatcgtgctgaacattggattgttgttgccggaacggcaaaagttacgcttgatggccaaacgagcatcgttgctgaaaatgagtctatttacattcccctcggcgctgcacattctttagaaaaccctgggaagattgcattagatattattgaagtgagatccggtgcctatttagaggaagatgacattgttcgtctcgaagatcgttatggccgtgtttag

SEQ ID NO: 446888 - DNA, 1320 bp, Serratia marcescens
atgttgctgagtcaggctcttgataccgttcttaaattctcccccaaagaattcactgcgctttccgacttgctctcacctgagcttatcgatgaatgcctcgctgataccgggattgtgactctccgaaagcgccgtcttcccatggaaatgatggtctgggccgtggtcggtatgtccctgtttcgctcgctttcaatgaaccagcttgtttcccatctcgatatcatgctaccggggagacgtccttttgtagcgcccagcgccgtagtacaggcgcgccagcggctcggcgaagaggtcgtcaggctggtgtttgaaaaaacacgtcaactctggttcgaaaagaccccgttatcgcactggaatggtctgacactcctggctgtagatggcacgttgtggagaacgcccgatacgcccgaaaatgacgcagccttcggacgcaccgccaatgagcacgcgcgttccgactggccgcagcttcgcatggtctgccagatggaggtcaccagtcacttgctgacaggcgtgagcttcggcagcgtctcggaaaccagtgaggttgaccttgctgcacagttggcagagcagacaccggagcactcgttgacgatactggataaaggtttttatgcgctgggactccttcatcactggagcgcctcgggagcggagaaacactggatgctcccactgcgcaaagacgcacaatatcgggtacgggagaggctgggtaaggggcaggagctcgttgagttgaagttaagcccgcaagcccgcaagaaatggccggctgccccggaaatgctgatagccagactgataagcaaagaggttaatggcaagaaagtccaaatcctgacctcgatgtgcgatccgctacgctaccccaaagccgatatcgtcgacttgtatgggcatcgttgggagatagaacatggcttcagggagatgaagcagtatctgctgcagaacgaactgactctgagaagcaaaaagccggagttggtcaggcaggaactgtggggcgtggcgttggcttataacctgctgcgcttcatgatggcgcagatggctaacagcctgaagcatgtagagccttatcaaatcggttttaagcaggctgcgttatatctgacggcccaactgagcctgcttccggcagttgccccagggaaagtcccgaagataatgaatgatatcctggcaatggcggggagcttcgtacttccttctcgacggcaaaggcattacccgcgggcagtaaaaaagaagccgcaacgttatacgttgcggcttcctcaaaagcttaactga

SEQ ID NO: 446889 - DNA, 618 bp, Serratia marcescens
  misc_feature (341)..(350): n is a, c, g, or t
atggaaactggattggatatgagaagtgcagcttacttcagattaaatgaaaaccataggaatactgttgaaatagcagctttcgcagcttcaataactcatggattaacggttgacgatgatggaagtatcagcgactttaggcaaactacaagacatggaccaaagccgatagtatgtaaaggattatattctcagcagcttgaatttgcaattaattacattaaacaaaatgttaatttagaagctgaatctgtcgctttcctcaagcctaagggtgggaattggttttctgaagttgaaaggcaattaaaagctcataatctgccttatataataannnnnnnnnngcctacaggtccagagaatatagcactttctacgatgaattcagcaaaagggcttgagttcgatcatgtcataatattgggccttagtattgcgaatatgcagcatcaagataatgaacatgatgataagttgcagcaattaagaaggcttcttgctatggcaattagcagggctaaagaatctgttgtaattggctataaagaatctgaaaagtcagatttagtagactattttacgcacggaacttttgatgaggtaaatctttaa

SEQ ID NO: 446890 - DNA, 309 bp, Serratia marcescens
atgttgaaaaaaaaagcgaagtacttgtgtgtttttctgtccattatatccatgtcatcttttgctggtgagtataaggagaaaggatatgtcgattgggtgaatgctgactatagcggttattgtacgggaatgttaaaatttaaatctcatccgaaagatcgtcagggttttactttcagttgtgacttacacatgatgagtttactaaaaatagcacaattaacggggcaaaaggttgagttagcgctggaaggcaatggcgctgagtataaaccggtttatgcagtttctcttttcggtcaatag

SEQ ID NO: 446891 - DNA, 612 bp, Serratia marcescens
atgtgcgaacggcgctgcagaaccttgctgaggcgttcaatcattacaatgaaaaccatccgcacagcgcactgggatatcctccccgagagaacaccggcgcctgcgggcattgttaacttaatatacaaaagctgtctggagatagcgggtcagatcaccttcagtgtcaatgcccagagcgaggaatacggctttgttaatcacgctgccagcctgacgaacccccaccacgatacagtcaagataaacaatgggatacagtgcatcaagagacctattttaccactttgtcacctgttctttaactgcatcggtgactttagatatcagcgtgggagacacgcccgtatcgtacatttccttgaacgtggcgacgatttcgcgggtgatcatgcctttggcatagaaggaccaaatctggatgtccatctgcgcaatacgcgtctggtaactgaggttcaaaggtattttcacggtcacgcggggtgttcagctcgctctcgccgtcatcactcagcagcatttttgacgcgtagccattgcgggtatttgagccttttttgggcgcgtttttctcgtgtccgaggtgctcgcttagttctgcattga

SEQ ID NO: 446892 - DNA, 657 bp, Serratia marcescens
atgtggcctacaaaagtaagagaagacgcgttagttgcatgtggaagacattgttgtgtttgccacagattctgtggaagaaatatagagctacatcatattgaaatggagtcaaaaggcggctcgtcaacttttgaaaattgcatccccctttgtttcgattgtcatgccgaggctggacactacaacatcaaccaccctaaaggaacaaaatactcatcctccgagctaagaaggcatagagatatctggtatgaagcaaccacagagctctctcgtttggagaggggttgggagattaaccctaagaaaaaaactgatgaattttacgaggggcaaataataacgttaagtggttttgtatggcgtgaagcgttccctggacctccaaactatgaatcttttgaaaccgacacaatagaaacctattggatgttagtattagccgagccaatatcacttttcgttaataatattgaaacagaggaaaccattaaaatagaaaatattagaaagcttcagttgtgtgtaaacaatgagttttatgataaaaacaagaatatagtcagaaataatgtcgagcttacaggaaaaatatttatgtcaatgactggacatcaccatggtgatgccaatttcgacatccgaaaaaattaa

SEQ ID NO: 446893 - DNA, 375 bp, Serratia marcescens
atgtctggcaaaataacgtcgttggtggtgatcctgctggcgctggcagcaattgccggcgctggcgcctggctggcaggacgacattatcagccgacgattgaccgtctcaacgaggcgctgacgcagtgccgcgataccggcaggcagcaggaggcgacgatcgacagccagaacgctggcataacggcactgcagcgtgaacaagccgagagagaggccaaggccaaggctgatcaggaaaaagcccgcgagcaggcccgtggcgattatgaaaaggccaatgcggtgatggcagagcgaaccactggcgaggtgtgtgcagcggcgtctgctgcgtttgacgcagagttgcgccgggagcgtgcacaatga

SEQ ID NO: 446894 - DNA, 222 bp, Serratia marcescens
atgactgaatattcagatattagcgcgactgacaaccgtgattggatttcgttttctgacaaactccccactgttgaaaatgggaagccagaaaaaatttatgtgaaatacaaaatgctgatcgcatatgaagaaaccccaacagccacggtggagtgggcgctcagcgatgaaggccgagatcagttatcacactgggcttacattaccgacggtaattaa

SEQ ID NO: 446895 - DNA, 2217 bp, Serratia marcescens
atgtcggtacctaaccagaccccatacaacatttacacggccaacggcctgacaactgttttcccctacgagttctacctgctgaatgccggtgatttagctgtttccctcaacggctcagtgatcacatccggctatacgatttctggcgttggcaacgtggatggcggcgaggtttcattcctgaccccgccggcgaacggcgttaccgttatgtttgagcgcgtgatccccacttatcgcctgaccgactaccaggacaacggcgatctgctggctgataccgtaaacaaggatttcgaccgtttatggatggccattcaacaggcgtttatttatctcggcctggcgctgactcgcccacttctcggcgggccattcaatgcaaaagggtaccggatcgaaaaccttggatacccggtcaacagctcagatgcggccaataagcaatacgtcgaagacgtcgccgtaggaacattgaatcgcacgctgcgggttcctgaaaattacgtccgtgttattcctgcaatcggcagccgccggcgccagctccttgcgtttgatgacttcggcaatcctatcactgtgctgcctgaatccggttcagcatcagacgttctgattgtgctggctggggcggatggcgctgaccgcattggtatggggcagagcaccgtgcgtgacgtaatcggctacgtgacccctgaaatgtttggcgtgcctgatgacggggattggactccacagattaccgctgccgtggcgacaatgcgcgaagtccatttgatggccggaaaagagtatcgctgcgacggtacgatctacatgccgtcgaacaacatgcagcgcctgaaattcgttttcaacggcgcaactattttcgcaaatcacatgcagccggtgttccgatcgccggcgccgctcgagtcgccagcaatttcgtattaccacatcgtcgggccgggaaaaattcgcagcattggcagcgtagataccgtatatgagcaggggaaaaacttcgttggattccccgccggcgatcacagcagcatttacaacattgagatgactgacatctcatgcgacggtgcccaattctggggatacgcggggcatggtggagatctgttctttgacaacgtccgcgataaccctgtggcgacgtatggcctgtacaaccaaatcgggcgagtgaacattggccattctggcggtgacacattgctgatgaaggggaactataacagcgtcgaatggtgccatgctaaaaaggcgggtttacctggaagcaacccagagcctggatacatctgcggtggatgcgtcatattcggcgcaccggttgacggtgatccactcggtagtaataaccgggttggatactacaaggcagatcagtggtcttcgttgggcgtcggcttctctggggataactgcagcgttggggagatcgaactaggcgagagtatttttgaagacgacagcccgttggtgcagggaaacaaaccgtatgtcgccatatacaacggcaatgggaatcacattggtcgaatcacatcaaaaaaatctgcctacggtgttctatttatccgtggcgagcgccacacgttagattatgcagagctgaacaactgtcacaaagagcagttgagtttaaacattaataccgtaggctcaacagttggcgattttgttgtgaacaactcacttcacgtcggcatgtatatcgagcctggtgccggctgctctatcaacagaattatttttaataacgcggatatccctcttgggaatacagcttgccagatccggaacgcgaatgcgtcaatcggcgaaatccgcataaatggatctggttccagctcaggatcgggtgtttttgttgaacagcgagcaaaaagcgctattcgatttataacctgtaacaacatcaatggaatggctgtttgggttcgccctggcggccgtgctccgtcttctgctcatttatcaaatctgtccactgcgacccggccagtcatgcagatttcttcaaaccagtctgcatgctccaactactacatattgaataactcgtcgactgggcagccgactgtttacgctgaaccatcttcaggcggtgcaatatcaacgtgggtgggctgtgagggggcgattccgctggcacaaggcggggcaacgctaaacgctgcaacgacatctaatcgtttttattaa

SEQ ID NO: 446896 - DNA, 900 bp, Serratia marcescens
atgagcgattcaaaagatgaaggtttaatcgattcagttaagaaaactctaatcgataggataaatacaccgttgtttggctttattgtgttgtcatgggtcgtgtttaactgggagttattgcttactgtaatttttagcaagcaaatgattgccactagaataggttttgttaagtcaagtgattattatccttttgaaatgtttatctaccctgcgatatctggttttgtacttagcgtggcatttccatactgtcagtgggcggtatcattccttcagcgctttgctcagaaattgattgacggaaacagtctaagaagagagcttgctgaaaataatgcagttattgctctggcgtcaagcaaggctgatgctgatagttctcgtgattttcaaaaggtaagaaaagaattagagttagcaaagaaagagaatgaggttgccaatgttaaattgaatacggataaaattaaggaggtttttgaaaatatctcgaatgatattgctaaagcgaaagtggagctaaaaaaccaagaagccttatacgaaaacatcaaaggagatgttaatgtagttcagcgtagagttgataaattaaatattagggaaaaagagttgctagattccattgccaataaagaaaagtacaatgaaagcattcatttgttaacgggggagatagaaagagtagtggatattatgaaaggctctgttatgtcttaccgtgaaaaactgaggaatgcaggcatgcctgaaagatttgttaactcatcaagagttattacttctaatgttaatgatttgaatgagtttatcgggaccatagagaaggggataaatgagattcatttgataaacactgaaagcgcaagccaaattgtttttaatgaaaaataa

SEQ ID NO: 446897 - DNA, 663 bp, Serratia marcescens
atgaaagagaagactataattcgacaggatgtggatttattaaaattatctgagcagttagatttgttaggagaatacccagacagagaggtcgcgattcttggtgctgcttatgtagaaatctgtgttgatatgagcattgaagctgcattggaaaaaattaatggaaatcgtaactttgttcgccatgtgagtgagttgaaactggactttgacgggaaaagactgctgtctttgtcattgggaatgatgaaggagtgcgtgtcactggctgtggcaaatatagggaatattagaaatacatcagctcattgtattcaggacttcaactttgacaatgatgatactcgctcaaaaatagggaatattaaagtaaatgaaatatttaatgtgaacaaggctgttaaagagttcgatatacccgaagttattgttttagaaaaattagagccaataaaacattctactgggcgagaaattagtagcgatgagtatatttttttgacggataaatattttaagccatacttcagagcccctaggttgatggagcgaaactatacaagcaaagaaaaatttgtacttggagttcagcttgtatgcctgtggatgataaaaaaaatagcacatacaaattttgagcagattaacagaatgttatag

SEQ ID NO: 446898 - DNA, 531 bp, Serratia marcescens
atgatgatgagaaaaatagcactgcctctgacgctactcggtactgccatgctggcgcagccattgtacgcggtggacgggaatattaacgtcaccggctgcattaccgagcaaggatgtaatctgacggtcgaaagtcaggctctgtccgtattgatgggctcgataccgcaccaatattttaaacggccggggatgggcagcgacccggtgcattttactctttacgccacaggctgccctaaagagcgcggtgtggcattaaagtttgacggtgctgctgaaacggaagatccccacctttttgcgctggataaccactcggatgcccgcggtattgcggtaatgatcttgggggattatggcggtcatatccaggttgtgcctggcggcaagggatttacctattaccccgagccggacggctcgctgaaaatcagcggagcggcttcttatgttgccacgaaagcgcaaaatcctacccccggcagcgccaacctgaccacgcagattaacctggtttatccatag

SEQ ID NO: 446899 - DNA, 1371 bp, Serratia marcescens
atggctaagtataaggcgtatccggagtataaggattctggggtagagtggctggggattgttccgagtcactggaaaactgtatctatatccagattgttttccagggttaagcgaaccggatacaaagataaagaattgctttctgtttatcgggattatggagttgtgccaaaatccagcagagatgataacaataataaaccctcagaagatttgtcaccttatcaattggttgaagaaaatgatttggtgatgaataaaatgaaagcctggcagggttcaatcgcgatttcagagtatgaggggatagttagtccggcatactttgtttatcaacccaataagattgtttttgaacttgcgcatctaagatatgtgcattacctacttcgtaatcctatctacgttactcaatatttgagccgttcaaaaggtatacgagtcaatcaatgggatctagatcctgatgagtttagaaatattgagcttctgcttcctagcaagaatgagcaggaaaaaatatacggttttctcgatcacgaaaccgcaaaaatcgataacctgatcgagaagcaacagcaactgattgaactactgaaagaaaaacgtcaggcagtgattagtcatgccgtcaccaaagggctaaaccctgatgtgccgatgaaagattctggcgttgagtggttgggggaagtgccggagcattggatggtcaaaccactgagatatttaggtgattgtcagaatggcattaacataggggccgaggcattcggttctggttatccatttgtgagttatggtgatgcatacaaaaatagggtgttgcctgattttggaagtggattggtgcagtcaacttctgaggataggaaaaagtattcactgttagccggtgatgtgctttttacacggacatctgaaactattgaggagattggtttcgcctctgcttgtttgaaaactatagaaaatgcttgttttgcaggatttttgattagattccgtcctagctcattaaatttgaatgccgaatattcaaagtattatttttcaaaccaactgcttcgcacgttcttcactaaagaaatgaatttaataactagagcatcacttagccaggatttgttaaaggcgatgcctgttgttattccacctaaggacgagcaaagaaaaattgctgaattattagatgataagtcgaagaggtttgaacaacttcaattacttggtgaagaacaaataaagtgcctccaagaacgccgtaccgccctaatctccgccgccgtcaccggtaaaatcgacgtacgcgactgggttgcacttgatatgcaagacgctgaggagccacaggagaccaccgtatga

SEQ ID NO: 446900 - DNA, 162 bp, Serratia marcescens
atgctgttggtggaaaccctcaacctgatcgacaccttggcacagcacattgcagagcacacccacagcaacaccggcaccccaaccaacgccagcgagataactcaagcattctcgaccgccacagccctgaaagggaagtacggttacctcatcagctaa

SEQ ID NO: 446901 - DNA, 720 bp, Serratia marcescens
  misc_feature (694)..(703): n is a, c, g, or t
ttgttgcgggaaaagaaaggtgtaatgaatgcacggttgatgttacaggaatcaacattacgtaggcattatatcaagaatcaagaatcagacttaccaaacaaagcggaaatattgatcgaagctaccaaagcgattgatgaagctttgagagcaatagatgtttctgactttaagagactttatgtagcgaaaaggacccgtgaacatctttttacagaaagggctgcaatatatggttacttagctacagatagtgctcagaaaaaaggtacagcaggtgaaatatgggctagttacaaagcggctcgaagctacgcgaggttatcagcaggtagaattctaagctatcaacctctagatatcgcactgtgggttcccattcgtattttgaaagatgcttccaatttggatgaaatgcagagaattgaaatgctggctgatattagatctacgttagatttagtagatacacttgcattagattcccatcaattagagattttttataaacaacagctcaaagcagctgaagtgttacaagatgaggaaatcactgatgcaacatttaaagcattagatgaacaaggttcggctgctggttattacttgcgcgctaaaaaatacattccagaaaaaccaaaagataaaacaatcacaaccataaaagatgatgatatggctgctataaacnnnnnnnnnntgatatggctgctttaa

SEQ ID NO: 446902 - DNA, 1188 bp, Serratia marcescens
atgcctttaaacgatatgcagattcgccgcgctaaacctgaagctaaagcctatacacttggagatgggcaagggctgtcattgcttatagaacctaatggaagcaagagctggcgcttccgctatcgctatggcggtaaacccaaaatgatctcccttggtgtttatccaattgtcacattggctgcagcgcgtacaaaacgtgatgaagcccgaaaaatagtggcagaagggcgtaatccgagtgaaattcgcaaagagcagaaattagctcaacaagtaggtgttggtaacacgtttgaagttattgctagggaatggcatcaattgaagtcagctagatggtcggctggatatgcttctgacatcatggaagccttcagaaatgatattttcccttatgtaggacacagaccaatttcagggataaagcctcttgaattgcttaacgtgcttcgcaagatagaagctcgtggtgcattagagaaaatgcgtaaagttaggcagcgttgctcggaggtttttcgttatgcaaccgcgacaggccgtgccgagtttaacccggcagccgatctctctagcgcattagaggtccatcaatctaagcattttccatttttggccgccagtgagatccctgattttcttgtcgcgcttgaagcttactctggtagcaaactagttcaattagcaactaaattgctaatgatcaccggggtcagaactatagagctgagggctgcacaatggcaggaatttgatctagttaacgctatatgggaaattcctgctgaaagaatgaaaatgcgtagaccacaccttgtgccattaccggctcaggcgttagatttactctatgagctgaaggctatgacaggaaactatcgttatgtttttccgggacggaatgatccgaacaagcctatgagtgaggcaagtatcaatcaagttatcaagcgtattggatacgctggccgggttactgggcatggttttagacatatgatgtcgactatcttacatgagcatggttttgattcccgttggatagagttacagctggcacatgtagataaaaataccatccgaggtacttataatcatgcgatctatcgtcatgagagagcaaccatgattcagtattttgctgattttttattagggaaatctcatggcaataataaatga

SEQ ID NO: 446903 - DNA, 2550 bp, Serratia marcescens
atggtttcatggctgagctatgagtacaaaagtgaaattataatgcagttggataaagtaaaatcaagacagtcgcaatactttccatttattgatgggctacgggcctttgctgttatttcggttattgtatatcatttgcatgcatcctggttgcctggtggtttcgtaggtgtagacgtattctttgttatctcgggttttgttgttagtacctcgattgctcatttcaaggggcgaggattctggaacttcctggcgtttttctatgcgcgtaggattcggcgaatcttccctgcattgatagtttgtttgttggtcactggttatgtgtctgcactgttcattcccgcgtcttggttgagcgatgtcaatcagaccaccggattgtttgcttttttaggcctgagcaattttgttctggctgcaaatggccgtgattattttgcaccgacgacagagttcaacccgtttacccatacctggtctctcggagttgaggagcaattttacctggtcttccccctgctgtttttggcttggttatatggtcaacgtggaaaacgcgcttccgtcgccttgttttcatttggactgctggtctcgattgtgttctcagcttggcaatcgcaggcacaaccgacaaatgcctattttctgagcccaggacgcttttgggaacttgcgtcaggtgtcttgttatatcagattattacgctctcctccggagagggtgcacgctcggaaaatcgctcttcccgcattatcggtgtagctgcattcattggtttgctgacttcttttgtgatctccacgccggataaattccctatgccgggggctacgctagcggttatttctacgttgggcatcttattcagcctataccagcgtgaatgcttgccgtggctgcaagccttattgggcaatcgctatattttgtttttcgggaaaacgtcttactcactctatttgtggcattggccgacgtttgttctgtttcgatggacctgcggtttagactcctcagtgacaaggctggccgcattagcgatcactttattgctggcgacactatcttattatctaatcgaaacgccgatgcgtcgatctacagcgactaagaaggcttctaatcccgttgttattggcgttggactctgtgttatcgccgccgcttattgggggaactccgctctgaatgctcgagcggataaaatttcgcttagcactgtgacgaaaaatgccgatctatggtacccggatcgtgggcctgcaatcccagaatatcctggttgtcgggcagaccctaaaacgattgttgatagtggcgtagaggttattgttttcaaacctgagggctgcctgcaagataggtcgctccggtatcgggtgctgcatgtaatcggtgactcccatactctggcctatgcggcgttgtacaagcaatttgccattagaaacaatctggaagtggatgtttatcgcaatggcggctgcccgtttatcagttttcaaactgagcgcgatcttgataatgactcgtgtcgacaacatgcagaagtttctttgcgcgcattgcaccatagggttaaacctggagatgtgctcttcctggcgtctttacgtttgccacgcttttccgatcagtgggtatatttcggaccggaatctcaactcaatttctttagtgcacatgcgcaggctaatcgagaacgtactgttgcctatgcagtagaaacattgcgaggattcagtgagaagggcgtaaaagttgtattcgaagcgcccaagcctatcttcatgctgccgccttatcgctgtgctgattggtttaaccgtaataatcctatttgcgctcatggcatgtcggtggagcgcgagctgttacaaaaataccgggccccggttcttaatagttataatcaggtgaagaatgcgcttccaacggtcagtgtgtgggatccgttccctgtgctctgccctggtaatgagtgcaatgtttggcgagatgggcacgcaatgttctttgatggcgatcatttgagtgcttatggcagtatgacgttgttgccagacttcaccgcctatatgctgccgaaattggttaaacgaaaaagccaagaggttatcgctttccctgcagagggctatgcttttaaccaggaagggatgcctgatttcctcgacagcatttcgggagtatcgcatgtggagtcctggggccgctggagcgatggcaatctggagcaggctgtgcgtctggactttaatggattactgcctaaaggctttactcttgaaattgttgcacagggctatggtcccaatattggcaaaccgatcaatgtaagagttgggcacgagcagaagagtatcaacctcggtggtcagccgacgcgggtgatgttacatttcatcaatggcgatggggctcgggatattgaaattgtgccaccttatccgacaagcccaaaagatgcgggtgagtctggggatgatagacgattggggataggattggtttcgatgaatattgttgccgattaa

SEQ ID NO: 446904 - DNA, 357 bp, Serratia marcescens
atgcgaacatttacggtggtttgccccgattgcgagtcgaaagccattattagtaagacgaatcgcaatcataagatgcttgcggatgtgtattgcacctgtagcaatccggagtgtggtcaccggtttgtggctaatgtgacgttttcccataccctgtgtcctagtgcattgacggacggtcagatgatccagagtttgcttaaggggattactccagaacaacgagcagacaccattgggtggctcaaggcggctcaggataaagaaacacaagaggcaaaggccagagtacccgatcccatcaaaccggtcgttacgcggcgcaaacacgccgattacgcagcgaagcagtaa

SEQ ID NO: 446905 - DNA, 156 bp, Serratia marcescens
atgatccagatcctcagtgacaccagaaacggtttttatcctcatatatcaatggtattaccagttttcccactgttaccagtcaaaaaggataaagagaaggtgaaaaccggcctgcggaggcttctttcctggctggcggtgttgaaagattga

SEQ ID NO: 446906 - DNA, 1674 bp, Serratia marcescens
gtgaaaaatgatgatgaaaactatgttaaattgcttacagagcgcatttaccttataaaagaaaaattagaggctggtgagttaaaaatagcggcacatctatgggaaggtttcagaaaaagttttgattctataagactaagagacgatgggctggtagatccaaatactgttgatggtcgactgagggcgatgggagctgggctacatggatttgaagaacgtaaacaattaaaagaaaaattctcaatccatcaactccaagaggcttactttcgaattctatttaatgatttcggtgaaatatatgagatgatggttcgtgcagataaatcccctcatcacgtttcacaatttttatccacgcaaagtgaattcgttaatgatataacaaacaacgctaatgagctatatacacttataaaggaattttgggacactgctgctgacataggtatttttcatttacaggatgggaaacaactgaaagctacatttgccggtgacttattccctgcatactcagagaatgcggtttcaattggtgggctttatattgacaccattgtattaccttgtccaatacttagaatatttccattaaaagatcatatgagcaaagaggcattttccgctctactcatgaagcatattctaacttgcatgacttacagggatgtaattttagaggaaatagaaacaccaatagcaatgatactcccacatgtcacagatatttccctagataaaaaacgggacttattcgatacaacaactccatatttattaaagcatatagataatatgtttggtgttagacttggaggcatggaagagttagaagagtatttcagcactttaaccacagccgacgctgtattagatgcattggttaagccaaacctactaatgtttgataccgagtggggtaggagcgcaaaagaacagctaattcacctattaaaaaaagaacatgatgttaaaatatccggtgataacacaccagtagggttacaagttttatataatctatctggaaggtttcctcaagcgtacgctgcaaaagaaaatgcccttacattaggaggagtaccattcatcaacgcagagacttcatggatatattacaattggttacttgaatatgattcaaaaacaaaagaaaaagatcccggtttaatacaaagcttacatgtttcgcacgcattatctattgacaaccaaagtcaaatctcttggcttggaaatgtccctgtaaaaacagtcattgaactaagaagaagggatatgatgaatgaagtaagagatttgttatcaagcggaattaatgagttaatagcaaataatgaaaatggttatattgaaacaacaaatagggttatagataacattgacaatgcatttaaaagacaccaattatttattaaaaaagcgaaaaaagataaacttaaaattcttggtattgacattgggcttatggttgtttctggttcaattggcctcgctgctgcctacaaaggagatccatcattaggggtactctctactggattagggctctatggattccccaatatcaaagacatcaaatcagaatggaaagagcaaaaaatgcgaatggatgcttatagaaatagccccgtaggagtgctttttaatcacataaaggtgtga

SEQ ID NO: 446907 - DNA, 1863 bp, Serratia marcescens
gtgttgacacaggaaaggctcgttagcttactttctaactcttatggtaatagccattttcacatagatacgttgcttgttgatgaggctcatgaaatacaaaagggaaagagagggataattctacagaatgctgttgaattagcgcttgaaagacatcctgatatgcaagttatgttctctagtcctttgattagtaaccctgagtattttttctcaatattcagatggcgtcagaatggccaatcatttatcgaaacaatttcacctgttacacaaaatatactgcttgtcaatcaagtgagaaataatactaaggctgttagtataagcttgaattctgaagatagagttattgatttaggagtgtataagttagattttattttgcgtggaaatcggagcgttcagaaagcaaaattagctgagtttatatctcgctcgggaggggccgtaattgtatttgaaaatacaccatcaaatgcagagagtgttgctattaacatagcagaggttcttagtgaaacgctactggaagatgatttcgacgagtttatatcttctattaaagaagaaatgcatgagcaatatacattgattacttgtttgagatcgagagttgcctttcactatgggaatatgccatcaataataagaaatggtattgaatattttttcaaacggggtgatatcagatttattgtatgtacaagcacattgcttcaaggtgttaatctacccgctaaacatcttattttagaaaatcctcacagtggggatgagccaatgtctagggctgattttctcaaccttgctggtagagcaggtagattgaaatatgaatttcatggcaacgtttggtgtattcgaagcaatatttgggataagaagtcttttgagggtgagccacttcaaactataagttccgccatgtcaaaagttatggtggatggtggtggaattatatccaatgctattgataatatatattcgccaactgatgataaagagctggctgacgtggcgtttgctcgcttttatcatgaggtaaaaagagacggttttcagctgccttatttttctgaattgaacggagaggaagttcatgaaatgttggaatataactatgataaagtcagaagaatgaagataaccattccagaagaattaattaaattaaatttagggacgcggcctgattatattcaaaggctctatgattattttgttcaactggataacttagatgattatattcttcttagtccttatcaaaaaggagggaaggcgagggtggatcgagctattgagattatcattgatatattctcttggcctgttacattacagtatgcaaagttaataagtgttatggctcaccaatggatgacttcgcactcgctaaggtcaatgattaattataaaattagaagttctagtgagttgtctgatttgattagtaatggcgcgcctgtcgataaaataagaagaaaaacctcatcccttattagggatgttcttaatacacttgaaaatcaagttagatataatcttgtccgttatttgaaagtatatagagaaacacttgtatttgttctgatttcgaaaggggaaaaagataaggctgaaaaagtagagaatatcagtgcttaccttgagtttggctcatgcaatccaatagagttgaacctaatgtcgcttggcctttcacgaagtactgctctgtttctaaaaaataaatttaatttccggggggattcttcgcctgaggaattgatcgactttttatcaaagaaagatctgaatgctaaaaatatccctggatttagactcagggaaatcaaagacgtgctaggaatataa

SEQ ID NO: 446908 - DNA, 318 bp, Serratia marcescens
  misc_feature (191)..(200): n is a, c, g, or t
atgcgtattgttattgacttgcaaggagcacaaacggaaagccgttttcggggtattggccgttatactctttcgattgcaaaggcaatcatccgtaataacagtcaacacgaaatttttattgctttgtctgcgctgtttcccgaaaccatcgatgaacttaaagcacaatttgctcgtgtagtgccggnnnnnnnnnntggtatgcgcctggtcctgtcagagcgatggatagaaacaatgcttggcgcagtgaatgcgcagaatatgtgcgtgaagccttcttacataatcttaaacctgatgtcgtttttataa

SEQ ID NO: 446909 - DNA, 231 bp, Serratia marcescens
atgatgacgtccatcgagcagagcctggccgactacctcggcggctacacccgcaacaacccagccaaccgggcacacatcgtcaactaccaggactggcaacgcatggccaggctggaactcgaccgccgcgccgcaagcctgctgtcggtgctgccggacgaggaactccgcgccattgccgagggccaagtcagcctgcccgagctggtcaagaacctgcccacctga

SEQ ID NO: 446910 - DNA, 198 bp, Serratia marcescens
atggccatgccaaccctttcacccgccgcccaggagcatctcctggccatcgccgccaccacgctgggcctggaaaccctggaaacgaggaactcggaccgccaggacttccacgacctggcggtctggtcggtcaaggctgccctggaagctgcctacctggcaggaatggttgaccaccaccggagggctgcatga

SEQ ID NO: 446911 - DNA, 825 bp, Serratia marcescens
atggaaggctccaagaaagcgagggcgcaggcccacttcgatgacgtccaggcggtgccgcttgtcccctgggtgggcggcaagcgccgcctggctccgcatattctcccgctcctgccggagcacacctgctacgtcgagccgttcgcgggtgcggctggcctgttcttctccaagccgcccagcaaggtcgaggtgctcaacgatgtgaatggcgacctggtctgcctgtaccgcgtggtgcagcaccacctggatgagttcatgcggcagttccgctggtcgctcaccagccgccagatgtacgcctggctccgggagacgaagccagacaccctcacggacatccagcgggcggcgcgcttcttctacctccagaagctggccttcggtggcaaggtggacggccagacctacggtacgtccaccacagccccgatgcgcctcaacctgctgcgcctggaggaagacttgagcgcggcgcacctgcggctgcaccaggtcaacatcgagaaccttgactggcacgcctgcatcacgcgctatgaccgcgagcacaccctgttcttctgcgacccgccgtactacggcaccgaaggctacggcgtcgagttcggcatggagcagtacgaccgcatggccgagctgctgcgcacgatgaagggcaaggcggccgtcacagtgaacgacatcccggccatgcgccaggcgttcaaggggctgacgatgaaaagcctggccatccgctacacgctcggcaagtccggggctgggcggcaggagcgcggcgaactgttggtgatgaattacaagccaggcggttga

SEQ ID NO: 446912 - DNA, 1032 bp, Serratia marcescens
atgaaacggcacggaaacctgtttgagcagaccttcacccgcgaggcactgttcgatgcctacgtcgaggccaggcgcggaaagcgcctgcgcaaagcctgcttttggttcgacatccgcgccggggccgtgctcgattggctgcaccgccgtctgcatgatggcagctacgaggttcgcggctacaagcggttcctggtgcatgaacccaagacccgcgaaatctgcgccccgtggttcggcgacatcgtggtgcagcacgccatctatgctgtcatccgcccgatcttcgagcgcacattcatcgaccagtcctacgcctgccggattggcaagggcacgcacaaggcttccgagtacgcgatggaggcgctgcggaaaagccgccccgacagttacaccctcaagctcgacatcaggaaattcttttaccgtatcgaccggggcatcctgcgccagctcatcgagcgcaagatcaaagatcggcggatggtggacatcatgatgaagttcgccgagttgccggagccgctgggcatccctatcggcaacctgctttcacaggtctatgcgctggtctatctcaacgccctcgaccacttcgtgaagcgcgagctgaaggtgaagctctactgccgctacgtggatgacttcatcttgttcgacctcgaccgggaacagtgcctggaacacaaggcgcgcatcgaagcgttcctgcacgatgagctgcacctggagctgtcgaagtggacgatggccaagacccagcgcggggtgaactttgtgggctaccgcacctggcggcgggccaagttcatccgcaaatacagcctgttcaagttccggcgggcggccaagagggggaaggcggacagcgtcatatcgctgctgggccatgccaagcattcgcactcgctggggttcatgtggcgcaccatccgcgaggtcaatcccgacctggtgcgcaagctgccgccgaagatgaggcgcttctatccagtcaggccgcccttgccgacaaagcaaaactaa

SEQ ID NO: 446913 - DNA, 414 bp, Serratia marcescens
atggcgatagacagggaagcgcaactggtacggaaatttgtggagttttccaagctcctcaacgtgtacctaaaccactttccgcgccacgaacgctatgccctctcgaacagaatccgcaacgccgcctatgacgtctacgacttgattgtggaaggtcagaagcggtaccacaagaagacgtccctcacgcagcttgatatcgcccatgagcaattgcggatgcagttgtttctggcctatgaaatgggctatttcaagttcacggacggacgcaccgaaggcaacgcggcagaagtagaagcgaagcgctggcaagcgataagcaagctggtggatgagctgggccgcatgatcggaggttggatacggcatgagctggccgaatcgaaagaggcaggccagcagaaatga

SEQ ID NO: 446914 - DNA, 1095 bp, Serratia marcescens
atgaccatctttatcaaagacgaccttcgcgcttcggttgaagcggccactggcggcctcgtcaccgtgctctacactgcggccggtcacccgagctatatgaacgtcatccccaagttcaacctccaggacatcgacgcatcgctgggcactggtgtgcatccggccttcatcgtcaacggcgtggagaaaagcgaattgttcatcggccagcatatcggctgcgtcaaggacagcaacctgctgtctttccccggcgcggtgccgcaggtcagcgccaactttgacaccttcaggacttgggcagcgaacaacggcccaggctggcacatgatgaccaacgcggaatgggccgccatagccctctggtgctggaagaacggcacgatgccgcgcggcaacaaccagtacggccgcgacatcggctcaccgtgggaaacggctcggcgtgtcgatggtggcaatatcggcgaggctgtcgggaacgggcgcacttacactggctccggcccggcatcgtggcgtcacaacggccaggccaacggtatcgctgacctcaacggcaacgtgtgggaatggactggtggttttcgcctcaacaatggagaaatccaggtactggccaacaacgatgccgccgacaacaccaaagaccagagccgcacctcgacgctctggaaggccatcaaggcgtcggatggttcgctggttgcgccgggtacggcgggcactttgaagtacgacgcttcgagtgccaacggcacgggtggcaatgtgctgtccgacactgtgaccaaccgctccgggaatgtggatgaggacgactacgtgaacggcactagccaggcattcgagagcatgggcctgaagaacggcctgacggtgcctgccattgccaaggcgctgtgcctttatccggctgtggagggcttgggtgctgataatttctggatgcgcaaccacggtgaacgtctgcctctggccggtggctactatgacattggtgcctcggctggggtgttcgcgcgctatctctacggtgcgcgggcggatgttaacggcaacgtcggcgctcgcccggcctatgttctttga

SEQ ID NO: 446915 - DNA, 321 bp, Serratia marcescens
atgccgcaaatcatcttgaagcagtcgggccagaactcggccgacttctccaccaacggtgccgtcatcacggtcgccggtgtcgccgtcaactgcgaggcccgcgaggaggacgtcacgcagatcatcgaaattcgccagcacgaaggcgttgcccaggagggcggtgaaggcgcgttcctggcgcagatcgaaatccccgcccgccgatacgtcgatgaggaaggcccgctcggcgaggacgagcagccgaccatcgtgcgcagccccgtgccgttcgaccccaaccgcgtcgcgctgacgctgtggcccaccaactga

SEQ ID NO: 446916 - DNA, 930 bp, Serratia marcescens
atggcaaacgtaagcgaaacctcgacctgggaaggcggcatctaccagatcgaaacctctgacccggtgctgggcggccccaatggcatcgccaacgtgcaggccaagcagctcgccaaccgaaccaaatacctgaaggcgcgcgccgaccaggtcgatacggccaagggcggccatgctgacctgccagcgcgcctggcggctatcgaggccgcgaccgaggcgcttgggccggatgcgcaggatgcctcgctggcagccatcaagttcgctatcgaccaggcgaatgtcgccaaccagggcgtgcgcgcgctgcatcaattcgcgcagcaggaaggcgtgctggagatcagcaaccggggcgttgtcagcggctgcaccgtgacgaagtccaccacggccgcgcgcaacctgcacatctcgacaggtacctgctttgcacagggccgcaagttcgcggtggcggacggtaacaacgctgcctcggtgcccagcaataccggctcgggtgccgtgacggtgttcgcctatctgttccaggatgccagcggcctgtggcggctggccgtgacgtccattggtcaggccgtgccggacgggtgcatccgcctctacaacctcaccgtgcccgccggttcgacggatgccactgatcccaacctggcggccgtcacgctcacggacgtgcgccgcgtcgaggccgggtttccgatcttgctggacaaccctgcctcggcatcgccgcagctcgcggcgctgccggattcggcctaccacgtcacctttgacgtgctctcggccagcggtgcgcccgccgaggccaagagcctggtggtggccagccgtgcccgaaacggtttcaccgtgcggcttgccgccgctgccgacaacgtggtggcccgctggcgggtcagccgcctcaacgcctaa

SEQ ID NO: 446917 - DNA, 444 bp, Serratia marcescens
atggaaataaagatcaaggaaggcgttccgctggccgggtacttccacgttgacgtgtaccgctccggtgtcctggtcgcggtcatcgacgaggagaacctcatcgtcaatggtgccaagaaccagctcgcccgcctgattggcggcgcgggcacgaaccggcacatcacgcagatcggcttcggcatcggccaggccgttgccgcgccgggccagacggcgctgacctcgccctacatcaaggccatcggcagcgtggagtacccggcgaccggccaggtgcgcttcaactggagcctgtccaccgccgagttaaacggagtggccatcaccgagttcgggctgatctgcgcggacggcacgttgttctcgcgcaagcagcgcaaacccatcgagaaggagtccgacctgtcgctgaccggctcctggacgattcttttctaa

SEQ ID NO: 446918 - DNA, 1041 bp, Serratia marcescens
atggctgacttcgagaagccctcgctgttgccgcccgcgctcgtggtcgatctttccatgcgggcgctagaagtgctgatcgcgcgcttggtcgaactcgacctggctcccacgcttgtctatgacttcgagcacgtcaccgagtcggcgctgccgcacctgggcgagcagtttcacgtcatgggcgcggagggctggaggctggccaccacgccggagcaacggcgggcgctgctggcgcgcgccgtggcgctgcaccggcataagggcacgccctggagcatccgcgaggcgctcaaggcgctgggcttcaacgatctggagatcgaggagcgcctgccgtcaaaccgctatgacggcgcgatcacgttcagcggcgcggaagcctacgccgcctatggctgggcgcagttccgtgtcatcgccgacgcgggcgacgagcagcccatcacctcggcgcagaccgcgctcatcgtcgagaccgtcaacgcctggaaaccggcccgcagccacctggtggatgtgcgctaccgcgccagcgagaccgagcgcgtggacgtggccgaggtcgagcagcaccagggcgtcatgacccatgacgaccagcaccgatggggaaagcacttttatgacggcgcactggcctacgaccagggagccacccacctttggaacggcgcgctgcgcttcaacggcgtggccctgcacaacggcttctcggccacggcagagggtgcccgctacgagggcgagcgcgaggaagaaatcctggaagccacgctcggcttcttcgaccagcagacacgctgcccggtattcgcgggcgagctggactacagcggcatggctgacttcggggcatcggctccggtggccgaggacttgcccatgcccatcacgttgcgccgccaccggcgcttcgacggccgcctggcctacagcgcccaccgtttcgatggttcggagcggtacgccgggcatttcacccacttcggcaactcggcgtacagcggcgacgttgtcaccctgttggaggcgtaa

SEQ ID NO: 446919 - DNA, 1119 bp, Serratia marcescens
atgagcctgcttgaccgacaactgccggagccggacttcatcgaacgcgaccctgcgaagatcacgcgggagatgatcgccacctatgagtcgctcactggcaagacgctgtacccggcgcaggtggaacgcctgctgatcgacctaatcgcgtaccgcgagagcctggttcgcgaggcgttccaggacggagcaaagctcaacctggtgcgctacagccggggcgtgattctggacaacatcggcgagaacgtgggcgtggagcgcgttgcggcggtcgctgccagcgtgaagctgcgcttcaccttctcgcccgcaccgaacaccgccaccgttctgccgcagggcaccgaggtggagggcggcggtgtgtccttcgccaccgcgcaggtcgtgagcgtggccgcaggcgcggcgacggtcgaagtgctggctacctgcacccaggcgggcgtggtcggcaatggcttcgtgcctggccagatcaagacgttggtgggaacgccctcgggcctgatcgtggccagtgtcgagaacatcaccacctcggagggcggcgcggacgaggaaagcgacgagcgcctgcgggagcgcatcgtggccgccccggagacattcagcgttgccggttcggtggaggcgtaccgcttccatgccatgtcggcccacccggacatcgtggacgtggccgtcatatcgcacatccctggcgacgtgacgctgtatccgctgaccagttccggcctgccgggcgaggccatcaaggcggccgtgctggcgacgtgtagcggcgaaaaggtgcgcccgcttaacgaccaggtcatggtcgccgacccggtgccggtggactacgccatcgacgtgcgcgtggtactgacccgcacggccgacgcggcactagcccaggcgcaggtcgagcaggcagcgctggacttccgcgacaaccgggtgcagttcggcgcatccatcgtgcgctcgcagctcatcgacgcgctgcacgtctatggcgtgtattccgtcacgcccgtgcagcctgcggccgacctcgatctggagaaatgggagtggccgcgctgcaccagcatcaaggtcacggtgacgggagtggcgcatggctga

SEQ ID NO: 446920 - DNA, 426 bp, Serratia marcescens
atggttgccatcgtccctgctacttctcgccctgcattcttccagcccgctctgtcgggcgcgactgcgggccacccttccggccttgcgagtgatcgcctgggcgaagtcgtgacgggcgtggccgacatcaatcagtgcatctacatcatcctgaccacgccgaaggggagcgacccgcatcgccccacctttggcagcgagctgcacctctacctcgactaccccatcgacagcgcccgcccgcacttcgtgcgtgaagtggtggatgcgctggcgatatgggagccgcgcatcaaggtgatgcgcgtgccggtcacgaaggaaggcgatgcgggtctgctggtcggagtcgagtgggtgtttgccgacagcgtggaggccgagatgttctccacgcgcgtgcccatgaggaaggtgctatga

SEQ ID NO: 446921 - DNA, 600 bp, Serratia marcescens
atgaacatggccactggcggcgcgcgctacaagcagggcatcgtggccgagtcccggccgggatttgcccgcgtgcgtttcgatgacgtggacggcctggtcacggcctggcttcctctactgcatcccaagaccctcgccgacaaggtagtgtggacgctggacgtgggcgagcatgttggctgcatcctggatgagttcatggaggacggctgcatcctcggcgcgatctactctgacgccgacgcgccgccggtaagcagcccggacaagttccggctccagttcaaggatggcggctcggttgagtacgaccgcagcaacggggccatgaacatcgtctgcaaaggtgttgcaaacctggtcgccgatggtgacgtcaccgtgaaggctccctcggttacgctggacacgccgcaaactacctgcaccggccagctcacggtcgaggggatgctcacctacaagggcggcatggcgggcagtggcggcagcggtgcggcggccaccatccagggcgatgtccaggtggacggcaacatcaacgcatcgggcagcatcatggatgccggtggtaactccaaccaccactcgcactga

SEQ ID NO: 446922 - DNA, 1026 bp, Serratia marcescens
gtggaaaagatgaaggtagccacgcccaaggtgattgtgctctacgagagcaaggacattaccgcccacgtcgcgcccgcgctgatcgagctggcctacaccgacttcatggaaggcgaaagtgactccgtcgatctggcgctggaggacgccgagcgccgctggcaggatgcctggtatccacagcatggggacgtggtgcaggtgcagatcggctatgccggagaaccgctgctgccctgcggcgagtttgaggtggacgaggtcgaactggatggccccccggacgtgatccgcatcaaggcgctggccgctggcgtgaagcgcagcgtgcggacgcgcaacggccgggcatacgagaacactacgctgggcgacgtggccaaaaccgtggcccagcgcaacaagctcaagctgaccggcacgattgagccggtgaaaatcgcgcgcgtcacgcaggtgtacgaaaccgatctgacctttctcaagcgcgtggccgagagctacggctattcgttctcggtacgtggagacaagctctgcttcttcaaacggtcggaactcaaggcggcggaacctaccctggtgatccgccgccaggacgtgaccagctatcgcttccaggacaaggtgcgtggcgtggtggcagcggccacggcctcctaccacgaccccaagaccaagcaggtcaagaaggccacggtgaaggatgtcgaggccaagggcaaccagcatagtgccgatgagctgaagctcaatgtgcgggccgagaatgaacaacaggcgcggctcaaggccgacgcggcgctggacagggccaacgaagaccagaccggcggcaccctggccatgcccggccaggtgaagctgatgtccggggtgaatgtgcggctggaaggcttcggcaagatggatggcaagtacaccatcacgcaggcgcggcatcgcgtgtctcgcagctccggttatggcaccgaagtcgatctcaagcgcgtgcgcgacccgaagcaaggagcgacggcatga

SEQ ID NO: 446923 - DNA, 234 bp, Serratia marcescens
atgacggccatcgactgcatcgagcacatcacccaggcgggcgaacgctgggacacgttggcctggcgctactacggcgatccgctggcctacggccgcatcatcgctgccaaccccgcgctagacatcagcgccactttgccttcgggcgtggtggtgctggtgccggtactgccgctgaccgagtccagccaagcattgcaggatgaggagctgccaccgtggaaaagatga

SEQ ID NO: 446924 - DNA, 615 bp, Serratia marcescens
atggcgatcatgacgccggtaggcaatttcggcatgggcacggtggcccagatcatccatgagctgacgcgcactcgcggcggcgtgtcgcagcacgcgctgctgggggaaatcaccttcgacctcatcacttacttcgagggcatggaggcgaacttctcggcgaactacgcagagcacgcgctcattgaaggcaagccacgtctgcaatgggtgggagacaacctggacgaagtgagttggagcctggtgttccatgccgggttctgcgacccggagctggagatgctcaaactgcgcggtgcaatcacgcgccacgaggcgttgccgctggtgttcgccaacggtgattacaaaggctggtttgttcctaccgatgtgcgtgtgaccacccggcaggtgatgcgcgacggtaccctgatctggctggaggccgagctgacgctgcgcgagtacgtgcgcccggtggtgctggtcgaggaaacctccaagcaggaaccagtggccaccgagaagcctgacccgaacggccaggtgaaaaagcccgcgcagacggtcaaccgtgcgcccgcgtccaggcccgccagtgcgccgccaaccaggagcgcacgatga

SEQ ID NO: 446925 - DNA, 3408 bp, Serratia marcescens
atgtcgaagtcgttaaccctcggaattgtcttttcttcgatgggagccggtgctgttgccaccaccatcgggactgtggtaggccacctcggcagtatagaaaaaaaggtggtagaggccaaatccaggatgaaggaacttggcctggaaaccgtggacgccttcgccgtgcagaagaaggaactgcaacaggccaaggaacagctccaggcgcaccagactgctaccacgtccttgggccgttccgtggcgatggcccgtatcgaacaggaagcagctaccgagtcgctgcaagcctatcgcaccgaactggccggacagactggccgagccaccgatgagcagcgcgtcaagctcaagacgctgcgcgagcaggtcagccaggccgataggaacctcaaggagctgaccaaggagttcaaggaagcccgcgacaagggccagggcatgaccgagggtgtgatgcgtcagaccgagcgtctgcaacggctgcgcacggccctggaacagaatggcgtgtccacgcgcaacctgtctgaacatcgccgccgcattacccaggccatgcgcaacgagcaggcaacggtggacaggctgaccacccgctacgagaggctcaaggcggcgcaaaacgcgcagcagcaagcccgcgccgacctcaactcgcgctggggcgatgcgatggcggcctacggcacagcgcgggcgctgggtgcgcctgtgggggcgttcatccgccaggacgatgcgctcaactcgctccaggtcgccatgatggacaagaacggccaggtgggcggtacctacgacgcgctcaagcgccaggccatcgagctgggcaacttgctgccgggcaccacagcggacttcgtcggcaccgcccgcgcgctcatggagcaaggagtggcagtcgagtcggtgctgggtggcggcctgaaggcggcttcgtacctgtcggttgtgctgcggatgccaaccgaggaagccggtgagatggcggccaagctgcgcgaagcctacaagctatccgacgacgagttgacgaaaatggccgactccatgcagcgggccaagttcgccttcggcatgaagccgtccgacctcatggccgccagcgcctaccaggcgcccatgctcaaccagcttggtatctccggcatcgacaacaccaacaagatgttggccatccagggcatggccgcgcaggtcggcctggagggttcctcgttcggtactaacttctcgatgatgctctcgcggctggccaaggggccgcagatgatcgaggacgccaagaaaggcatgaaaggtcacgccaaggggctgatggaggacgcgggaatcaccttcgacttcttcgacaagaagggcaatttcgcgggcctcgaccacatggtcacggagctggagaagctcaagaccatcaaggacaagctgggcgacaaggcggcgatggaagtggccgaggccatgttcggcgcggaagcgggccgcccggccatgattctggccgagcaaggcatggccgggttccgcgccgcgcaggagcgcatggcgcagcaagccagtctgcaacagcgcatcgaacgcaccacgcaaagcagcaagaacacaatcgaagccttgggcggctcgctggagaacctgggcgcagccctggccgggccagtggtgcaggcgctgcacccactcatcaatgtgctgaacaccgctaccggctggctgacagagtttgccgacagcaacccgcgcgccactaaggcgctgggcttcctggtgctgggcctgggcgcagcgatcaccaccttcttcgcgctgggtgtggccatgtccttcggtcgcgtgctggtctccggcctccaggtcttctcgctcatgacccgcatcggcggcggcgcggcctggctgggtggcgtgctgcgcgggccgttgctgggggcgctgggtgtggcgagggttgccgtgattgcgctgggccgcgccatgctgatgaaccccatcggcctcatcatcaccggcatcgcggccggtgcgtacctggtctatcgctactggacgccgatcaagggctttttccttggcctatggagcggcatcaggtcgggtttcgtgagtgcctggaacggcgtcacgtcgattttcaccggcatctggaaccagatcaccagcgccttctctggcggcatcgcgggcgtgggcaagctgatcgtgaactggtcgccgatgggacttttctataaagcgttttccggcgtgctgtcctggttcggtgttgacctgccgaagaacttcaccgacttcggtacgaacatcatcagcgggctgaccaacggcatcaaatcggccattggcggagcggtcacagccatcggtgacttcgcctccggcctcaagtcgaagttcaccaatctgctgggcatccagtcaccgtccagggtattcatgggcttcggcggcaacatcggcgatggcgcggcgctaggcatcctgaaatccgtgccgggcgtccaaggcgcggcgggcaggctggccggggtggcgctggccggtgcggtcgctgcgagcaacactgccgtcgcgggggtgaacagctccatccagacgcgccagccggttgaaccgccgcgcctagaagcgcctgcagcgcaggttctgcggttggtcgcgcccgccaccatgccgcgcgtcgagctgccgcgcatgggtgtcccgcgactggacgtatcccaagcatccagccaggcggcgtcgcctgcaccgatgccgcaggctgctccggcgctggccccgcagcctaccgtttccgtgacggtgccgcgaattgagttgccgcgcctggaggctccgcgtcaagcggatgcctcgcaaccagccaggcccgccgcgccggtggtgatgccgcagatgtctatgccccgtgcggaactgccacgccaggtagctccgatgccgattcagacgccgatggtgtccatgccgccgctgccgcgcatcgagttgccacgcttggagctgccagggctgaacatggcagcgttgcctgcggcgcggcttgtcgcgtctgtgccgatgccccaggccaatgcacccagcccggtgcgtttcgagctaccgcgcttggagtctccgatgcaggccgcgcagcctgttgttcccgccgcgatgcaacgggctggtgaggtgaatcaggtgctatcacgccgtgagagcgcgccgagtacggcagcttctgcgggcgttggccagggcgggatgacgattcacttttcgcccagcatcagcgtgggtggtgataacggcggcggcgacgtgcgcggccaggtgcaggagggattgaagctctccatgcgcgaactggaacagatgattcggcgcttgcaggccgagcaacaacggagggcgttctaa

SEQ ID NO: 446926 - DNA, 222 bp, Serratia marcescens
atgacgctgccctgggcgcaatgctccggggtggttggctacctgctggcgttcttgggtacggtgctcggccttctgttgacctccatccctggagccatcggcggcggaatcatcggctacgtcctgggtctggtgctctgcctcccgctgcgctggttggccttgctggttcccactccgttcgcctggctggcccgccgcctcggctacgtccggtaa

SEQ ID NO: 446927 - DNA, 297 bp, Serratia marcescens
atgagcgacaccacgaagaacaccgcagcgcccgccaatcccgcgagcgtggatctggcaatgccgctggccacgccgaacggtgaggtcaagaccatcagcttccggcgcggcaaggccaaggacatggtggccgcccagcgcatcgaatccgacccggcccggcgcgagctggtgctgatggcgatgctgtccgagcagaagctcaccgtcgaagacatcgaggagctggacttggccgacctggccatcgtccaggcggcatttcaaagtctgtggatgccccgctctacctga

SEQ ID NO: 446928 - DNA, 522 bp, Serratia marcescens
gtggccggtattcaagtaaacacgctcaacaacgcgaacatctacatcgacggcaacagcctgttgggccaggccgaggagttcaagctcccggtggtgaagttcaagatggccgagcacaaggccgtgggcatggtcggcgcgatcaagctgcccagcggcttcgaggcgctggaaggcgagatcaagtggaactcgttctacgccaacgtgtggcccaagctgctcgacccgttcaccccggtgcagcttcaggcgcgcggcagcctggaaacctacaccagtcaaggccgcacccaacaggtgccctacgtggtgtttctcaccgcctcgttttacgaggtgccgaccggcgacttcaagcagaacgacaaggccgagttcagcagcaagttctacgcgacctacatcaagcagcaggtcaatggtgcggacgtgctggaagtcgatgcgatggccaacatttacaaggtcggcggcgttgacaaactcgacctgtaccgcaccaacatcggaggctga

SEQ ID NO: 446929 - DNA, 1452 bp, Serratia marcescens
atggctgcaaattttctgcacggcgtcgagaccatcgagatcgacagcggcccgcgccccgtcaagctggtgaagaccgccgtggtcggtatcgtcggcacggcggcggccggggcagtaaacacgcccatcctcgtcaccagcgagagcgacttcgcgcaattcggccaggacattcccggcagcaccatcctcaaggcgctcaaccgcatctacaagcagaagggcacggtcgccatcgttatcaacgtgctcgacccggccacgcacaaaaccacgcttgctgcgccggaaaccgtgactgttgaccaggacggcaagttctcgttgggccatgccgccgtggtgagtgccatcacgctgaccaactcggcaggctccaccacctacatcaaggacaccgactacacgttcgacccggcgaccggcaccggccagcgcatcagctccggcagcatccctgcgggtaccgtagccgctcccaccacgctgaaggcgtcgtatacctacgcgaacccgacactggtgcagccttcggacatcatcggcaccatcaatggggcgggccagcgcacgggtatgaaggcgttccgcgacagctaccagcttttcgggtactacccgaagatcatcatcgcgccggtgttcagcaccctcaactcggtggccaccgaactcggtgcgctgatgaacagcattcgcgcctttggcttcgtgaccgcccccatcggcaccacgttccagcaggcgatcaccgggcgtgggccatccggcagcatcaacttcaacaccagctcgcgccgcatcggcctgtgcttcccgcacgtgaaggactacgacacggcgaccgacaccgaagtgctggccgacctggcgacttatgccgctggcgcgctctcgcgcaaagaccaggagaacggctactggtggtcgccctcgaacaccgagctgctcggcgtgaccggcgtggaaacgcccatcgacgcgatgattaacgacccgaacagcgaggccaacctgctgaacgaggcgggcatcatcacggtgttcaacagctacggcacgggaatccgcttgtggggaaaccgcagtgcggccttccccagcgagacgcatcccaagaacttcatcaacgtgctgcgcacggcggacgtgatcgcggagagcctggagtactacacgctccagtacatcgaccgcccgctggacaacgcgctcatcgacgccatcgtcgaaagctgcaacgccttcatgcgcaagctcaaggcagacggcgcgatcatcgacggcaaggtgtggttcgacccggcggacaacgaaaccacggaactggcggcgggccacgtcacgttcacctacgacttcatgccgccgacgcctgccgagcgcgtgacctacaagtccatcgtgaacatcgactacctcaaccagttgggcacgaagtcctcctga

SEQ ID NO: 446930 - DNA, 255 bp, Serratia marcescens
atgtctcgctatctctacaccggccccgattccgccgtgacgctcaaggtgagcgacggcaagggcaacctcaacgaccaggacgtgctgctctggaacaaccaggaggtcgagctgcccgccgatcacgatctggtgcgcgtgctggtgcagaagggccgcctcacgccggtgcagaccgcgccggtgcaggtcgaacagcccgccaccactgaacccacggccgcgaccgagaagtcgggcaagaccaagtaa

SEQ ID NO: 446931 - DNA, 555 bp, Serratia marcescens
atgagcacggtcggtgatctggaaaacgccatcgtggcccgcctgtctgcggcgctcacgctgcagggccaggcgcatccgaaggtggatgtgcgtgcctggccggagcgcccacgcgactaccgcatggctcatccccacggcgcggcactggtcatctatcgcggcagcaagttcacacaccgcgcgaccgccgggcaactggtgacctacgaggacgagttcgagatggggctgatctcgcgcacgctgcgcgaagccaatgttccaggttcggcggaggctgccctaggcgtcggcatctatgacctgctcgaaacctgccgtgaagcactcatggggtgggtaccgcagttcgcttcaggccaagtgcgaatcatcagcgtcgagttcgacgactacgtcgagggcacgtggggctacagcctgcgttttgccattcccatgaccaccgtggccaaccgaccccgcccgcctgggccgtggggcgtcaccaatgaggacgccgcaccggcgctctccgaacccgctgtgcagctacctgaaaccacttaa

SEQ ID NO: 446932 - DNA, 456 bp, Serratia marcescens
atggactacgccacctttactcaactcaccgagcgatatgccgagcgcgacctgcggcttatcaccgaccctgacgcgcaggctctggatgcaggccgcgccgagcaggcgttggctgatgccgccgccgagatcgacgcttggctcgaccgccgctacgtgctgcccttggtaagcatcagcggtgaaccgatggccgcgccggtggtgttggtgcgctgcgcgtgcgacatcgccatttaccggctgcaaacgctgcggcctgccgacgatatcaaggatgcccgccaacgctacgaagacgtagtgaagctgctcaaggccatcggctgtggcgacgtttccctgcctggcgcgaagctgcgcgctgacgtggccgacaaccctgcatcgcaatcggccggtatgccgcagttcggccagccgccgtcgctgttcggccggaggaaccgctga

SEQ ID NO: 446933 - DNA, 393 bp, Serratia marcescens
atggaagccactcaagtgaacggcccgcgtgtcactccggccgatgtcgaagcggaaatcgtcagcgagttctgcttcaccgctgccgatggcgtgctcggcgaatcccagctcggcaccgcgcctgcgtcgtgggttggcctggagcgtgtgacgttcgccgtgctgacgttgcgcaacggcaccaaggtggtcggcatcaattacggtgctatcgacccggcacagcatagtgccgagcgtggccgtaccgaggcccgcaaggacgccgtgagcaaggtctacgagttgctgggcttccgcctgcgtgacgaactggcccgcccagtgctgaccgaggccgatgcgctggccgacctcaacggcacgccgcgccccagccgggcaagctga

SEQ ID NO: 446934 - DNA, 303 bp, Serratia marcescens
atggcaaagaaggaacccgtccagttgccggaaggcgaaggcgacaagccgcaggccgaagccgtgcaggccgacactgtgcaagccgataccgcgcagaccagcgcacaaccggaaggccaggcccaggccgagcagaaggtgaagcccgcgcagggcgatgccaagacagtccggcccatcgtgcgcgtcgagcacgatggccaggtctatgaacccggcagcgatgcctcgttcgaggtcggcggcaagcaactgcaatccttgctcgacgtgaaggcggtcgagatcgtgaaggtatga

SEQ ID NO: 446935 - DNA, 930 bp, Serratia marcescens
atggcaattcgcccgtttcccatcgacccgaagctgaccgccatcgccatcgcgtaccgtaacccggacgtggtgctgatcgccgacagcgtcctgccgcgcacgcccacctcgcaggagttcaagtggctggagtacgacctggcgcaaggcttcaccgtccctgacacccgcgtgggccgcaagtcggtgcccaacgaagtcgagttcaaggccgaggagcgtaccgataaggtcgaagaccacggcctcgacgacattgtgccgaacgaggacgtcgaagccgacaaccagggcgtcgatccgctcggcacgtccacggcctacctgaccaacctggtgaacctgggccgtgagcagcgtgtcgcttccaaggtgttcaacccggccagcttctcggccaacaaccaggccacgctgtcgggcaccagccagtggtcgcacgattcgtccgacccggtggcctccatcggcgacgcgctcgactcgccgatcatccgcccgaacatcgccgtgttcggccagcagacctggacgaagctgcgccgccacaagctgatcgtgcaggccatcaagggcacggcgcagggcgcgggcatggtgtcgcgccaggagttcgcggagttcttcgagctgcaagaagtgctggtcggcgcgggcttcgtcaaccaggccaagaagggccaggccgcaagcatgtcgcgcgtgtggggcaagcacgcggcgttcctgtaccgcgaccgcgccgcaggcccgcaggctggcgtgacctacggcttcaccgccgcctggggcaacaaaatcgcgggcagcatcgacgagccgaagatcggcctgaccggctcccagcgcgtgcgctccggcgagcgcgtgaaggaagtcatctgcgcccgcgacctgggctacttcttccagaacgccgtggcgtaa

SEQ ID NO: 446936 - DNA, 381 bp, Serratia marcescens
atgggcaatcccaccctcatcaagaactacaccgccgagggcgacatcgcggcctaccgcatcgtcaagttcggcgcggccgatggcggcgtggcgcaggctgcggccagcaccgacctggtcatcggcgtgaacgcggaactgcccgtggtcgcgggcgagcgcgtggacgtggttcgcgccggtcttgcggacgtggagtttggcggcaccgtggcgcgcggccagccggtcgcggcggacgccaacggcaaggccgtggtcgccgcgcctgcggcgaacgtcaacgcacacattatcggtttcgccgaggtcagcgcggtcgctggcgacatcgccccggtgttgctcgcgcgcggcgtgttccagggcgctgcctaa

SEQ ID NO: 446937 - DNA, 1101 bp, Serratia marcescens
atggacaaaagcaccgcaaaccgacaagtagcagcgctggccttcgagatcgtgctcgaaggccaaggcgcaacgcgcaccgctcctgcccggatgcgcgtgattcccgatgggcacttcgatgccctcgacggccgccccggcaacatggagggggtcacggccaagacgtggttcctggatgccacggccgccgctgccgtcaccgccaccttcaaggcgggcggcgtcaagctccccatcgactacgaacaccaaaccctcaaggccgcggagaacgggcaacccgcgcccgctgctggctggattaccgcgctggagtattcgcctggcgtggggatgctggcgcatgtgacctggacgcccgccgggcgcgcgcacctggagggcgacgagtacctctacatctcgcccatcctcatcttcgacgccgagaccggcatggtgctcggcctgcatagcgttgctctcaccaacaagcccgcgctcggcgcgctgggcgagatcaccgcgctcaccaacgattcgctacgccgactgcccggctctggcaggactaccaacgaggaacccatcatggaaaaaaccaaggtgctggtggccctgggattgcccctggacaccggcgacgacaccgcgctcgcgcagctctccacgctggtgcagaaagcccgcgaccaggagcagcagatcgcggcgctcaaggccagtcagttcgacccggccaagcacatcccgctggacgaacaccagaagctcaccaccgagctggccgcgctcaagtccaccagcgacaaggccgaacacgaacgcctgatgaccgccgcgctgaccgacgcgcgcatcctgccgcccaacgaagcctactggcgtgcgcagccgctggcggcgctgcaagccttcctgaaggaagccaagccgctggcggcgctcaagggcacgcagaccggcggcaacccgcctgcgggcggtgccgacctggacacgaaggactccaacgccatcgcccaggccgcgctgaagtaccagcaggaacaggcccaggccggtgtcaccgtttccacggctgcggccgtggcccacgtcacgaaaggagcgtaa

SEQ ID NO: 446938 - DNA, 384 bp, Serratia marcescens
atgaatttgagggttgttttcgcgttggcggcctgcgtgggccttgttgcctgtggcgaggatgctgacgacgtgccgccaccagagaagcggcaggtgtcggtgctggtgatggacaccagcgcggcagagaatcccgtgctgaagttccgggccgaagacgtggccttgagcgacgtgctcaagaaagtcgggccattgacgaagtcgcagaccatcgcgttgcgctgcgaaggcggctacaacaagcagccgccgctgtattccctcgactttgacatcgtccgtggcaacggtggcgcgactgagaacttgctgggcgttgtggacacagcgaccatgcacgaggtctgcgtgaagaaaatgcggtcgcacaaaaactaa

SEQ ID NO: 446939 - DNA, 420 bp, Serratia marcescens
atgactatcggatgcagattgaaagaggagcgaaagcggctccgtctaaaccagactgatttcgcggcgttggccggggtgcagatcagcgcccagaccaactacgagaacgacaagcggcaaccggatgcgaagtacctggccgctatcgcggaggccggagctgatgtcggctacatcacgactggcgtgcgcaagggcgaggaacacaccacgccagcagcgcagttgctgcggatgaaggtgttagccagcttgctggcggatgagctgcacaagcgcgagaccggcttgtcggaggttggcttccatgagctacttgatgagctatggccggagtggagtgccgatgcgacgccagaaccggcggcgctgcgcgggcgcattgcacacgcattgagtgcaaggggggtgaaatga

SEQ ID NO: 446940 - DNA, 207 bp, Serratia marcescens
atgacccaagaccaaatcgaccggaagatcgccgcctttcgcgccgacctggacgctcgcggtgagtcgctctccgactactgccgccgcaaggggctggactacgacgccatgttcatggtgctgcgtggtcgctccaagggcaaacgcggcaaggcgcatcaggtttttgtcgctctcggcctcaagccgaaccgagccgcctga

SEQ ID NO: 446941 - DNA, 306 bp, Serratia marcescens
gtgagcacaccaatcaagaccagccagacagcagccaaggtgctcgatgtcctggctgcactgctgggccacttcgccaacggcatgacgcccaccgatctgtcgaaggccaccggcctcgatcccagcgccatcacccgttacgtcgccacgctcgaagaaaagggctttgccgaacgcatcccggagaccgggcgcatccgcccttcggtgcagttcgcgcgccacgccgtttctatcctccgcagcctcgacgccgcccgcgagcgtatcgagaacatccagacccgcctgaccaatcactaa

SEQ ID NO: 446942 - DNA, 894 bp, Serratia marcescens
atggcccgcaccgcaaccaagatcgcacccgccgccgaagtcgtcactgacgccgacctgccgggcctgcctgccgccacagcagccgccaaccagctcgccgtcatgcacagcaagcaagaggccgccgcgcaggccatcgccaccgaaatcggctacgaaggttccctgaccatcggtgccctggaagatgaaatccgcttctaccagcgccgcacggtggaatcactgttggagctgggcaagcgcctgctggtgctacgcgagctgacgccgcacggtgagttcgagaagcgcgtggagttcctcggcttcagctacaggtcagccgcgcgctttatgcaggccgctgccaaaacggcgaaatctgccaatttggcacttttgagcacccaggtgaaaagtgccagcgccttcctggagcttgtcactcacgacgatgacgtgctggagaatctgaaggacatcgacgacatcgaccgtatgagcgcgggcgaactacggaatgccatccgcagcctgcaaggcgatcttgaagccaaggacgctgtcctggacaagacgcagaaaaagctcaccaacctccaggtacagctcaagaagaaggtggtcgccgacacggactggcccgacgcgctggagccggtttccgaccaggtcgccgccgccggtcgcaagatcgcccaggccatcagcgagctggagacctgccgcatcacgttgttcgaggttgcgcaggacattcccgaagaacagcgcccgaagtacgaagcggcgctggcccacatcgccgaggtgtacgagcaggcgctctcgcgggcagaagcgggcctgaccaaggaacgcaccaccttcgacaaatcgctgggcgcatacgcgccagaagcggcctga

SEQ ID NO: 446943 - DNA, 1830 bp, Serratia marcescens
atggcccatcaactcgctccagacctgctgcaagagctattcgccttgcgcgaccgcatcgctgcggccccgcacggttgcgcgaccgagctggtgcataactttgccagcctcatcggccggaacccctcgacggtctacacctggctgcgcacccatgcaggctatcgcaccggccgcaagaagcgcgccgacgcgggcaccactgcgctgccgaaggaaacgctgcacttcatcgcagcggccaagcgcgaaggcatccgtggcaacggcaaggccacgctgcccacggcggtggccatgaacatcgcgcacaccaacggcatcgacgtaaccgtctccgagggccgcgtcaacgcgctgctgcgcgccgctcgcatggacgccaaggcgcaggccgccgcccgcaaccacatcacgctgcgcagcctgcatcccaaccacctgcaccagatcgacccctcgctctgcctcatctactacacgccaaagggtcaggcgatcatgcgcgacgaggagttctacaagaacaagcccgccagcatggacaaggtgcggctcaaggtctggcgttacgtccgctacgaccacgccagcggcaccatcgacgtgcgctacttcgaggccgctggcgagaatcagcacagcctgttcgagttcctgctctacacctggggccagcagtccgaccgcatgtcgcacggcgtacccaagatgctcttgtgggacaagggcagcgccaacaccagcttcgccatcaagaacctgctcgacgccctgggcgttgaccacgagacacacgccaccggccactcctggggcaagggcggcgtcgagcagggcaacaacctggtggaaacccacttcgagtcccgtctgcgcttcgagccagtggagagcgtcgagcagctcaatgcttcggcggcccgctgggtacgcgacttcaacgccaacgccatcgagaaggtcgattgccgcctggtgcgcgccagcggccagccgatggtgcgcgacgacctctggcagctcatcatgcgccaccccggcgcactggtgcagatgccgccgcgcgaggtgtgccagtggttcatggcgggccaggaactgacccgccaggtacgcaacctgaaaatcaccttcgctcaccccgagctggggcggcgcgccagctacgacctgaacccctgggccgagttcctgggcaatggccagaaggtgcgcgtcacaccgctgctcatgcagcagggcgcgctgcgcatcgagatcgaccgcctgggcgcggaacccctgctggtgcaagtggagccggagcgcgagttcgacgaatacgggcggcccctgtccgcgccggtagcgggcgaggagtacgcccgcgcgccgcagaccgccagcgagcgtgccgcgaacacgctggccgctgctgcctggggcgatggcaccacagtggatgaggccgagaagaagcgcgccgagcaggcccgccccttcggccacctcaacgatggcaagggcttggtggcgcacagccacctgggccaggccgacctgccgcgccgtctggtacccaacgccggggaagttcaaacgccccaggtgcaacagctccagagcaaggccgcatcggtgcagatgatgctcaccgtgccggaggccgttcgcgccatcaaggagcgcctgggcgatgccgcccctgccgacctctacagccaggtcaaagccgccttcccggacggcaacgtgccgcaatcgtgggctgatcagtgggccatcgcaccggcggcaacgggcactcatggcagcagcgtgattgagctgaggaggttccgatga

SEQ ID NO: 446944 - DNA, 1254 bp, Serratia marcescens
atgagataccccgacagcaaacccacgcccctcaagctcaaggctctgctcaagcgcatgaacgtggcgcaggcgcagttcgcccgcacgctgggcatcagcgcaggaaccttggccgacatcctcaattggggcttccagcctgccaagggctggcccgctctgcgccaagccatccgcatcgaactggcccggctgggcgcgtccgagaaagccatcgccaccgcgttcgagcaccgcgcgggcaccccgaaaaaccgagacgccgcagagcgttccaccaccgcgcccacgtccgacgcggcctcctcatcaactgccaagaaggaaaccgacatgctgctgcaaaaacaaactctgaccccggccacccgcaagcacttcaacctggccgccgatccgttcaagaacgacgtcacgcaggccagcgacgtcttcatcagccaggacatccgcttcgtgcgcgaaacgctctggcaaaccgccaaacatggcgggatgctcggcatcgtcggcgaaagcggcagcggcaagtccacgctggtcgatgacttcaaagaccgcctggtgcgcgaaggccgcgacctggtcgtgatcgaaccctccgtgctctacatggaggagaacgacgccaagggcaagacgctcaagagcgcggccatcgtgcaggccatcatcgacaccgtcgcacctggcgttgctcctgcgcgtgacttggaagcccgcgcccgccaggtgaagaagctgctcaccgccggacaccgcgcgggccagcgccatctgctgttgatcgaagaagcgcactgcttgcccaaggcgaccctgaagcacctcaagcggttttccgagatcaaggacggtctctcgcccatgctgtccgtggtgctgatcgcacagccggagctgcgcgcccgcctgtcggtgagcgaccccgatgtgcgcgaggtcgcccagcggtgcgacatcgtcgagctgccgccgctggacggctacctggccgaatacctcaagttcaagctggcacgcatcggcgttgatgtggcccaggtcatcacgcccgaaggcatcgccgcgctgcgcgaacgcctgaccttcgctcgccgcaccggcaacgccaagtcggcgcagttgaccaccacctacgtgagcctggcatacccgctggccgtcgccaacgcgctcaccgccgccatgaacgtggccgccaacctcggcgctccggtggtggacgccgacatcgtcaaggaggcgtga

SEQ ID NO: 446945 - DNA, 351 bp, Serratia marcescens
atggccgccgtcctgcatctcgtccgccccatcgcccatacggagcatgtcatgagcagagtgttcaccgaggagttcgtttcccgcctggagctggtcaaccgcgtcgcccgcgagttgcgcgcaatgggctaccgcgtggtgcaggagtcgctgtaccccggccaaaccgaccggccaaccatcaccgtgacgccgggaagcaccaagcagctcaagccgctgctggagctgggccacggccgcaccatcgaaacccaggcagatggcagccgcctctgctccatccactaccagggcattcgcgtggcctggaaagaagtgctacgggcgaaggaactgatgcaatga

SEQ ID NO: 446946 - DNA, 486 bp, Serratia marcescens
atgagaacacgctgcccgtcctgcggcgcgaccctatcgctcgacgccctggtcgcccacgaaggcgcgcgtgaagccctcgccgccgccttcaagctctccggcacgctcggcgcagccctggtgcgctatgtcgcgctgcatcggcctgactcccgcgaactgacgatggagcgcgtgggcaagctgctcaacgaggtgttgccggacatccaggcagggcgcatcacgcgcaacggccaggtgtttgaagcgccacaggaagcctgggtgtgggccattgaacaagggctggccgcgcgcgatgcgggacggctcaagacgcccctcaagggccacggctggctctacgaagtaatcagcggctatcggcccgccgtaaacaacctggtggtcgatggtgcgccgcgcctgaccaccggcaagaccacgtccaagaccctgtcgggcatcgcggcgctggagagtttcaagcatggtgcctga

SEQ ID NO: 446947 - DNA, 441 bp, Serratia marcescens
atggtgcctgactggttccgcatcgtcattgccaccggcttgcagaagctactggccctgcgcctggcgggcactccgccagaagacgccatcgtcggcaccgccgaggtgtggctggaggcgatctggaacaacggctgccggtgggatgaacagctcgaccgagagcgcctggagcgcgccttcttggtgctgttccgcgtctgcgatcgctggccgccgccgaagctctacctcgacaacatcggcgctcgcgcaccaccgcgccagctaccgccgcccccggtctcgccggaagtgcgtgaacagaacctggcacgcatccgcgagttaatgaaagacctcaagaaaacgctatcaatgaaggagccacatcatggcaaccagaaaaaaggcaaaagcggcacagtgggtgtgccagagcaaggaactgacgattga

SEQ ID NO: 446948 - DNA, 474 bp, Serratia marcescens
gtgtgccagagcaaggaactgacgattgaagccatccgcgcccttggcgatgcgcagcgcgagctgacgcgggtggagaccgagatcaacgaccagatcgcggctatcaccgccgggcgcaaggacgagatcgaggcgctcaagacgcgcatcgacacgctggccggtggcatccagacctggtgcgaagcgcaccgcgccgagttgctcgcgggcggcggcaaggaagccaaccttatcaccggcctggtcaagtggcggcagcgaccgcccagcgtcagcatccgcagtgtcgataaagtgctggagacactgcgctcgctgggcctgggccgattcatccgtagcaaggatgaaccgaacaaggaagccatgctcgccgaccccacggctgtatccggcatcgcgggtatctccatcgtgaccggcgtcgaggacttcgtcatcgagccgtttgaagtcgaggtcgcgtga

SEQ ID NO: 446949 - DNA, 228 bp, Serratia marcescens
atgaagatcgcacacaaggctgcattggtgctgctgctcaccgccgtcctgggcttcatcgcgatagccatctaccagcgcaacgtggtggcctttatctggtttctgttcccgctgatcgtgttcggcacggatgcctacgaaaccttcatcgccgcaccgcgcagggcggggcttttcgacaaatatggcaaccccattgtcgtcaaaaaagtggaggacgtgtga

SEQ ID NO: 446950 - DNA, 237 bp, Serratia marcescens
atgagcagccccctgcaactccaagtcaacagcaacggttcatggaaaaccgtcgtttccttcggcctcggtgaacaaacaatggagcgcgtaaagcacgctgcacaggcgctctatgaagcttcaccgaccacctattggcgcatcacaacgggcgagggacgctcgccccgcgtgctggcccttatgggccgcaacacctatgggttgtgggcaacgaagggagaacaagcatga

SEQ ID NO: 446951 - DNA, 471 bp, Serratia marcescens
atgaatcacgacaacctcatcaaatgcacgcgctgccgtcatgcctgcatggaatcggcgtggctcgatgtcccctccaagaaatacggtggttgcacggaaaagacatgccctcgttgtggctgcaaaagctactacgacatgactccacaggttgcctggtgctgggcttccggcttgatcgagatcggaaaccatctgcccgccagtagcttggatggtagtggagcgatcttgatcgccgaagggccacggtacgcgctgaagggtgccattgatgtcgccgcccgacacggtaagggtgccagtgagggcaaattgttggtgccggggattccagaggcagagaaccagaaagccgcgatcagggcgctggatcaatggctggattggaaccgcaaatgcaggcgtgggaagcgcgacggcatcgtctggattgaagcgccctcatcgctgggagcggccctatga

SEQ ID NO: 446952 - DNA, 651 bp, Serratia marcescens
atgaaatccgccgcccgcaccgccgctaatcaggatgctcgccagcgcctcatacgtctcattcatgtgggcaagcgcgagctgggcctggacgatgagatctaccgcgcgctgctcatgggcagtgtgcagaaggattccacctcggccatgagcgtgccggagctggagcgcgtcctggagcgcatgaagcgcagcggtttcaaggtgcgggtcaagtcggcccggcctcctgctcaaagcaggccgggccgtcccctggcgcaatacccggaggcgcggaaggtacgcgccctctggttgttcctgcaccagttgggcgcggtgaagaacccatccgaggaagccctggcggcttatgtgaagcgcatcgccaaggtggacgcactgcaatggacgaacggcaaccagacggaagccctcatcgagactttgaagaagtgggccatgcgctacctgcctggccaggtgagggaaatggctcaaaccttatcggaagcgatcaagaccggcagcgtcacattgagcgacgaggaactgaccgggctgcgctccacggtcggcctggcgcaaacccggcagacctttgaccccatgcaaactgcttgggatgcactgaaaacagcactcgataagagggagaaaccatga

SEQ ID NO: 446953 - DNA, 366 bp, Serratia marcescens
atgaagccagagagcacgatgatgcacttcccggatggatacccggaactgctcgaacagatcggccaggtgatctacaaccggctggtcacacacgaaattgcgcaagctacgtcgcttgcgttcaccatcaccgaagccatccgcacggagatcggaggcgttcaacagtacatcccgcgcggcttgtcctatgagctgtcacaacgcgatgagcaaatctggtcggagttcaacggggacaactacaagatgctcgcgcacaagtacaacctcacggaaatgcaggtgaggaacatcgtgaagcgggcgcggcagcgcgacctaagcacccggcagatgccactgctgccggacggaaactaa

SEQ ID NO: 446954 - DNA, 444 bp, Serratia marcescens
atgaaaaattctcgctccctagacgatcttttgccgcccgtgcgctcacgggcgcaagccttcctagccgcgtgcaagcaggagggcatcgacatcctcgttacctccacctaccgcgacctggagagccaagctgcgctctacgcccagggccgaaccgcccccggcaagcgtgtaaccaatgccaagccgggccagagctatcacaactggcgcgtcgccttcgacgtggtgcctctacgcgacggcaaagccgtgtggaacaccaccggcgctgacggcaaattgtgggaacgcatcggccaactcggcgaggcggctggtctggaatgggcggggcgttggaagacattccgcgaatacgctcatttccagtacacaggcggcctgtcgctggcgcagctcgccgctggcaaggttccgcaggaggtcgcctcggcatga

SEQ ID NO: 446955 - DNA, 243 bp, Serratia marcescens
atgaatctcatagacctggtctcccgcgacggccgcctctcacacacgaagatttgggccaacatcggctacgccgccgccaccgtttcgtttgtgcgcctgaactgggtgggccaggccgagacggaagtctggtgggcctacctatcctgcgttgctggtgccgtcacggcctcgaagttcctctcgctcaaatacagcggctccgctgcccgcgccgccaatgcggaggagaaatcgtga

SEQ ID NO: 446956 - DNA, 501 bp, Serratia marcescens
gtgagcgcggccgtcatccagttcttccgtgagctgccctggaagctgctgggcttcattgccatcgtcaccacctccgtcatcggtggttgccactacggcgaatccaccgtcaatgccgcatgggatgccgaacgtgctgcggcaaagctgaccgccgcgcaaaccgctaccacccaggccgaggtcacgaccaaggtggtgacgcaatacgttgaccgcgtccaggtggtaaaggagcgcggcaaggaaatcatcaaggaggttcccgtctatgtttcgtctgctgttacttgcgatctgcctggcggtttccgcgtgctccacgatgccgccgcccaaggcgaacttcccgaccccgccggagttgctgatgcgcccgccgccagcgttgaaaccgctgccgccaccgtcgtcgaaaactacgccacctatcacgaagtcgccgaacagttgaaggcgctgcaatcgtgggtcaaccagcaggagcaagcgcaatga

SEQ ID NO: 446957 - DNA, 282 bp, Serratia marcescens
atgaccattcaagttgatttttggcacctggtcggtctgctgctgggcttcatcggcaccctggcttcgttcgggaagattctgctgcgacagctcgacgcccgcatcgaccagcaaaacgaccgcgtgagcaagctggaaaaccagctcaacgaaaccctgaccaagctgccgctggagtaccagcgacgtgaggatgccatccgcttcgagaccgtgctcaacgcaaagctggatgccataggagcacgaattgaacgtctgatggagaagtctgtatga

SEQ ID NO: 446958 - DNA, 312 bp, Serratia marcescens
atgacccctgacctggaaaaagcccggcgcgaaaacctgcgctggctcatcttgttggcactgaactccgcacagccggtgggtaccagcgaacaagtggtgctgtcggcgatcacgccgatgctgcccgacctgaccacactggagctgcgccgcaacctcgactacctggccgcgcgcgaactcatcacgatcactggccgcgactcgcagccgcagtggttctgcaagctcgaccgctatggcatcgacgtggtcgagtacgcggtcgcatgtgagccgggcatcgcgcgcccggccaaatactggtga

SEQ ID NO: 446959 - DNA, 522 bp, Serratia marcescens
atgcctcgacgttccaaggtggaggcgcttcccgcgcacgttaaagcctggctcgaccaagcgctggtggagaacaacttcagccagtacgagctactgtccgccgagctggccaagcgcggcttcgagattggcaagtccggcttgcaccgctacggccaggcgttcgaggagcgcctgaaaaccctgcgcgtggtcactgaacaggcacgcgccgtggtacaggccgctcccgatgacgatggcgctgtcaatgacgccctggtgcggctcacgcaagaaaaaatgttctccatcctgatggagatggaggtagaccccgacgctgtcgatctgccgaagctggcccgcgccgtggccgagttgggcaaggcttcggtcgcgcagaaacgctggcaggccgaggcccgcaagcaggcgctggaagaagctgccgcgcgcgttgacaccgccgcccaggcgcgcggcctcaatgccgacgaagcccgcttctggcgcgaacaagtcctgatgggcatgtga

SEQ ID NO: 446960 - DNA, 1689 bp, Serratia marcescens
atgggtattcctgcctctctccccgataccgagcgcatcgtcgagtgggacgagctgccggagaacgtccgccaaatacctcctgacttcgacccatttgccgaaggcgtgctgatgaagcaccagtcggactggattcagatgcagcaggacttggacatctcggtgtgcgagaaaggccgccgcacgggtatcacgttcgcgcaagcactgaccgacacgatcaccgccgctaccgccaaggaagcgggcggcagcaacgtgtggtacatggccgacacgcgtgaaaagggtctggaatacatcggctatgtcggcaagttctcgcagatcgtggcgcgcggccaggcaacgcgcattgagcagcacatcttccttgaccagcgggccgatggcaccagccgcgagattcaggcgttccgcgtccgcttcgccagcgggttccgtgtcactgcactttcttctcggccggaaaacatccacggcctgcaagggctggttgaccttgacgaagcagccttgcacaaggacgtttccaaggtgctcgaatcagcgacggccctgctcatttggggtggccgcattcgcgtctggtcatcgcatcgcggcaagaaaaatgccttccaccagttggtgaatgatgtccgtgccgggcgctatgggaaacgtgccaggtgcatccgcatcacgttcgatgacgccgtggcgaatggcctctatgagcgcgtttgcgccatgaaaggcatcccagcgaccgaagaaggcaagcgggagtggtacaccgccatccgggccgcctacggcccgcgaaaagcagccatgcgcgaggaactcgacgtgattccacgcgacggcgatggctcggcaattccatcggtctggattgagcgggcgatgccggaagtgcgccccgtgctccgtatcgctttcagcgacgacttcccgaagcgttcggaaaaagagcgcgaaatctggtgcgcgtcgtggattgccaccacgctcatgcccgtcctcaacgaagcgcagcgcggctttaccgggcgttgggcaattggcatggacttcgcgcgccaccgccacttctctgtcatcaagcccgcccgcatcacggccgaccttcgccgcgacgtgcccttcatcctcgaactggccaatgccccgactcgccagcaggagcagattctctgggcgctgctgggcgagctgaagcggtggactttcgctggcgatgcgaccgggcctggtcaaacgctcatggaatacaccggcgacaagttcggacgcgcggtgttcgacgaaaaaacgggcaactacatcggcggccctgtccacgaagtcacgctctctcgcgcctggtacggcgaatggatgggcaagtacatctcgctgttcgaggacggcttcatcgccatgccgcgcgacgcatcgctggaggatgaccaccgcgccgtcgagttcatcgacggtatcccgatggtgcccaagctggagcgcaaagacctgaaggacgccgacctggtgcgccacggcgacggcgcggtggcgggcgcgctgatgaatttcgccgcgctcaacccggtgaatgaatggctggccgagtacatggaagtgccacggcgcgatgcgcaggtcgatgagatggacaccgacaccgatcttgaatacggcggccgcatggctggctggtag

SEQ ID NO: 446961 - DNA, 1611 bp, Serratia marcescens
atggcaaaacttctcgaccaatacggcaaccccatcaacatggcgtcgctggatgaggcgcagacctcgcaactaatcaacctgcaccgggaggtcgcgcaacatccctcgcgcggcctgacgcccgcacgcctgaactccatcctggagcgcgcggaaaacggcgacctgatcgcccagcatgagcttttccgtgacatggaggaacgcgacggccacgttttctcggagctgtccaagcgcaagcgcgccgtcatcaagctgccctgggacatcgtgccgccacgcaacccgagcaaggaggaggaagaagccagcgcctacgccaaggagctgctgctagacatgaccgacctggaagacctcatgttcgatgcgctggacgccatcgggcacggttttgcgcctatcgagtacgactgggacagggttggtggcgactggacggtggtgcgattcaaccaccgcccgcagacgtggttccgcttcgaccgcgacactcgcaccgagctgcgcctgcgcgacagctctctggacggcgcaccactgcgcccgttcggatggatgatgcacgtccacaaggccatgtccggctacaccgtgcgctccggcctgggccgcgtgctggtttggccctacttgttcaagcacttctcggttggcgacctggccgagttcctcgacatttacggcctgccgctgcgcatcggaaagtatccgagcaacgccagccccgaggaaaaggcaacgctctggcgcgctgtcgcgggcattggccacaacgcggcaggtgtcatcccctcggcaatggccatcgagttcgaagaggccgcgaaaggttcggaaaagccgttcgaggtgatgattaagtggtgcgagcagacgcaatcgaaggccatcttgggcagcacgctgaccagcaccaccgaagccaccggcctcggctccggcgtggccgaaatccacaacgaagtgcgcctggatatccgcgatagcgactgcaagcagctcgcgggcacgcttacccgcgatctgatctacccgcttctggccatcaacaagggctgggccgacttccggcgctgcccgcgcctggtgttcgacacgaccgaaggcgaggacatcaaggtctacgccgacgcgctgccgaagctggtggccatcggtatgcaaatcccgacgcaatgggcgcacgagcggctgcgtattccccagccgacctcggagcaggaagccatcctggccacccgcgccgccgctccggccgaggaggaaccggccacccccaagactaaaaaggctgacgccaaggccgcgctgctgaccgcgctgcgcgaggaagcggcggccggttccaccttcgccgaccaggccgtgctcgacggcgcgctggaggagctgtccaccgtgctgcaaccgcaggcggtggcttggctgaagcctgcgctggacgccttgggcagtgccgccagcccggaggaagcactggcgctgctggccagcgaaaacccgttgaccgatgatgcgctgctggtcgaagccatagcccgcgccctgttcgtgtccgagctgttcggcgcggatgctgtgcggcaggagctgactgaatga

SEQ ID NO: 446962 - DNA, 789 bp, Serratia marcescens
atgaccatcgacaagtccaccctcctggccgccttcaacatgccgcccgagcaggcggtcgagttcttgcgctccaagggcttgcaggtcagcgagtcctggcgcgacctctggcagacagcgcaccggcgcgccttcaccgtggcgcgctcggcgggctatgacgtgctggaggacatccgctctgcgctggtggagtccatgagcaagggcgagagctaccagcagttcatcgacaaactcacgccgaccctgcaggccaagggctggtggggcaaggagatcgactacgagaccggcgagatcaccgtgtaccctggaaccagccgcccggtggagctgggcagtccgcgccgcctgaagctgatctacgagcagaacatgcagaccgccttccaggccgggcgctggcgcggcatgaaggcggccatggccacgcatcccttttggcgctacgtggccgtgctggacaaccgcacacggcccagccaccgcgctatgcacgggcgagtgttccgccacgatgatgcaggctggtcggtcgcctatccgccgaacggctggaagtgccggtgccgcgcgcagccattgaccgcctcagccgtccggcgcaacggctacgaggtcgagtccgccgaaggtcacatccaggaggtggacgtgccgcagcgcgacggctccacgatcaaggtcaagcgcctgacgctgccgggcatggagaggccgttccagcccgacgcgggctgggactacaacccggccgccgactaccacggaggtcagccatga

SEQ ID NO: 446963 - DNA, 486 bp, Serratia marcescens
atgaccgacatgaacgtcgagatcaacgaccaggcaagtgccaaactggcagaaatcagggcacgcctccagaatcccgagccgctgatggctggcattgcggctgaagttctgtcattgaccgaggaagcattcgagcgcgagggcgaggtgggcggcgacaagtggaagccgctggcactctcgaccatcaggcaacgcgagaaggctggccactggcctggcaagaagctgcaacgctctccgggcggcctggccccgagcgtccagcccttccacgatgccaaccgggccggtttgtccgtctcgaagccctacgcggccatccagcagctcggcggcaaggccgggcgcggccagaaggttaatattccagcccgtgggtacatgccggttaggaaagaaggcagcgacctggagttgacgcctacggcgcggtcggtgctgctggagatgatgaccgacttcgtggaagccggtatttga

SEQ ID NO: 446964 - DNA, 132 bp, Serratia marcescens
atgacggcgctggattatcccggcaccgaggcgctgctggtggcggtggaaagcgagcgggcgcatgcgttttaccggcgcgaaggctttgtcgaagcgccgaagtattttgccaagttattaaaccagtaa

SEQ ID NO: 446965 - DNA, 423 bp, Serratia marcescens
atgatgacaaaagagcaattcgttataacgatgacgggagttccctgggaaaacaggagttgcagttttcaatctgcagactgttggggattggtcactttgtattaccggcatgtgctcggcatagagatacaccaaacgccggactacgaagccggcagcgacttcctgacgtgtttttccggtgatgttgtgttctggcatcaggccgagaaagcggccgacggtagcatttttatcgcgtattacggcggtcagccagcccacgttggtttggtcattgatgggcaagcattccatagccgtggcgaagcggggcatgtgcgctttgacaagctgcggacgctggagcgagttttcaccaaattggagttttacgactatgccgttgatcgaagttcagcgcgtgccggggttgcctaa

SEQ ID NO: 446966 - DNA, 2604 bp, Serratia marcescens
atggcggagcaggacggtgggagcttggtttaccaagttgatattgaaactgcaaagatggtcacaggtagccgtcaagcagctgtcgtgttaggggagatggaaaaacaagccaatcgttcatctaaagccgttgatggactgacatcctctgccgatagtgctggtaggtctatgtctgggtttaagtcagtgttgagcggtgttgcaagcgcaatatcagttgctttgattatcgattacggcaaggcttttttgacagtcgccgataacattacgcaacttcagtcacggatcctcaggctatcaactgatgcctcaacagcaatgtctacgtttgaaacgttgacggccatagcatcgactactggcgctagcctcagggatacggccaagctgtgggaggcgatgacttccgcgctaaaagggactggagcaaccaacacccaaatacttgcattaaccgatacgcttcagaaaatagggcgagttggtggctcttctacagaagagatggcaaatgcattaagacaattcggccagtctatttcctccggcacagtaagagccgaagaatttaactccatccttgaacaaatgcctgaacttgctaggcagattggcgcagggatggggctatcaatggggcagttgcgacaagcaatgctcgaggggaagttgagtgctcaggatgcacttaatgcaatcatgaagcagtcatcggcagttaacgatgaattttcgaaactcccaaggacgatggatcaggcgagcaactcccttacgatttcccttcaaaatctaattgggaaaatgaacgaagctatgggcgctagcgcaaccatggtgaagattattgactctattagcgcagcaatagataggctaagtggaaaaactgagacggcatcacagaagattgcagatctcacgtcaactggcgaaatgtatgcacgaagagcaagaacgtggtcatggcttggccttgatggctggtcagaacaaaatcaggctttagcagctctcagcaacaaagcagccacgctgatcggcgacatgaattcggtggcaaaagcttcagaaaacgcagccaatggaacgattaatttcaataactcaggcactgcaaaccctaagcaagatgcattggtgaaacgttctcagcgacgcatagagctatcgaaacttgaaggagaagcaaaggccagactacaggcattatatgacgcggaagatgctggaatacctaagaatgatccgcgagtgaagaaactccaagatcagtatgcggagatagagcggaataccaaagcccagaaagaaagcaatgcggagggcaagaagtcagccagccaggcggaaagcgttgcccagaagctggcaaacctgaagcagcagtcagagcttgcggcggactcaacaagtgagcttagccgagagcaggcaatcctgaccgcacaacaatcactgggaaaaggagctacacaggcccagatcgctgaggctggtgcttacgccgccaaaaagtgggacatggccaacgctatcaaggcgcaggcggccgcagagaagctactcccggaagccaaagagaatgccagctacgctcaggacgtgaaggacttaaacacggcgttagcggccaagaaaatcagccaggagcaatacaacaccaccgctgagcagctggagcaacagcatcagattaacttggcaaaaatccgggctgaagccgtggtaagtcctcaacagcaagctgccgggatggttgacccagtgcagcagcttgccaatgagaatgcgcagaagctggcgttgattcagcagtttgagacggctggtattctccagcacggacaagctatcgcacttaaaaatgctcaggacaccacctatgagcaagcgcgattcgatgccatatggaacctctggaagagccaagaccaggtaaatggcctgatgggtacggctattgactcactgagttcgggaaccgcaagcgctctgtcaggcatcatttccgggactcaatcagctggtgatgcgatgcgtaacttggcagctggcgctctcaatgccgtgctccagcagttgattcagatggccgttcaggcgttactcgtgagaactattctcggctcatttatgggcggtcttggcgctataccaagtttcggctcaatatcatcatccgtcggaagcgttggtgcgggtgcgggaactggcgctatggggatggggacgaactggcagagctacgtttctggagccaggaagagcggaggcccggttgcatccaatgggctctaccgatttggtgaaggcggtaagcctgagttatatcaatccagtacaggcaagaactatctgctgcccggcgagggtggcaaagtgatcagcaacaaggacatgcaaggcggtggtggtatcaatgtgaatgtcagtatcaacaacaccaacggttcatatgtagatcaccaggtaagcagtgatggcaatggcggtgtctcgatggagatatttatcgctgacatggacaacggtggcccgatgagccaagccataagtcgaaatcatcaggcccctcgtagggcaacccaataa

SEQ ID NO: 446967 - DNA, 579 bp, Serratia marcescens
gtgaaagcaacaaaagatcgtgacttacctggcgggaaggaaattttttggctcgatcacctatgcttgacttgcataccaagccaaagaggaaattggcacgtatgcagttttaagcgagaggaatcaagatgggacgacacaatagccctgcttaaaggtgatgaagttcaattctctgtaaagctaggaaatggcagctatggtaaggcgcactgtgtttctctaaatggcaccttcatcttcagtattcatggcgatccggacaatcgcatgaaaggacttatcgtcatgaatagttcacataaagagctatttagggtcgagacatcttgtcacctgataagtgctgccatatctgagtttggccaatacatcgcgctttcgtttgccatgggtaaagataaaactgacccgtactctaggcggttagaggtcattgatctaagtactggtgaggtaaaaatgtcggtggtgaaaagcgacaaaatatactattccagccttgacgttctcgagcctaatggtgatgtttttgcaacgtacaaaggaaaatccgtgctggtagatgtcaaatag

SEQ ID NO: 446968 - DNA, 804 bp, Serratia marcescens
atgactaactccatctcagtatcattccacggctctgaactctttgtcgtcaaccacaatggtgatccgcttgtccctatgcgcccaatagttgaaggcatgggcatggattgggcttctcagtttaccaagataaaacagcgctttgcttcaaccgttgtggaaatcacaacgcagctaccgggtgataaacagcgccgaaaagtcacttgcctcccactgcgtaaactggcggggtggctccagaccatcagcccaaacaaagttaggcctgaaatccgcgataccgtaatccagtaccaagaagagtgcgacgacgttctctatgaatactggacgaccggccaggttgctcgcaaaccggaaaccactgtagacgaccgcaccccacttcggggcatagtaaaccgcatcatgggcaagtacggcatgacctaccaagccgtctataagctggttcacaaagagtttggcgttaatcacattgacgagctcacgccaaagcaaacagcagaggcgattgagtacctcgcaaccaaggctatagagggtgaattcctcggtaagcagccagagctagtaaacttcgacttcgaaatgtatgtgcataacgccaacgttgtctgcattcatctcgaatacatccggcagatttggaagcaagagctacatccggcacttagattaattggctcacctttggccgttaagctttacgacagaatcattgatgctggggccatttcctacggaatcagacatggccttgagaaagcatccgggctcaagggtctgcaacactag

SEQ ID NO: 446969 - DNA, 399 bp, Serratia marcescens
atggcgaccaaaaacaaagtcggtcgcccaagtaaacttgccgagagtctggaaaaggcaaaagaatacttaatgggcggctatgaggcggtaggtgatgttgttcctagcgttgctgggcttgcttgttacctaggcgtaacccgtaagtctatttatgaatgggcgaagggaagtgacgaattatgtgacacgttagagggaattctctctatgcaggaaaataagctgattaacaaggggctttctggcgacttcaacgctaccataacaaagctaatgctggccaaccacggatacagcgataagagcgaagttgataacaaatcctccgacggcagcatgtcgcccaagccaacagtcattcagctactgccagtcgagccgaaaaatgagtga

SEQ ID NO: 446970 - DNA, 165 bp, Serratia marcescens
atgaataaattaatgagtgcgctggctatccttcttgggtttgatgtgaaacaggtcgaggagaaggagaaagagagggtgattctttctgagctagaaagggattggcgagcccacaaggcacagcgtaaaatactcaataatatttccattctaggtcgctga

SEQ ID NO: 446971 - DNA, 555 bp, Serratia marcescens
gtgaaaaatgaacgtctaactgcaaaatatcttagtgagtgcttagattatcatccgctgactggtgattttatctggaaaaacagaccagctaatcacttcaaagatatgagctatcaggctaggtggaataaccgatacgcaggtagcaaaactggaattattggctccactgggtatcttcgaatctcgattgataacaagaaatattactctcaccgactcgcatggctgatttcgaaaggagagtggccgcagtatatcgatcacatcgatggatgcagaacgaacaataaactctcaaatcttcgatctgtaaccagatcagaaaaccaaagaaatcaaaaactgcgctgccgcacatcctcaggccacctaggcgtgtctgtagatagtaggacagggaaatttattgctcatataaagtttggcaataaacgcattcatctcggagtgttttcagatctatcagaggcaatcaaagccagaagcgatgcaaatgttaaatacggatttcatccgaatcatggaagaaaaaccggggaggcagcctga

SEQ ID NO: 446972 - DNA, 234 bp, Serratia marcescens
atggataagctacgcgaagagtttgaacagtggttctctgaaaaatacccacttaaaaagccgtcggtaaggaaactaaaactctgggaagcatggcgcgatagcagagcaagcatcgtggttgagcttccagcaaagaacgatccggcagatatgtttgttagtgatgcctatgatgctgaagaagtatcagccgttatccgctctatcggcctatcaatcaaaggggagtag

SEQ ID NO: 446973 - DNA, 216 bp, Serratia marcescens
atggataagttaactcaaaagcaaattgagtggctaaggaaaatgcgcgattcacatttagggtctgtatctgtaatgacggatcgccctccaacatccttaatgcgaaagcttgagaaggcagggctttgcaaggatgtgatgagcacgttctggaaaattacagagcatggacagaaaaagattaacgaaatcgacggagtaaaccatggataa

SEQ ID NO: 446974 - DNA, 852 bp, Serratia marcescens
atgagcactctcgctgctaatatcgtagtaccgatcaggcctgttttacaggccgtggagaaacgtgtggccgatacagacgatggatatacccgtctggcaaacgagctgtacgatgagcttatcggcgcaaatctgacacggaatcaggcgaaggtagctcatgctgtttgccggaaaacatacggcttcaataagaagatggatcggattgctgacagccaaattgcagccctaactaatctgccaaggcagaaggttaacaaagcaaagaacgaactgattttgatgaaggttttactgaaagatggcgctctgattggcccaaacaagaatttgggagaatggaaaataccagagtgtcaccaaagtggtgtcgttgtcaccaattcggtgacaaaaaatgtcaccaattcggtgacaagggtgtcaccagaacagggacacacaaaagacactattacaaaagaaaagaaagacaatattaataaaccccctatatcccccaaaaaatcgcctcagaagttcgacccgatgacagcagagttgccggaatggcttcctgttgaaacatggtcttcatgggttacctaccgcaaggagatcggcaagtcgattaaatccatgcagagcgtaaccatggcgattaacgtcctgctgaaaagccgtgaaaaggggtactcccctgaagagataatcaaccaaagcatcgccagcgggtggcaggggatattcgaacctaaggtagccaagaatcatcagccagctcgacccaatcagcgggctctgccagagaacttcgccaccaaagattacggacaaactgacatcccttcctgggcgatggagtga

SEQ ID NO: 446975 - DNA, 216 bp, Serratia marcescens
atggaaactttatctgaccgactcaaacagaagcggaatgagttgaacctaacgcaagcgcaattagctgaattggctggcactaagcagcaaacaatccaacaagtagaggccggcctgacaaaaagaccaagggtcttggttgagttggctcaagcgttggggtgcgaaccgctctggttgttgtacggaaattctggtggcaaagccgcctaa

SEQ ID NO: 446976 - DNA, 729 bp, Serratia marcescens
atgagcattgctgaacgagtaaaaatgagaagaaacgagcttggtcttacgcaggctgagttagctgtgcgtgctaacacctcacagcaagccattcagcaacttgaagacggaaagactaagaggccgcggtatctacccgaactagcatcagcgcttggctgtgatgttagatggcttctttcagggcaagggatggcaaagagcgccggatctgtaccccatcacccaggttcaactatcccacctgaaagcgagtggggaactgttgatgcatgggatagtagaacgcctcttccagatgatgaggtcgaagtgccatttttaagggatatagagtttgcgtgtggggatgggcgagtgtcagaggaagactataacggttataaaatacgattttcaaaagcgacgctacgcagggttggagctagcactgatggttcaggcgtgatttgcttcccagccaccggaaatagtatggagccggtcatcccagatggcgcgacagttgctgttgacgttcataataagcgcatagtggacggcgagctatacgccatcaaccagggtggcctgaaacgcattaaacagctatatcgtcggccaggtggtaagttgacgatccgcagcttcaaccgagaagaaaacgacgacgaagaggcgcttgaaagcgaagttgagattgttggatttgttttctggtactcggttatcagataccgaaagtga

SEQ ID NO: 446977 - DNA, 327 bp, Serratia marcescens
atgagagttctgattgtttacgaaaacattcctgaatcaaccgacatgttcatcgttgatgctcatggtcaggagctggaagatttgcgcatggctcacggcaactacgttaacgctatagacaatgaggagactgaaaaggcaatggcaaggattagccttcgccttggctctaaggaatccgataacgcagagacaagagaatggtgcggccttgaagagtctgatgttgcgatgtgggagttcactggattaacaaatccagaacctatttctgtgtctgattcagaaatcgacatggtcattgtcactggatttgtttgctag

SEQ ID NO: 446978 - DNA, 228 bp, Serratia marcescens
atgagcaaagagacaggtggtcaggcgttcccgtttacgcctcatattgaatcaaagaatacggaagaattagggatgtcattgcgtgattacttcgctgcaaaagcaatgcagggtgatttatctttcgggacaatagagccaaatgctagtgatgagataattagtcttttcgctaatcactattatcgaatcgctgacgccatgctgaaagctcgcaacaactga

SEQ ID NO: 446979 - DNA, 315 bp, Serratia marcescens
atgaccgaagtattgacctatgaagccctgaaggctgagcgcgatgcgctggctgtggagaatgcggcgctgaatgaaatgaatagcagcctttgcgccgaacttcgtgaatatgaaagtgatgattgtcagttcggcccaatgcctcagtctgttgttaactgttttgctctacacaccccagccactgacgcagcgcttgcagctatccgaaatgaggctaccgcgcgagtcctcaagcatctgtgtgactgtcagctcatcagcgctacggtcgcggaacttaaagctgacgagctgcgggaggccaaatga

SEQ ID NO: 446980 - DNA, 492 bp, Serratia marcescens
atggacaataagttgagcgaactgagcgaactgagcaagccggtggcgtggaaaatacatcaccacgatcgttactacttcgaagagaacgcggatgtagtggctatcgcagaaagcgtggggaaggcaaaaggcgatgcggtctactcgcaagagtacgtctccgccctgctggcagagctggaagcgaaggataagcgcatcgccgagctggaagcaaaaacagcaatgactatgggcgtcggcagtgggaatggaaaccttttcgtgcatggtgattacgattccataaaagctgcgcaggccatagttctcgaaaatgaatctctccgcgccaagctggatacgccggtgcggttgactgatgaacggacactatgggcgggtgaagatgattatgacaccggccacgttaaaggctggaacgccaaccggcttgagcaagtcgcgctgctgaaaaagcagggcttcaccgtagagggggatgagtag

SEQ ID NO: 446981 - DNA, 399 bp, Serratia marcescens
atgacactaacgactgaatggctgatagagcgactgaaaaatccgcgctccggtacagagtttgagttaatcaacgaggtgttggctaaccgggaggcgcagccggtgtatcagtaccgcatgcgaaacccgtacaacggccaggtgacggactgggaaaccatcaagcctgaacaggtggacttcatattgaaggaaaccattgcggccaacgtagagtttcgaatcattgccgccccgccagcgccagcagtgccaagcgaaattatgaactgtctggcatttttcgccagtgtaattaagagcggtgagtcgtggacggaaacctgtcaacaagattatgacgttgcgcgtcgcgccgcaatgctggcagcagtgccggagggtgggaatggctag

SEQ ID NO: 446982 - DNA, 240 bp, Serratia marcescens
atgaaagagattatccgcggtgacactgagcctgttcacgtgtttgctgctcacaaagcaattgatgagcatcttcacaaatacggctcaggcaacaaatatcaccccatcgtctacagcatcaaataccgcaataaaacctaccaagtcgaagtcgtcacacgcaacacaaccatcgcagccacggtaataactggcgttcgcaatctgtctaaaattcactatgagggcgcggcatga

SEQ ID NO: 446983 - DNA, 1044 bp, Serratia marcescens
atgccgatcttcaagaggggtaaaaaatactggattgatatctccgcgccagacggaacgagaattagacgctctgctggcaccgaggaaaaggcaaaggcccagcaactgcacgacaagttaaagcatgagctatgggccgtagccaacttggataagcgtccggagagactgttcgaagatatggtcgtcttggcgctgagagatgccgaagggcaatcaagttatcagaacaagcagatttacgcgcgatactggcttggcatcttcggcggtagggtagtgtcatccatcaccggggaggagatagtagataacctgccgactcataacctggccaccagaaatcgcctggctaacgccacaaaaaaccgataccgatcattcatcatgcgaggattctcactcgccgataaaagtgggtggcttgatagacaaccttacgcgcagtcgttgagagagccaacggttagagttcggtggatagaaaagagcgaagcaaagtcgctgatcgcaaatttacaccatcaatggatgaagtgggtgtgttcgtttgctttactgactggtgctcgtctgggggagattttgtcgctgaaatggaaggacgttgatctgggtcgcagggtggccgttgttacagccgaaaacgcaaaatcagggaaagctcgaccgctgccgcttaatgatgacgcggtggcggtgatgagggaaatcccgttcgacaatgagtatgtgttctcggctgacggcgaaaaagaagggtacataaacaggacggattttgaacgcgcactcttgctatctggtatcacagattttcgctttcacgatctccgccacacatgggcaagctggcacgttcagaacggaaccccgttgatggtgctaaaagaactggggggatgggagaagctggagatggtcaataaatacgctcacctgagcggtgagcatttgagcaagttcagcggcattgtcacgtttttggcacaggacaccgaaaaaacaaatgacgccgctagaatttctcttgtaatttaa

SEQ ID NO: 446984 - DNA, 636 bp, Serratia marcescens
atgcagaatcaggacaggctcaatgagcgtacccgcgaaacccaggaacgtcttatccgggcaggcttgagcctgttcagcaaacatgggctcgaaggcgtgcgcacccgccaactggccgaaacggcgggggtgaatcagtccgccattccctatcattttggcggcaaggagggcgtctatctggcagtgctggaacaggtagccggtagcattgtcgcccatttagccttgccgcgccgcctgctcgcccggcaaacgccggcggaagcattacggacattgatgcaagatttcgtcaccgccttgctgggctcggaaacatctgcggcaagcagtctgttgttggcgcgagaacagctccagcccagtgctgatttcgatgctctgcatacccgtttattctcaccgctgcatcatgccgtgagcgagttggtcacggcaatccgcagcgaccaacctgacctgaaagagaatatcctgcgcgcgcacgctattctcggccaggcgttgtccttcgccgtcgcgcgcgaggcgctgttgcgaaggctgggagaaaacgcgctgtcgccacaggagatcgcgcagatcgccgctttggttggcacgatgtcagtcgccgccgcgcaaggctga

SEQ ID NO: 446985 - DNA, 1266 bp, Serratia marcescens
atgctgaaacaccctgaaccgttatctctggccgaacgcgaccgccgctggcagctggcgcgcgacattatgcagacagagaacctggcggcgttgatcgtttacggcgaccgggaggcggcagcccccgccggttttgcgccggattgctatttcaccaacgaccgtcccggctcgatcgtcgttttcgtcggcgatgaatcaccgcgcgtttatactttcgcctcgatgatggtggccgatcacctgcaggcatcgttacgcggcgatctgcagtggatcagtgcggagcaactgtttgtcggtaaaaccggccgcgacgtcggcgcatggttggccgaacgccatttggcaggcgcccgtatcggcattatcggactggagccttaccctcccttctacttcgacggcgccatgcccgcccgcacgctgcaggggttgaccaaggcactcccaacggccaactgggtgccggtctatcgcgaattcttccgccgcgcctcggtaaaaagcgaggaagaattaatgctggtgcgttatgccgcacaaatcggtgaggcgatgagcgaaacattgcgcgccaccgccagacccggtgtttccgaagcggacctggtggcggcggtaacggcaacctgcttctcgatgggcggctataccgcagaactgctgctgggatccggccctgaatatgtcggctggggcccgcccgcctggcaatatcgcgcccaggcgccacgggttctgcaagaaggcgatttggtgctgtcggagatcttcgcgctgtacggtatgatggaaacccagcatcaggccgcggtcgccatcggcgaagtacgtccggaaatcctgcgcgccgccgcagtcgccagggaaagttacgaattggggctgcaggcactgcatgtgggtaataccttcggcgatgtgctcgacgccatggaacagccgctactggccgccggcggctggcacgtgcatccgctgatccatagcctcaacccctatggcccggtcggattcggcaccgcgcccggtatcgagtctctccccgaggccgcccgctatgcgcagctcaggcgtttgcctaccgtgggccgcgaactgccgctgcaagcaggcatgtgcttcgcctttgaacccaactgcgctttcggcaggcatatggccaacatcggcggtacggtattggtcggtgaaacaggcggcgtggcgctgaatgagaactcaacccggctgatgttcgcaggcggctcacatcgataa

SEQ ID NO: 446986 - DNA, 210 bp, Serratia marcescens
gtgcgcgccatctcgtacagcattccctctacctggggcaccaaggcgatcgccggcgtcaaccagatggggctgtcgctgaatgaagtgtggggcgatgtcgccatgatgctggtgctcggcgtggtctataccctgcagggcttcggcgtcggcttcttgcacaacagcgtggcactgcgcgggatgttcaggaggctgcgggcgtag

SEQ ID NO: 446987 - DNA, 231 bp, Serratia marcescens
atgatggccaataaacgtctggtcaacctgctttgcaatatggtggccttaacattgagcatgttgcttatttctttttcctcactgcatattatttcatacggagaacatttggcagatgcgaccattgcggttttcacatattttggtatcagaagctgctgtctgatgggggtaagcttattccagtggttccacggtgggaataatcgcattcctcttgataaataa

SEQ ID NO: 446988 - DNA, 141 bp, Serratia marcescens
atgccgaacattttaatgacccgcatcgacaatcgcctggtgcacggccaggtgggcgtgacctggaccaacaccctcgggccaacctggtggtggtggccaacgacgaggccgccgccgatccggtgcagcagaacctga

SEQ ID NO: 446989 - DNA, 702 bp, Serratia marcescens
atggcgatttccggcaatacggcaacccagggcgcgccgctgatcgcgctgcaacagctgtcgatgacctttggcggccagcgagcgctgaacgctatctcgctggcgctgatgccgggggaagtgcactgcctggcgggtaccaacggctgcggcaagagtacgttgatcaaggcgatcgccggcgtgtatcaaccggacgacggcagccgcatcaccatcgacgggcacaccttcggtcggctgtcgccggatcaggcgcgcgccttcggcattcaggtgatctaccaggatctgtcgctgtttcccaacctgacggtggcggaaaacatcgccttcgagcacaacctgcatgggttgctggggtggcatcgcccggcgcggctgcggcgcaccgccgagcgcctgctgcaggagctgagtttccatctggatctcgacaaacgggtggcggagctgccgatcgcccagcggcagcaggtggcgatctgccgcgcgctggtggcggaggcgcggctggtgatcatggatgaaccgaccgcctcgctgacccgcaccgaggtcaatcagctgctgcgcacggtggattacctgaaagcgaaaggcatctgcgtggtgttcgtcagccaccggctggacgaggtgctggagatttcggatcgcgtcacggtgatccgcgacggcaacaagatcggcacctag

SEQ ID NO: 446990 - DNA, 1443 bp, Serratia marcescens
atgaacgcgcaaatcagcgaagaagttcacgccctgtgccggcgctatcaggcgctggcgctgaacgaagatccgaccaccctgacgatcgccctcaacgaagaggcgccgcaagggctgctggcggcgctgcgtttcgccaccggcaagcgcatccatctggagcaatggccggcggccaggctggagcaggcgctgaaccaacgccaggaaccgctaccggcgccgctggcggccgaagaagacagcgccgacatcgtctaccccgacgacggcgacgcgccggtggtgcagttcatcaaccagacgctgcgcctggccattcagcgtcgcgcctcggacgtccacttcgagccctttcggcagcattttcgcattcgcctgcgcatcgacggcgtgctgcaaaccctcgcctcgccgtcaccccagctgaccgcacgcctcatcgcccggctgaagatcctcggccagctggatatcgccgagcgccgtcagcctcaggacgggcagctcagcctgacgctggacggcgcgcgctatgccatgcgtatcgccactctgccgacgctgcacggcgaaaaggtggtgctgcgcgttcagcagggcgaacagcaggagctgccgctggatcaactgggcatgagccgagcggatctggcgcgctacgcggcggcgctggcctgcccgcaaggtttgatcctggtgaccggcccgaccggcagcggcaagacggtaacgctgtacagcggcctgcgccagttgaacgatgcgcaaagcaacctgtgcagcgtcgaagatcctgtcgagatcccgctgttcggcgtcaatcagacccagatcaacgccaaaaccgagctgagcttcgcccgggtgctgcgcgccctgctgcgccaggatccggatgtcatcatgatcggcgagatccgcgatgcggaaaccgccgagatcgcggttaaggccgcgcaaaccggccatctggtgctgtcgacgctgcataccaactccaccggcgaaaccctgacgcgcctgatgcacatgggtatccccggctacctgctcgccggctgcctgaagctggtcatcgcgcagcggttggtgcgcaggctatgtcgccactgccgctacccgcacagccaacccacgcattttcctgcctcggtctggccggagccgctgaccgcctggcgcgctgacggctgcgagcattgcttcggcggctactacgggcgcatcggcgtgtatgaactgttggccattacgccggaaatacaggcggcgttgctggcgaacaccgctcctagccggctagcggatatcgcccgcgaacaggggcagctttcgctgctgcaggcgggcctggcgctggccagcgaaggcgcgacctcgctggaagagctgtaccgcgtgatcgacgtcgtccagctcggcgtaaccgcgccatga

SEQ ID NO: 446991 - DNA, 867 bp, Serratia marcescens
atgggcatattggttaaacaacgaggtggtcaggaacaagacgttaatcccttgccgcaccagcgccgccgccaacgcctcggcttccgtcaacacttccggcgcaatgatcgccagactggcgccattcaacagggctccccacatttccagcgtgctggcgtcaaacgccggattggcggcgaaagcgaagcgatcgccgcgttcaaacgacgcaaaacgattgttgatcgccagccggaggatgccttggtgcgtcaccatgacgcctttaggcgtaccggtcgagcccgaggtatacatgatgtaggccggcgcgccgccggcgcgaggcaccgccggatcgtgggtcggattctgccgcagccgatcgatacgcaggcaggcgatctcgccggctatctcgcggtcgatatcgcgatcgcacaggatcaacgacgccccgctgtcgccgatgatccacgcctgccgcgctacgggcaggtgcggatcgagcggcacataagcgccccccgccttgaggatcgccagctgggcgatgaccagagaaacgctgcgttcaagcgacgtggccacgcgatcgcccgggcgcacgccctgtgcgatgagttggtgcgccagttggttggcgtgggcgttcaattgggcgtagctcaggctgtcccgatcgttcaccaccgcaacggcgtccggcgtgcgctgcgcccactgttcaaacaggacgtgggcactgctctgcgccggataaacttccgcggttcggttccagccgtacaacaacagttcgcgctcggcagccggcagcagatcgagatgcgacgcaggctgcgtagcatttgtcgccatcgcccgcagcacctgcactag

SEQ ID NO: 446992 - DNA, 462 bp, Serratia marcescens
atggcacgtaagaacgtcaagattgaaacccccggacaggaaacctctcaggacgacgacagcgacctgatcggcggtgacgctggcgcgggtatccccggacccgctaacacccctgagcagctcaacgcggccagcgctggcgcaacagtcaccgagggtaccgtgcagcagcgcattgcaaagctgctcgacggcgcagcacttgaagagcgcaacgcgatcctttccggcctgaatgaacagggtgcagcaatcatcgctcgattcgaagggctggagttcctcgacgctgacggtcaccgcctgaccgataacctcgaattcctcaccctggtgaagaaagtcaccgatgtggctaccggcggcgctgtcccgatggtgacgaacgaagagggcaagaagcagccggcaccaggcaaacctgttttaaccgaacacggctggcacgtaccaggctaa

SEQ ID NO: 446993 - DNA, 1056 bp, Serratia marcescens
atggggattttacggttcattggccacatggatttttcgatgaaagagtcagtgagatttttgggggctaacatgttaactgagtttcatttcgatgaagattttttggcagccaaagaccttaacggcccgaactccaacatggtaaataatatgttgttggaattttggctagaaaggggttgtttgctgtatccattctcaagattaaagagttatcaagagtgggaagaaacaataccagcaaaatactctaagaaatgggttacagctttaactcacgcccgaacatatgacatcagtaaattatacaaaaaaacgatatcttttaataatgttaaccaaattgaatcattatataaacctacagggttagaactagtattagtgccaaatgagttttctttatttggattgttagaaggaaaggacagcttggtttttgaaagcttagaaatatcaagaataagtggtttaacaacaagcagctcctactcaaaaagtataaaattatctaatcaaggtattaaagccgatgatagcatagaaaaaatatggatgcttcaattccaaaaaacagctaagtactcaaaagtaataacaatcatagatcgctattttggcgaaaatctttcaatcgacatgggaaaaaaaagaagggaaacagcaattgaacgattcataagttttttaagtaaagaaggtagaaagttcaatattacaattggtactgttggtggagaaagcaattccgaacgccataacgaaataactaattttttaagagacaaaataaaaaacaacattaaattcagaaacacaatatctgatatgacgttattttcttgtgacgataagactttccagaaattttgccatgatagatttatatgctttgataatatagtatatgaaatagggaaagggttcgatatatttagagatataccattattttcctcaacgttgtctataaaaaatagttcaacctctagctttaaatactctttaggcgagttaatgcctcggcgattatggacggataaactaaaataa

SEQ ID NO: 446994 - DNA, 498 bp, Serratia marcescens
atgagcagtcttttaacggcctcgagggacttcgaggagaaatcgaaagcacagcagcagcttaccgaagagaggctgaaagccgcattcagcaagcacgagaacgttgtcaaatcggaactgaacgcaagcgcgaagagaatcaacgacgccatcagcgcccacgaacaggggatgaacgcggcgatgcagtcgaaccggctgagcgtgctgcgaatggtcgggcggacgtggctgaccatcaccatggtgtcagggctgctgttcgccagcctgagcggggtgctgtggtaccaggggaaccggatagcggcgaacctggcggaaatcaggcagcagagagatacgctgtcgaaactgcacatgcagacgtggggcgtgacctatctggagaaccgcaacggacggtttctggtgctgccggaggggatgaaagccgaaacgggccggacggtggacaacaagacgcggaacgcggtgaagctggtacgggagtag

SEQ ID NO: 446995 - DNA, 552 bp, Serratia marcescens; identical to SEQ ID NO: 227820

SEQ ID NO: 446996 - DNA, 321 bp, Serratia marcescens; identical to SEQ ID NO: 227819

SEQ ID NO: 446997 - DNA, 975 bp, Serratia marcescens; identical to SEQ ID NO: 227818

SEQ ID NO: 446998 - DNA, 663 bp, Serratia marcescens
gtgttcaagagcaccatcgacaactacatcacgccgcagtcgctggaagaagagtgggacattcaggggttggaagagcgcctgaagaacgacttcgatctggagatgccgatcgcacaatggctggacaaagagccggagctgcacgaagagacgctgcgcgaacgcattctggagaacgccaaagagcagtaccagcgtaaggaagacgtggtcggcagcgaaatgatgcgcaacttcgagaagggcgtgatgctgcagacgctggattccctgtggaaagaacacctggcggcgatggactacctgcgtcagggtatccacctgcgcggctatgcgcagaaggatccaaagcaggagtacaagcgcgaatccttcaacatgttcgccaccatgctggaatcgctgaaatatgaagtgatcagcgtgctgagcaaggttcaggtgcggatgccggaagaggtggaagcgctggaacagcagcgccgtgaagaggccgagcgcctggcgcagcaccaacagttgagccaccacgacgagaacgcgctggtgaccgaagatccgaacgcgccggcgaccgccgagcgtaaagtgggccgcaacgatccatgcccatgcggctccggcaagaaatacaagcagtgccacggccgcctgcagtaa

SEQ ID NO: 446999 - DNA, 405 bp, Serratia marcescens
atgaaacatctgaatatcgccgtgggcatcatccgcaatgcgcaacgggagatctttattacccgccgcgccgccgacgcgcacatggccgggttctgggagtttcccggcggcaagatcgaacagggtgaaacgccggaacaggcgctgagccgcgagctgcgggaagagaccggtatcgaagccgaacgtgccgagctgctggaggtggtggagcatcgcttcagcgatcgcatcgtgacgctgaatttttatctggtggaggcctgggcaggcgagccgttcggccgtgaagggcaaccgatgcgctgggtaaaacaggcggatctgcgtgaagacgaattcccggaagccaacgtcggcatcatccgactgttggtggcgcaggcgaacgccgcgcaatga

SEQ ID NO: 447000 - DNA, 192 bp, Serratia marcescens; identical to SEQ ID NO: 424678

SEQ ID NO: 447001 - DNA, 753 bp, Serratia marcescens
atgagtgatgtttccccaaccgttctctttgaacacccgctgaacgaaaaaatgcgcacctggctgcgcatcgaattcctgctgcaacagctgcacggccaacgcgccctgagtgaaaccgccatcgccctcaccttctttcgcaccgtctccgacttgctggacgtgctggagcgcggcgaagtgcgcaccgaactgctcaaagagctggagcgccagcagcaaaaactgctggcctgggccgatgtgccgggcgtggacatggcgctgatcgatcagctgcgcggccagttaaagtcgcgcgcatcggcgctgatggcggcgccgcgcctcggtcaggcgttgcgcgaagaccggctgatcggcctggtgcgtcaacggctaaacattcccggcggctgctgcagcttcgatctgccgaccctgcacatgtggatgcacgcgccgcagcaggatcgcgacgccgacgtcgccacctggctgcagtcgctggatccgctgaaccaggcgctgaccatggtgctggatctgattcgccagtccgggccgttccgcaatcaaatcagcctgaacggctttttccaggacaacgccgaaggggcagatctgctgcgcctgcgcctccatctggcgccgcagctttatccgcagatttccggccacaagacgcgctatgccattcgtttcctgccgctggacagcgaaaatggcgtggtgcctgaacgcctgacgttcgaactggcctgttgttga

SEQ ID NO: 447002 - DNA, 444 bp, Serratia marcescens
atgttgctgccggacggcgcgttgaaccgtgctgcgctgcgtcagcgcatcttcagccatcccgatgacaaaacctggctgaaccagctgctgcatccgctgatacaccgtgaaacccagcgccaactggcgcaggccgccagcccgtacgcgctgtgggtggtgccgttgctggtggaaaacggcctgcaggatcgcgccgatcgggtgctggtgatcgacgtcgacgccgaaacccagctggctcgcaccatcgcgcgcgacggcgtcagccgtgagcaggcgcaaagcattctcgccgcccaagccacgcgccggcagcgcctcgccgtggcggatgacattattgacaacagcggcgccgctcaggggatagagccacaggtcgccgcactgcatcgtcgctaccttgaactggcggcaacagcgccccaacaggattaa

SEQ ID NO: 447003 - DNA, 336 bp, Serratia marcescens
atgaacactgcatcctgtttaccgattgaagtccgcaccgccgttttccgccgcgctgtagcgcaagcctacctggatacctgcgccttttaccgggtgagtctgggttacacgctggacgagctgcagatgacgattgccctgcgcctggaagggcattttgtgcgtcagtacggcgcagaagatggcatggacatggcgtgcaccatgctgagcgacatggtgcagccggacgttctggtggccgcgccgcgcctgaccgcgctggggcaaaagatgatggacgaactgtgctgcgagcgcctgtcggcggcacagaacgccaccgtacactga

SEQ ID NO: 447004 - DNA, 1065 bp, Serratia marcescens
atggtcagccaggctctccccggcacgcgtcggcgtgtagtccacgctgttgacggtgcgcagccagtgcgcttgccggtgggcgctgaactgcccgctcacggtatcgaataccccgttacgaaagcctatcaaccggcgggccgggtcgcccatctgcggcaccatcagcttgagggtgtccaaaatgctgttgataccggcggcggagaacggtgctcgcaccttctggaacagcgcggcaatctcccggctcagttgtcggtgtggcagtacctgccaggcgccgcgcgtatagcggcacagctcttcccctaccggcggcaccgccagggtgttgccgtagtgctcggccagcaactcggccttctcgctggcgctcatggctttgaggtctgcatcgctcagcgtgtcgaacgggctcggctgcgacggctggctgaacgcctggagctgggcgcgcgtggcctcggccccttcccggccataaacgtcgttccagtcgccttccgtgggcggcagcgccgggataccgccggtgagtttggccgcctcggcggcgcgggtctgtccggtgccgctgcggtcattatcggccgccagcagcagccgcgcatccgggtagtggctgcgcagctgctccgccacggccgccaggttgttggcgctcagcgccacgcagaccgtttcgccggtcaggcggtgcacggtgaggccggtggcgtagccttcggtgagccagataaccgcgttgtccgggccgcaaagggtgtggcaggcggctttcacctgcccgcctgccagcatgcgcttgtccccgcgggcgttaatcagctgcacgttgaccacttcacccccggcattgtgcagcggcaacagcaggtcaccggactggaaggtgataccgccgacgcgcagcgactggccgtgcaaggccagggttgctgcctccgcccagcctttggcgctcaggtaggcattgccggtttgaggctccgcggcagccaccagagcctgtgcctgtcgcgcggccttgcgctgagcctcggccttgtcttgtggtga

SEQ ID NO: 447005 - DNA, 336 bp, Serratia marcescens
atgaacacccaatcctgtttaccgattgaagtccgtaccgccgttttccgccgcgccgtggcgcaagcctatctggatacctgcgccttttaccgggtgagcctcgggtacacgctggacgagctgcagatgacgattgctctgcgcctggaggggcactttgtgcgtcagtacggcgcagaggatggcatggacatggcgtgcacgatgttgagtgacatggtgcagccggacgttctggtggccgcgccgcgcctgaccgcgctggggcaaaagatgatggacgagctgtgctgtgagcgcctgtcggcggcacagaacgccaccgtacactga

SEQ ID NO: 447006 - DNA, 1041 bp, Serratia marcescens
atgaaacatatcaaagccaatattttaaaaaaagacggtgaattctcattaagcttactcaattttgagattgtgcatatcaaaaaaacgaaaaatcacaagcgcactctaaactactactggatttctcgaaccaaagaaataattagcggttccggcacactcaaaaaccacaaagaaataccttcagttgctcacttatttaattacaaacaacagacatgcgacctaagtagagaagagattcagctaggtgactcggtttgcatactattcaacaccactgctgccctattcctatttggatcgattgttggtatagacaagctaaaaaaagaaacatattttcacatcctacctcacgacaaaaacttcccattcaagctaaacggcatcattaaagtcaaacaccaaaaaaacaacatctatttattaaaggatggaacaaatgaacgctatgattatatggcgacaaaaaatatagccttcgcaaagtaccagtatcaagttgaatttgctgaaattattatttcatatatcaaaagcactcacttaattataagttacgccacggataaaaataaagtaataaacgaaaaaaccatactgcagtgtcacaagacgctttttgaacatatatatgactgggccggagaatatagaaaccaccccgttgttgttggtgataaagagcgccccacaatggaacatgatgaaataaaaaaagcgataaaagctagcttaaggggatgtaaaaaaaacgaactagcaaaaataaaaaacaaagggcacttagtaagtaaactcgcacaactccatgcagaacttgcctggatccatccttttcaagacggaaatggtcgctcaataagattattcattcagatagtcgcggcgacaatggggtatgaatttgacatggaacaactagatgggacggtgaaaaacaaacgtgtttatcattatgctgtaaggcgtgcaattcacgataaaaagataaacttgattgccctcttaacgaaggcaatcaacgagctttaa

SEQ ID NO: 447007 - DNA, 3825 bp, Serratia marcescens
atgatattttttgaacttgaaccttctgatatttcaaatctcaatgatgctgatctaagagaattggtcgctaggttgtgtgaagcggaattgattcgtcaaggaattcagacgtcttgtgttctgtggggtggagcgcaggaagctgctgacggtggtctcgatgtccgagttgtcgatgctatccctttactaaagccaggctttgtaagtcgtgaaaatactggctttcaagtaaagaaaaacagtatgagtaaggcggcttgcaaaaatgaaatgcttgataaaggaacgctaaaaactgttatagcggatctcttagaaaaaaaaggtgcttatataattgttagtggcaaagatgattgttctgacaaaatgctatcagaacgtcttctgggaatgaaatctgcactagaaggcttaccagatagccaagagcttctccttgacttttatggtagggatcggcttagcgcatggttgagacaatttcctgaggttgctttgtgggtccgttctagactaggcaagccattatccggatggcgaccgtttgggagatggacttccaccccagtcgataaagatgatgagtttttgcttgacgaacacccttgcgtcatcgatatgaattcacataacaaagagccttcagcgatttcgcatggaatcagacttgtgcgtgaaagattacaaagatctggctcggtggtacgaataactggtctatcaggagttgggaaaacacgctttgctcaggctctatttgaaagtgaagtatgcgataactccctgccgaaagcgaatgtaatatatgcggatcttggtgatgaattaactccaacagcatctgagcttgtctcatacttgatagtcaatgatttttcaagctatttggtattggataactgcccaccggatgttcatcgaaaactgcaaaagcagatttcgtcaaatcaagcaaagttaagccttcttactatcgaatatgatatttcggatgatcgcccagaagaaacagaagtaatacacatcgaaccatcaagcgaacagaccgtctctaaacttatccaaaagaggtttccgtctctagggcgtgttaattccgataaagttgcagagttttccggagggaatgcgcgtgttgcgattgcattggcgagtcgagtgggtgcagatgagaccttggcaaatttttctgatgaggacttgttccagaggctcttcaatcaaagaaaaggcacaacggaaagcttatttgaaagcgcagagatcctatccttggtttattcgttcaatatttccccgaaagagtttaatgatgaattgagcgctctttctagaattggcggatttgaacgtgataggttgaatcgcaatcaagcagagctattgcggaggcagttatcgcaaaaacggggaaactggcaagcagtgctcccgcatgcaatagctaaccgtctcgcacggcgagcccttcaaaatatcgatcctgataaaattaatgctgagttgttaaaggctgataattttcgtttattcaagtcatgtgctcatcgactaggatatctgcataattttgaacctgcaagatatctcgcccatacgtggatgaagattgatgggccatttcataacattgcacggtgcaatgctgagctgcttacggcactaactcacattgcaccagtgtttccagatgtagtgttactcgcaatagagaatgcttcggaagctcgagatttctgctcgcgtgataatcaaaatttttctatcttcgttcgattgcttagaaaaatagcatatgatgatcagtacttcgaccgttctgccgggttaattcttcgctttgcggaaacagaaaaatctggcgagaataacaatagtatcgctagggaattgacgagtcttttttcattatacctctctgggacacaggctacaccagcgcgaagacatttttttgtgagtagaatgttaaattctggcagcttgagacaacttgagattgcgcaggatattcttcggtctgcatttgaggcttctcattggagctcattgggaggatttgattttggcgctcgtagcagggattttgggtgggaaccgacaacgaataaagagatattagactggtacgtaggttatattgagctgttagtgccgtttttagattcgggtaatggtcccctttgcaattgggcaaaggcgatactagcaaaccactttgtaggattatggagctatgcaggctgctttgatattctcgaaaacatagtgcgaaaatatggcgctggcggtaaatggtcagatatttggatggctattaaacggacaatccattacaacgggaagaaacacacacccgagttattaaaaaggattgaagcacttgagcaattagccgccccggctgatccctatttcgaaatcgaggcatatgctctgactaacatacgcgatcacgtagaagttagtggtgagagttacaaagaaaattataaaaaaattcatcagaagatagaagcactaggtgagattgcgtcatcagaacctaattaccttgaaagattggctccaagattatgggaaaaaaatattgatgcgctttggtcattcggcaaagggttggccaacggttcatcagaccaaggtttaacctttaatacgcttgtcagtctgatgcaaaagcaagagctagaagtagtacaacctatcctcttttgcggttttattgctggcgttcatgccagcgatcctggtttgtctcggaagctccaagagtctgtattagatgtgccggagcttaaacagtattttgttaatattatgtctgcaacgacgatagccccttggggtgcaaaaaagcttattgagctggctaaggctagtgaactcgaagcatggaggtttgaacggattagttacggtcaagttcatgaatccatttctgatgatgatttatccgaattactttccgcactcaatgatttggtcgatgggatattttcgactattgaaattttgaacatgcgattctttactgaaaagggtagcaactacagtcctagcgatgacttacgatctgttggaaggcaggccattttgaaactgttatcaatgcacagggatgagattagcaggcgtcagctccgtggtatggacagtgttattgcagagtgtttatcagagccagcaacggagagtgaagttcgcgatattattaacttgctttgcaacggcgtagagacgtatcgattatatggcttcgaattagagagtgtcatagcctatctagtgaaaagttatccggaatttgtattagatagagtgttaataaatagtgagaatagcgaaaaacttattcatttgcttttcaaagataggatcaatcatagttgctcgccattaaacttagcgtcgatagagcgcgtgctgaattggtgtaatgaaaatcaagatagaattcataaagtagcaggtgccgtttcggcatacacatccttagacaaggaatcacagccactagacaatccaaagaaagtaattctcagtgatcatatttcatcacttttagatgccgcagagaacaaagtcgcgattgttgaaactattttctctaggacttttcctagtagttggtcaggatcacttgccgatattcttgaagttcgtttggaggcattcgcagtcctattaaatcatgtctctcctgaagtgcgagagatggctcaggacaaactttctattctaaataggtctattagagagaatagagagcgtgagaccgaggagtacaaccggcgggagcaaagatttgagtga

SEQ ID NO: 447008 - DNA, 435 bp, Serratia marcescens
atggcgatatctgaagtgcagtcgcccagggaaggcgcgaacaccacgctgacggagcatccgctgatgctgtcggtgaacggcgaacagcttcatgcgcaggtgatggcggatacgccgctcttgctggtactgcgcaacgatctggcgctcaacggcccgaaatacggctgcggccttggcgatcgccagcgcctgcacccggtgcagcgtgcttttatcgaagagcaggcggcgcaatgcggctactgcctcaacggcatgatcatgaccaccaaagccctgttggatcgcaatcccgccccgagcgaggcggagatccgtcaggcgctgtccggcaacctgtgccgctgcggcacccatctcgaaatcctgcgtgcggttcagcgcgccatcattctctgccgcgatgaggacgcccacgctcatgactga

SEQ ID NO: 447009 - DNA, 126 bp, Serratia marcescens
atgcttaaccgtggtatcgcattgaatattatttatcagagcctcaaaaaatcgatctctttcctgtcttttgttatgattatgaggttgaaaatttttaaagttctgcgtttcgaattttactaa

SEQ ID NO: 447010 - DNA, 1635 bp, Serratia marcescens
atggacttaaaatatacagcagaacaagatgcggccattaattacaatgaaagcatggttgtaacagcgtgccctggaagtggaaaaacgactgtcattgtagagaaaataagacgcataatccctacacttagagactatcagggggttattgcaataacttttacagttaaagccagtgatgagttgaaaagtcgatgcaaaaagaatgcattcaacaccaaacaaaccttttttggcactatagacagtttttgtttcaaagagattatacatccatttatctcgagggtttggggtaaaagtgataaagatattcagactgtatataatgatgacctagaggaagaggataaggatgcatatgccgatattacgtcaagtgtactaactacagaagcgtttacagctgatattatcgatcggctcaaggctttatataaaaaaggatggttactaatgagttcggttggtgtgatagctaaccatataattgaaaattctgaatcttgccgaaagtatctttctgttaagtataaaggagtttttgttgatgagtaccaagactcttctgagccacagcacaaattgtttttaaagttagttgacttgggaatgattggtactgctgtaggcgatgaagatcaatctatctatgaatttcgtggtggtaacccggaatttgtagaggatttgaaaaaagtaggaagcggatttgcaagctttaacatgaccgttaatcatagatgtcatccttctataagtaattacgctaggagactttttgatgataagtgtgcattaattcagactgatgaaatcatggtgcgtcgttataacatcaaggggaatcaaactgatgtagcaaagcaaatatctaagtggataccaaatgcgaaagaaaagtttgatataaaaaacaatattgatatcgctattttagtcaggaataacacctcgttaggatatgtttctcaagggttgcaagttccacatagagtatacgaagacaatccattggcaagttatagtgatgttttttctaagttatttactgggttgttacattacaggtataatgagaaaattacttcgcaggagattatttcagactatattaaatcatattttagtgagaggaaatgcagagattttcgacgtgtaataaagcaggttaggcgtgcacgtgcgtctgatgaggatttaataaattccatgcaaagcgtgtcttgtagtgtttatggtgtacctgccccccaaaagattgttcaggcattaaaaacaatactatctacaccatcaataaagaaacagtttgaaatcaaagacgaaaatgaaattcaggttatgactttacataaagcaaaaggattagagtttgatctagtgtttcatttagatctatatgagtgggtattcccttggcgtaaacccactgataattttgatgaccctcctttgtatccatcctggaagcaggagttagatttacattatgtcggcataacaagagcaaaaaaattgtgtgtattgatgacatcaacttcacgaataaaagatggggggcttaaaaaggggcagccatctagattttttgaattaccagggttaaaaggcctttacttggctaagtaa

SEQ ID NO: 447011 - DNA, 1713 bp, Serratia marcescens
atgcgtattgagtcattgaaattgataggttttagaaactattcaaatgcgttagttaactttgcggctaatacgcttgtgattggttcaaatgatataggtaaaaccaatatgattcatgcattaagaattctattggataaaagcttgtctgagttagatatagaacctaaagaaatggacttccatattgataagaatggaggacaatctaatgaaattgaaataatgataacattttgcgaggtcaatgaagatgcaattgtttcattattaaaaggacatataagtgatgagggtaaaacagtaattcattacaaggcaattcgtgatgacctgacctttgagatatcaataggtcaatcggctgatgatttggaggtgattaatagtaggtattacctgaaacatataaacatgaaatatattcattcacaacgtgaccttgaaaagttcattcagagggagaaaaaatatttattgaagatatctaatgaaaatcttgaggaaaaagaacgactggaggaccaaagaagagtagcgattatatctagaatgctgagtagggttaatagaagtgttgggcaattaaattatgtttctgaggcgactaagaatgtaaacttagaattaagcaagctagctcatcataatgttgggtattcagtccatctcggagctggggcaatacaagttaattcctttattgataaactagatttaggggcgaattctaatggcggtgaggtaatgctgggaggggatgggcgcaataatcaaatcctactagccttgtggaaagccaaaagtatccaagaacatgatatagataatgaggttgttatttattgtgttgaggagcctgaagcacatttacaccctcatcaacaaagaaaacttgctgactatctttataatgagctccctggccaatctatcatcactacacattcgccacaaataacatcgcaatataagccggactcgattattagattgttaaatgatgatggtgcgacgagggccgctagccaaggatgctctgattgtatttcagatgcatgggatgcaatggggtataggatgagtattctaccttcagaagcgttcttttcaagtgctgttttacttgtggaaggaccatctgaaagaatgttttatacacaaatagctaaagactttgatatagagttagaccacttaaacatatcaatactttctgttgatggcgtgcaatttgaagtgtataaaaagattcttgacgcaatggaaataccatgggttatgcgcactgataatgatgtttcgaaaattactgtaggtggggagtcatactctaactttgctggtattaataggtgttataaaatagcgggggaggaactattagagcatggtagagcagggttatgtgcaagtgatactgtcgaaaatggcctttggaatgaagcgtctcaaaaattaaatattaaaggtattttcctttcaaaggtggatcttgaaagtgacttggcggatgagttgcctgacttagtctgtgagtacagtggcagaggcacagatctttcctctgcaataaaatatctacaagataagaaggcaatcaggatgagggagtttttaaacctcacacaaggtaggagacagcggctaaacgacggtgagttaattaaaccaatcttgaaatgcagacaatttgtcactggagtttaa

SEQ ID NO: 447012 - DNA, 150 bp, Serratia marcescens
atgaccggaagtaacagatacaattttagccgcgagtatatcctcgaagctcctcaaattgtattcgttcagtattacatccattacacccttgccctcgtagccacggtaatagatgtcggtaagtccacgatggataagtggcgctag

SEQ ID NO: 447013 - DNA, 2340 bp, Serratia marcescens
atgaactggcaaatttgcaaaattgagatttcaagctttaaagctttcaagaaaattaatcttgatttcggtgactcatcacttttaacattggacggccccaatggctttggaaaaacaagcatattcgatgctattgagctattgctaaccggcagaataaatcgaatttgccacctattttccactttaatgatgggtaaaagaacgaattatgaagataatttactttggaataatcgctcaggcaataatgatctatcaataaaaatagagttcattaatagttcacgcaagattacgctagcaagacatacccccgcagcaaactttgatgagaagtcaaacaatagagcagaccaatttacccaccttatgctttacgagctacccgaattctcgtcaaacgattatgtaacagaaaatcttcgcgacgaaagtttcattgaagaactttttggtaaaaacttcaaagaaaatttctcatacttgaattatttggagcagggccaaaatcagctcctgcacactcgagtagacaaacgaaaagaggcattaaacaatctattcaatattagtgacgtaaaggtagaaactgataactgcaaaactatagctttgcggcttacaaggttcattaacgatccaaagcgtgctgcagacttatcaaggttagaaatagaagccagctcactaaagaaaatggttcaagcggatctaggatcgattgaatataacaaaatctccaccacggtgctacaacccggctgggacaaagataaccctttccccacctactctgaggaaatccataggaagttcattgagaatatccatagtcttcaaagactggcgatactaaagagtgcaatacagatcagagataaaaatgagtcgattgaaaatttcattgaaattaacaagggatttataaaaagcttggctagctttggcaatgatttaaacaaactggatgagctcgaagccgtcaataaagaattaaaaaagttgctaaaatatagagtaattatcaaacgtggcgcaacatttattagtgccgatgaggcaaagagccttacaggatgggctcaagggcgtttggaatggtttcttgaacaaatagttacccgtgactctcttcaacaaaagaataactctaataccactgctgcaactgaattgaatcgcctaaaagcagaaatagtgactgagcatactaaactctatcctgacgatcagaattgcccattgtgcggcgcggactggcaatcccatgatgctatgctgcaaaagattgaagaccgatcaaagcaaatcaatgacaagctaaactctgatggtcagaccctgataaatatcactgagctgatggttgcggagttagccataattgactctcagatccagggccgaagagcagagttatccgtctactacaacagccccctacacaacgcactgctccgtgataaagctcagttgcctgcaattaaccaactggcctcacaccttcaagccttaggcgtacaactaaaccattcgttctccgaaaatgaggaggtggtggatactcgaattcaggctattacagcttccattagaagccagaaaacaactgagacagaacctctcccgcaagattggagacgggtcattacagctgccttcaaagaactgcaggacttctatatagtcgaacctcagacgctgaaagacaaagagttgtatatcgcagctaaagcaaacgaagcacagagtaaaaggctcaagcaatgccttgatgagctgcaggtcattcagcgtgaaactgaagcagcgcaggttgctaaaggtaaggtcaataacctaaaggctaccctggagaaaacagaacgccgatactctgaacaaacgattgcggaaattgagctaattttccatatttatagcggacgacttatccagaactatcagcgtggcttgggtctgtttattgaaagcaaagatggtaaagagctcaggttccttacagctgaaaagtctgagtatgatgcgattctatcgatgagcactggacaagtgtcggcacttagcctgggctttttcctttcgctgaatagagtttactcaaacgtaccactgatcctgattgatgacccgtctcaatcgctggatgaggtaaatatcgcctctttaactgaccttcttcgctgtgagttcagcaatcgccagttgatcgtttcctcgcacgagagcgatatctcctcttatatgcgctaccggttcgccaaggccggtctgaacacccgctcattgaacatgcaacgcttggctaaggaagctttagtcgccgcggattga

SEQ ID NO: 447014 - DNA, 1299 bp, Serratia marcescens
gtggctaataatattcactgtgaattgaaaaagacaagagatggattgtttaattattctgttaaaaacaggaatggagaaataattttccaaagtgaagactattcaagtaagcatgcagccattacaagttttgaggttcttgttgaagctttaagtaatgataattatgaagagagcttcgaatttaatagttatagaaaaccctatgtgtcaattgagacaagttacaatataataagaagtaagccttttgaaagttattctgacgctaaaatttcatttttaaatttaaaagcaaatataagtcagatgagaaataatgctgataacatagattctgatgggatctcgggaagggatgatagagtttctagtgttgttgattttgttgtaaagatatcggagataaaaagagataaagggtactcttattacttcagaggacactctgacttcggttacgatttatccccaggtatttacaggaaggaaagtcgttggataaaacgggagcatagattattcagggaaattataatcaaatgccccagcgagttcaaagatagtaaaactaccttccaaaagttggtgaagatgcaacattatgcgttgcctacaagattgcttgatattacaacaaatgctttaattgctttgtatttttcttgtgttgggatgaatgaaaaagaaaaagatggagaggtgattgtttttaaaataagtgatcaggatgtcaagtattttgatgataaagatgtttctttgctttcaaatctgagtaaggttgagtatctttttaacttgcattatagaacgcaagaagatgaaaattcgtatagagatataatagtgaatgatgctcaggaacaaccggataaaactcttcgtgaatctattctgtcagaaattcgggagtcaataaaatcctcgaatgcaagggctaaagaatctgagaggttattgcttgacgcagtaaatagggatggttgctttataccctatgggatttctggaaaggatttgaataaggtcatatgtgttaaacctgaaatggataatcctaggattgttaggcaggatggagcttttcttttgtttggaatgaattatgagaaaaggatgcctgcaaccattcctgaacattacatacacacaccggtcagtgggaggataataataaagtcagaagctaaggagaaaataatctctgagttggaatctttaggtattacagctggtaatgtatatccagaaatcgagcatgtagccaatcatataaaaagaagataccagtaa

SEQ ID NO: 447015 - DNA, 783 bp, Serratia marcescens
atgaacgttttacgccgcatgaattccttaatttacagattcgtactgtttcccttgtttatcttactgctggtgatgacagggatattttccgcagccattctttataacaccctgacgctgaaagctgatgtaggatcctttccggactggatagctgccggagcctccttggcaacaacagctatcgcgtggcttgcatttaaatcagccccacactggttacaacagaaagtggatgaaagggcgttaagcgacgcggagtttcttatcgaaaaatatgtcgatttgaggctaatccttggcaggatgggaatggctaaaagtaatctcatgtctgcgttcactaataccgatgagaaaaagacgcttcctgagcggttaattcatgcggtggccgagttacaagataaagtcagcgaccttcacccaacccttaaagagattgaaaatgttcaggaaaaattgtcgagaagggggtggaaaattaaaaaagaatacgtatttcttgatggtatagggctcagtaggatcctattacttaatgagtttgatagcctgatctcaaccacgcttgccactaacatgtctttgcttgcacgttctactgcactttctgttgatgatgatattggtggtaatattgaagagttactcagggaactgattacagagctgaatgaaaatagcaaaaaattcgatattgcattgaaaaaatgcgccaccatcgtccaaaaagtacttgatcttccgagcccgattgtcgatatctttcataagtga

SEQ ID NO: 447016 - DNA, 573 bp, Serratia marcescens
atgcttaatagtaattttaataacgaagagttgctaaacaggatttgtgaggtctatgggtttacgcagaaaattcaactagctaatcacttcaatatcgccgccagttccttacagaatcgctatacacgcggcaatatgtcgtatgactttgctgtccattgcgcgcttgagacaggggtcaatctaaagtggctcatgactggtgagggtgagaaaaacctttcatctaaagaagaaaaatcctcaaccgaactaccattattcactttaagtgatggaagattggccaataatggaaccttgagcatcgatactaagcttttcagtaaacagcttagaaaagctatctgcatcaggaatgagaacggtagctacatcacagagcaagaagcgtcattagctgatggcctgtgggttgtggacgttgaaggcgctataagcctccgcgatctaacgatactccctgggaaaaagttgcatgttgctggcggtaaagtgccttttgaatgtgggattgatgagataaaaacgataggacgagtagtaggtgtatacagcgaggttaattga

SEQ ID NO: 447017 - DNA, 954 bp, Serratia marcescens
atgccattagtacgttctgaacatgagctagaattagcgaaagaattgcttgatgatatcgaactctcgcgagtcaaggttgatgcattgatattaaaggcatctagattggctcgactttgtgggacagaagagtttcagaaatggttagattatgaggtgcgtggatataatagtagtactgaactgtcattggcatacatgggaaaaacgggtcggtggactaatagagaaaaacaagaagggtactggatgcctgtcgcgcaagtggactctttaattacggctaagacaatagaattagggtcgatgacaacaccaaatgttagtggaactgactacgccaatatagtaatgcataactacttaaataataaatctgctacctcaagcaaaatagcaaaattaacaggaataaaaagtcgagtgttgggaattttacatacattcacagcagaaatttattatgaaaaagagcttgactacttggccgaatcaatattcgaaaattacaaaaatgacgttgatactttaatctccagtttgtgcggtgatgtccttcagcaaattccttctgtagtaaacagattagctgaaggtgaagaagaatccgtgagccaagcactaaccactgtaagacgaatcattgacaactttgctgatgcaatcttcccagcaacggatgaaacctataatatcggcggaaatagcttaacccttgattcatctaaacaccttaaccgtttaaatgttttcgtacatcagagggttgaaagcagatcgagaagagataagattcgccagaacttatccaatctttacggtcgagtatcaactggcgtacacgctgatgtgtcgatcgaagaggcgcagtcacttttccttaactgctacctcctcttgggagagattcttcacatcagtaaaatggataagatagtaaacgcccaataa

SEQ ID NO: 447018 - DNA, 1326 bp, Serratia marcescens
atgtcgacaaaaaaatacgagcacattaaggagtattcttttcatggagagttttgccaatgtccagatgatagcaaaggaagattttccgctaagatagaatactcatcatatcatggtttaattttagactactgtatctctgacagtgatggacccgataagtgtgaaagactctatggttatctaaacactggcaagcaatgtacgttaattggcccctttgacttttcacaaggtggttttcatcttggaaaaggatttaccagaactggtcggcatggattcgctatcattttattcaatggcttttatgatgaaaatcaaaaaatagaatattgtgatctatctctacatgggttgcaggaattcattcatcctcaaggccttatcactcaactaaaacacaaaaatgccccaattttttctgcgtccgcagaagattggaagattgaactcattaataattcgacatttagcgtagtcggcgatggcttgttaaatattatatattgtcaagatgcagatgcgctcacgaagctatccgatgaatttttaaaaataaaagagttacacccatccgctagattttcaattagaaaagatctaactttctattttagatttaaaaatcataactataaaaatataaaagaacacatgcttaatatttggaagatatcagggctgatctcaatatttaccgacaaacctaccttgccagatgaactgtatataaaatttgaaggtagtaataccagaacaccatgcttattaacaactagctttgaacaaagaacaatagatcttgcactgaaagaattcgatcatcgctctttgccaataaactggagaagcatagacatcgaaaaagctttcgaaaaatggtttgagatttctgacagatatattcctttaactataacctatcagtatgaaacaggatacaggacactacaccaagcacattctgatattatccttttcgcaactcaaatcgaagcaataaactctacgctaggcggagagaaaagggagaagtatcttaaaccgattgatgaatatgcatcaacctttctcataaaaaaaatgaacaatttttttatgagatttaataataagtctttaggggcgaatattgcaacacttagaaatgaattagcacatgttgatcgcgataaagaattgatgacacaaatgacactagatgactacatcaggattggtatgtgtctaaggttaatcatcacctctcacttgctgtcaaatttgggcatcgaaaaagagcatatacaacaataccaaaaccgagttgcccaagattga

SEQ ID NO: 447019 - DNA, 780 bp, Serratia marcescens; identical to SEQ ID NO: 426660

SEQ ID NO: 447020 - DNA, 888 bp, Serratia marcescens
atgagcagcgctgcggatgatggattgatcgaatctgttaagaaaacattgatggacagaattaacacacccctgtttgggtttatatttctatcttggattgtttttaattgggataatatacttttcgtgatgcttagtgatgtaagtattgagaagcgaattaatgcaattaaaattagtggggattttctatttaaaggttttttgtgccctgtctcatctggcttcttgttaagtgttgcgtttccttacctacagtggcttgtttcctttctacaaaggtttgcgcagaagttaattgacgataataaaaagcaaagggaaagtgacgagtgtgctgcaatcattgctcttgcgcaagatcgcgctaatgcagatagtgctgttgaatcagaaaggacacgaacagccttggagatagctgaaaagaaaagatctattgcgagtgttgaattcaacacggagcaaatgcagaagcaataccaagagttgcacgaaaatattgaaaaaggtaagggggagttggcaaagatagaagataagcagatgcagattgatgtaaatatcagagtttcttcagaaagtcttcaggcgcttaaaaagcaagaggaagagttaaaggagagttttggttcgtttaacgaaattagagatgacgttataaaatttacagatagaatcaactctgcaatagaaaagataaacaatgatatgaccgaaaagaaaacggttgcagataactatcgagaggatggtaactttacccaagtgactgaagggacacttctcctggactttattcgcgtcgtacattcagagttgtatgaagttgaaaaagaagtctctaatgtaagaagtaagttaaaagcagattttatgttttga

SEQ ID NO: 447021 - DNA, 279 bp, Serratia marcescens
atgaatatcgaaaccgacaacctgaaagcgcagttggcgctcgagcaggaatgggattctttcctgcaccgccaacactttgaggcagcggcgacgcacggctattccgaggaggcgatcgaggttttcacgcacatcgacggcaccgccgccgacacccgcgaccgcctgttaatggccgtaatgatggcgacgccggacaccctgcagcagcgccagcgtgagctttacagctggtattgcgacaaggtgaaagccgtagcgcgcgagaagttttaa

SEQ ID NO: 447022 - DNA, 195 bp, Serratia marcescens
atgatcgaaataaaaaactcgataaattggtatttagtgaagattaataagtctatagcggcgatagagacttttaagtcgccggtaaattatgatgagttaaggtttcaatatagtattcttattgaatccatgttctcacttatcgattacatagaagacaaaaaaacgatcttcaataatggaaaaatttga

SEQ ID NO: 447023 - DNA, 957 bp, Serratia marcescens
atggaaagttatacatttgaattggaaggtaatgtatttgggttctttcagcgcaatgacaatgattgtctattatatattgacgacggtatgttttctgaagtgcgaaaatataattggagtcattggaaaaaaggggaggataattatcacgaaaactacccagacacagttgaccttgaggaaactgctagggcaattggttacttctcttggcatcagttttatgattactgtaaatatcgaccacgggttatgtgcctatcaaaaaaaaccgaaaccgggttatattatccaagaatgaacaaaggggagccaaaattataccatcaacaaataaaggaatctcaagttcttgatgaggtgagatcatttacaaacatatgcacttcattaacagagctattcaactatatagatcctgacgagagaaacctcaattgcttcggaagtaaagcaagggaaatactaattattgcttgcactgaggtcgaatacctacttcaaagttttttggtagagaataattattgcgccaataacggtagatttaccaccaaagactatgtcaaatgtctcgattttttaaaattaaacgaatactctgtggagttggtattctacccatcactgaaagattggagtccatttcgtgactggagtgaatcaaaggccactaccagcctagcttggtatgatgcatataattcagtcaagcataatcgcggtgcaaacaagcagaaagcaactcttaaattcgtagttaactcagtggctgcaattcatatcatcctcgtagctcaatatggatacgagatatttgacagtcctctacagtcaaatttttctagcatatttaaaaccaccaaatatccaagcttctcgacaactgagcttcaatgcccattaatgaataacgaaagaatattatggacaaaaaagggttgcctattctaa

SEQ ID NO: 447024 - DNA, 1110 bp, Serratia marcescens
atgaaaattatatcagtgtttaataacaaaggtggtgtcggtaaaaccactcttacatatcatattgctcaaagtatgtccgaaatggggttgcgtgtgttaatgatagatgcagaccctcaatgtaatctgacaatttattcattaccacaagagcatattcaagagttatggggagaggaagaccagtttatagactctggatttgatgcggcaaaagagaagatccctacagaagagtttgaaaggatatcaagaagtccaagaagcctgcattatatattgcagccaactcaagaaggtactggtgaccacaaagaactgccgccacctattaatctaagaaatgggctggatattatacctggtcgactaactttgcatctttatgaggagaaagtagctagtcgttggaatgatctttatagaggtgaaccgttggcgattcgcactatttctcggatccgcactttggcagaacaatacgataaaatctatgagtatgattatattattattgatacgtcacctagtttaggttctttgaataaggtgattatatcaacagtagatggtttctttatccctgctttaccagatttattcagtttgtatggaataaagaacattggtaagtctttggctgcatggaaagaagagtttgatattgtttatcaacttatttctactgagaaaagacatgttttccctgagaaattcgttcgattcttaggatatacaatatataacgccagaaaatatacttatggaaataagaaatggaatttagctcaagcccacttgaattatgcagagaaaatacctgggacaataaagagcaacattgctaagacaataagggataatatacctgatgatgttctgtcggaaccgattggtggcatctctgtcatgcatagtcataataccttcccttcaatggcacagtattacaatcttccaatgtggatggttccggactctcaaaatatagacgatgatcacgttgatacactgagaggtgctaagggtaaatacttggaaactcagggggcataccacgagtttactagcgatctaatttcaagaataaaaatattgggtgattga

SEQ ID NO: 447025 - DNA, 657 bp, Serratia marcescens
atgcataatgttgaagagatattgcaaaaatatacttcatcacgtcatctttttgaacgttttatgaatggcgtggttgatacttttaaactagaaccagcgttaaatgattatcattacccaattatttatacagtaaagaaacgattgaaaaatgtagatcatttgcgtgataagataggtcgcaagaataacgatgatgatccaataactattgataatatttttgaacgggttactgacttagcgggtgttcgtgtccttcatctctaccaagagcaattaagatctatacatgagttaatcgaggagaagattgcgactggagattggttctatagagaacagcctgttgcttactcatgggatcctgaaagtagtgatttttttacagagttaggattgacgcctaaaatcaaagaatcatattacactagtatacattacgtggtaaaaccaaaggctgattctaatatttgttgtgaaattcaggtaagaacattatttgaggagatctggggggaaatagatcacacgataaactaccctaatccaacagagaactttgcttgtaaggaacaactaagagtactgtcaaaactcgtttcaacaggtactcgtcttgctgattctatatttagaactaataagtcttaa

SEQ ID NO: 447026 - DNA, 1386 bp, Serratia marcescens
atgaataatgaaagcagagtttgttatgggtgtatcggtgaatcgtatgtgaagtcttttgttaaaagaaatggaaatgttaacgggaaatgcggatattgccgtagccgtaaaaaaagcattcctttggtagatgttgctgagatgatgcatgaagttttccagaacttctattaccccaccacagatgacggatgttattattcagtgagagatggtgattctgctgatcaaatcatttctgatgagctcgacttggattcagacgatttggctagtgatatactggagattttaaaatcagattttgactccagttcccccgatgaatatagtctgtatgattgcgattttctgtatgcgaacgttaattatgactcgggcgagttagatatagcttgggataaaatgctgaagtcactcaaaagtgagtctaggtactttaataaagacgtaaagaactttctcgataatctatttagtgacatcgaaagctataaaataacgaaagataaatcaccagtcgatgaaatcaaggaacaaacaaagttttatcgagcgagggtgtttgaatcttatgaccttgcggaaaagtcattaaagaacccagaaagggagtttggcccccctccttcaaacattgcccgttcgggaagaatgaatgctgcgggtatccccgtattttatggtgcatcctcgccagacattgctattgcagaggttaggccagctgtaggtagttttgtcattgtagccccttttgttaccatgcgaacccttcgcgttctaaatatctctgcgatggatatgatcagtaatggtgaacagagtaaattcaatcctgatactttaacgcgacagcaaaaaacatcatttttgaagacactttcaaaaaaattaacaattccagttgtcggaaaaaaccctgatagtgaatatcttattacacaggctgtggctgaatatttatcaataactgataaatttagtcttgatggaataacattcaactcaacgcaaattaacaagaaaagacaaaacaaatccgaatactacaatatagtattgtttaataagtcctctaaagtttttgaatcagataacagtaggcttacatatagaactgaaatttgggagaatgtagaggatgaatactatatgttttcaccaaaaataagaagagtagagcgaaaagcaaagagaagctttttaaataatcgatatagttttaatgttaacgatagcgtgctgaaattaaaggctgacgaaataaaatttcattcaataaggggcgttgtttttcaaacaaaagaaaccttaatagaattaggagagactattcaggaagaaaatacagagagcgataacgatctacatgatttttga

SEQ ID NO: 447027 - DNA, 1800 bp, Serratia marcescens
atggccaagcccgttgaccagataagcgccgcggttccattgcgcgctttgttgcggatcgggttgatattccccctggcgcaggaacagcgcgttccagccggccatcagcggccgcaggttaaacgggaaacgcatctgattggccgggttgctctggcgcaccgccggttgcgacatcagataagcgtacagcgcctgcatgtcgccgtcggtcattttgctgaaggcggtgtaaggaaatgccggatagaggtggcggccgtcgcgggcgataccctggcgcatcgcccgatcgaacgcggtaaacgaccagttgccgatgccggttgccacgtccggggtaatattggtgctgtagagcgtgccgaacggcgtcgccatcgccagcccgccggcattggtcgccccttccgatgcggtatggcaaaccgcgcagtctccggcggcggccagctgacggccgcgctccagcgtggcggccgaccaggtgccggcgccgggcgtcgccaccggcgcgatctccgcccgccacggcaaggcgctgccggcgatgcccagcacggcgccgaacagccccgccgcgccgccgaaccaccatttgccacgcttctttttcttgggcggcgcggcctgccgttcggcatccggcccgttcagcgcctcacgcagcttgtccgaggtgatcggcagctcgcgaaaacgaatgccggtggcgtcgaacaccgcgttggcgatggccgccgcgctgggcaccgacgccgactccccggcgcccagcggcggatcgtaagggcgcggcatcattaccacgtccacctccggcacctccgggaaggtcaggatcgggtaggccccccattctttggcggagaccgtcgattcctcaaaggtcacgcgctctttcaatacccggctggtcgattgcaatacattgccgtgaatttggtggcgcacgccgtccgggttaaccatcatgcccgcgtcgtggccgaccacgatgcgcgtcaccgccacttcgccgctggctttgtcgatcgccacgtcggccacccaggcggcccaggccgcgccaaagccgggaaacttgctgtggatgtaacgggcataggcaaagccgcgcccgcgcagcacaccgtcttccgccggggtctgcatcggttcggtatgcggcgtccagccggcgcgttctgcagtgctgcgcatcagttcactggcgcgttcatcattgatgtagcgcagccgatactccagcggatcgacgccggcggcgtgggccagctcatcgatataagactcgtgggcgaaggtgttgggcaaggcggaaacgccacgcatccaggaggcacgcacgatcggcgccatgtcctcgatgctgacgcgcagcgccggatactcataaggcggcaccgaagtgcgatcgcccatttcataggccaccggcagcggctcgacccggccggtcagcagcagcgccagcgtcggcgcgccgttggaaggataataggtgcgaaaatcgtaggcgaccgggtgcccggcggcgtccagcccgccgtccacctccatcagttgcgccgtgcccttcggttcccacacatgctcttgctcgcgggtcagctgcacccgcaccggcctgcccaccgcgcgcgacagcagcgccgcgtcggcgcagacgtcatcggcgcaattgcggccatagcagccggccgcttccatgcgaacgatctcgatctgcgtttccgggtactccagcagccaggccagatcggcgcgcagcaggtgcgggttctggctgcctga

SEQ ID NO: 447028 - DNA, 132 bp, Serratia marcescens
atgttattcccgctgcgtgaaaaatatcgtgattatttattaacgttaatcttcgtggattattgcggaattttttcgcatcggcaatgtatcgcgacgattaactcttttatgtttatcctctcggaataa

SEQ ID NO: 447029 - DNA, 567 bp, Serratia marcescens
atgttaaatgataaagagttaagaggtgcacttatagagtggctttataagaaatcaattaaacccaaaaaaataatagaggaactacctgtaaataatggattcgctatcgctgatgttgtagcaatatacaatgacttacattgctttgaaataaaaggcgagaatgacaagatagaaagaatagtaagacaaggagaatcatataatttatcgttcagaaaaataacactggtaacaacggtaaaacacaaagaaaaagcactaatgttagcgccgagtcactggggcatattagttgcaaagccacacagggaagaaataaagttcgcatatataagaaaaagcaagcccaatataaacttcaatccaatagtggctttaaccactctttggaaaagcgaaatgttagaaatattggaaaaagagaagattagcattctgagcaaagataaaaacagagacaccatttcactacgaatatcaagcgaattaaacaagctgagtataagtagtgaaattagcaataaactgcttcatcgctcaagaatcatatatgataaatga

SEQ ID NO: 447030 - DNA, 1104 bp, Serratia marcescens
atgtatagctatattccatttctaaagctaaaagtgagcgaaattggtgcattgaaagaattagcagataataagaaaaaagaactggttccttttttcgattttccacgcaagaaacctaaaaaaagccgatataatgaggatgctaagcaagataaaaatgagctattttataatgatttaaatcgactagagtcaaagtttagattgaacttaggatggttaagtgagttttacttggacaattatgatgttgaagacagtatatctataaacagaagatataactattttgatattattgaaaaattctcgaagttcggaatggtaccagtgatagctttggataggcatcctgagcatattaatgctatatatgatgggtttaagaaaggggtatttacaagaaaaaaagtagcaatgaggttaacgagggattttttctgtaattacactttatttagagatgagttgattgatattattgatggaatgttaccttttgttgataatgtagacttcatttttgattgtcgggtctgcaaaaatggggattcaacattagtttcaaaacagatagttgtttttattcaaaacttgatagaagataagtcgaaaatacctttgggtagaataataacaacaggttcaatgattcctgcatcaataagtgagttaatcgaaactcaatctgaattggatgttcgtcgtgaggagataataatatatagtgaagtatccaagagttttcctgatgaaaatattgttcactttggtgattacggtgctgtcagtcctgattattctgatattgagctttttgatgaagacatgcagaacgtcacgacagctaaaataatatatccgtatagtgacagggtctatataagaagggggggtagggttaaaggtgataagcatcaatataatgtttttgcagattatattgtaaatgaatctggtttttatcgtggggtaagatattctaaaggcgacctctatttatatcaaaaagcaaactatgaagggaaatctgtaacggctgcttcaatagttaaacctttggttaatcttcatttatcatatatgattcttgagcgatga

SEQ ID NO: 447031 - DNA, 882 bp, Serratia marcescens
atgaaggatgatattgacgatttggatttttctttcgggaagtactcctctacatcaatgcatgaggagtatgtaaattttttgacatttagtgaatatatagattcattacctttagaagcaaagagagccaaaggaataattgggaggaaaaaagattttaaaaatatatcagatcttttctcatcattctgccaaaaaacagcaaaaagtaatgctctattcaggaaaggagcatcttcggatgatctgcttgttagcacatggctatcattcgtatatgaaaaagaaaaggttatttctgcagtcgcaaatgttccggaatatacaccaatagaaaaagaattcctgcttgaatttgttaaaaacagtgttgaagaagaatttccgttgcaagcgccaaaagtactaatggcattagggatcattcttatttatgaggaggcaataccttcggctaaagttgatggagcagtatatattaatgataatggaaatcctgtaatagcaatgagtttgagatacagtcgaattgataattactggtttaccttaatgcacgaactttcgcatgttattttgcattatgaaaaactagattctcctattatcgataatatagatatagtcactgatcctgaagatttaattgaatctcaggccgataggatggctttagatgctttgatcccgcgtggctcatggcgtggatgccaggcgaaacaatcgttgaaagaagaagatctttttgctttttcaaaagaaataggcattcatccggcgattgttgctggtagaattaggaaagaaaggcaatcgtataagttcttttcaaaaatagttagtgctgtcaatctaagggagattgtatttaatgtatag

SEQ ID NO: 447032 - DNA, 684 bp, Serratia marcescens
atgagtattgatataaatcaattggttaggctaggtataattcctgcaccagacaatgaagtgatcattgaacagggctctattaataaatgcgatgcaacaaaagagagctatacgatatcatatggttggagtgtgccaaatgcgttatcgtgtgacaaaggctggaaagagtaccgcgcacgtattttaacccacataaaagaaaactgtaataatgatgaagaaaggaacgagatcctttcaaaaatacaaacggaagattaccattggaattggtttagtaaatcagtaaattatcatgaagatgaatataaatggtttttcttaagaacagataaccatgttgaggctgcgtgccttatctatttccctaagaaaagtgtttttagtgatggcaacatattctatgttgaatttatagcggttgccccatggaatagattcaccccactagaggaaaaaagatttaaaggggtaggtaaaatgcttttacaggctgttataaagtatgtaacaagaaacttgggttatcagtatggattctgtttacattcgttgcctcaagcgcaagggttttatgagcatataggcatgcagcatgttgatgctctggataaaaaaacactattttattatgaaattgataatgctagtgcgatgagatttgtgggggaagtatga

SEQ ID NO: 447033 - DNA, 1086 bp, Serratia marcescens
atgctgtttacttatacttatgtaccacatcaaatggagagaatgcagcggtttatcaatttcattttctatcaagtttggtgtagagcgaggaaattaggtccgtatgacttgactctatttgatgctaatccgcctctcaaagagataatgacctcttttgcctatgaccacactgcagcaggggatcgtttttcaagtcaagttcaatctatttatcaaagtttcacccagctctcgcgagagcaaacagctcagtttaaacggtggtaccaaggcaataataatctggaaaaggtatgtgccaatgtgccgaatgcacgactagctcgttacgctgacatcgcagtgaaccatgaggagctgtcagagcaactcggtacgtttttcaaaggattatactcgcagtcattgctggatctcgctgctctgcgcgccaagattggtgatattgacgatcattacaagaatttcgtgcaaatcaataaagttgggaaatgcccgttttgtggtatcagcgacttacttagcgaatatcatactaaacgcgaagcttacgaccattatctgcctaaggcattgtatccttttaattctataaactttcgtaacctcgtgcctgcttgccactattgcaacagtagttataagaccagtaagaacccagcctacacgccaaaagaccctgcaggagcagttcaccgtcgtgcggttttctacccatatacacatgtgacacattccatcgagttacaagttacactgaaaacttcagacatagcaaatttgatacctaacgatatcgacctggaatttggcccagatgctgttgccgaagaaatcgatacgtggaaggacatttacggtattgaagaacgctacaaagctaaattctgcggggaaaatgatggtaagtactggctaacgcaagtactcgacgaatggagagaggatggccgaaatccttctgattttcttacaacgttggcgcggcagactcggagtcgaccatacgccgattgcaactttcttaggaaacctttccttgatgcatgtgaggctcgaggtcttttacagaatttgtag

SEQ ID NO: 447034 - DNA, 1602 bp, Serratia marcescens
atgatctcgatgaagcgaatctcgttgtcacaactggcaacggtatcagccggtcaaggagcccccaaggagaacgaattttcagagagtggtgttcccttcgtccgcgcaggtagtttggaagcattgctttcagggaaaagtgaatctgagctggagcttgtaagtccagaaacggcgaaactgcgcaagttgaaaatctatccgaagggcacaatcctctttgcaaagagtggtatgtctgccaccaaagatcgtgtttacgttcttcaaaatccggcccatattgtcagccatctggcgatcttagcacctaagagtggtgcccatgtcgattttttacgactggctctgaagcgtttccctccatcggcattgatcaaagacaaagcatatccagctatcagtttaggtgatattgagaacttcgaaatccctgttccagaagaatttgacaaccaaatccggattgctcacctgctcggtaaagtggaaggggtaattgcccagcgcaaacaacatctgcaacaacttgacgacctgctcaagagcgtgtttctggagatgtttggcgatccggtacggaatgagatggggtgggacaaacccagtctgaaagccttagggaaaatttctacgggcaatacgccacccagaaatgatcctgccaattacgatggcgatttcatcgagtggattaaaacagacaacattactaggggtgctattttcgttacacctgcttcagagtttctttctgaggttggtgcgagaaaagcaagaacggtgacaaacggtgctttgcttgtggcctgtatcgcgggcagcgtcgagtcgatcgggcgtgcagcattaacagacaggactgtgtcgttcaatcagcagatcaatgccattcagcccggaaaagatgtgaatccactgtatttatatggattgtttaagttgtctcagacctacatacagagccatgccacgaaggggatgaagaagattctgacaaagggagattttgagaagatcacgatgatcaaaccacccattgaaatccagaatcaatttgctgtcatcgctgaaaagatcgaaaccctaaaatctcgctaccagcaaagtctcactgacttggagtgcctttatagtgcattgagccaacaagcattcaatggcgagctggatctatcgcaagtgccgatgccaataccaccaacccaagatgtcaccactatttccgaaggagagcaagccaccatgcctgccctcgttgtaaaaactgtgtctgccattcatttgcccaataccgataatctgctggctgccttggaaaatgctgaggctcgcaagacattgattacagaatggctggaagcctatcgtatacaacttgctgacacaccattttcgttacaacaatttatagagctggtgcaaagtcgattggcagaggttcacaccgacaacaactttgtgctggttaccagcgatttcgaatacatcaaagcttgggtattcgaggcgctggcgagcggcaaactgacgcaggtgtttgacgattcagctaactccatcgaactcaagtccgttattgagcaaagtctgacatga

SEQ ID NO: 447035 - DNA, 321 bp, Serratia marcescens
atgactactcgagtggacggtaagcgctatgaaacgccaattaattataccttttcttgtgtcggtgcgccttccaacatgatgaagttgcaggtgcaagggaatggtgcggcatttgataatactgtattaagcaccagcaaagctggtttggggatcgaattacgccagaaggacaacaagctgccaataaaccgctggctgaatttcacctacccgaataaaccggagttatgggctgtgcccgtgaaacaggggagtattacccttacagggggagagttcagtgctgccgctacgttgaaagtagcctatcagtag

SEQ ID NO: 447036 - DNA, 825 bp, Serratia marcescens
atggggagtagatttttaattattccattgctatttttcatctcttcatctactgcctatgcaggagggatttacagttacattactaaatcaacagggagtcctgtagatgcaacctatgagtatactgttgaatcatgggatgaagatatcgatatccctaacccttgctatggctatttctattgctatgtaggtattgctcaccgacatacagataaaggcgaaaagggggggaatatggtggagacatatcggttggataatgtaaggaatataaaaactgtcggtgagctaggcagggaatataaaaagcgtcggccattgccatattcaggcagaatgtttcatcagggaaactggggtgaactgactacggagtgtgtaggaatatattatagtccctcaaacgatattgcctatggatttcacatgatgcctggcatggtttgcggggtcgcacctcctcctgcagggatatgtgggtttacaaataccttggatgtcactttggatcatggccccgtgatttccactgcacaacatgagcctatatcggtgaatattgggatgtcatgtagccaacagtccaagttaaagttgtatgtaaaaacggccaataatggtcgccttgatctccagggccctggttctggtgtttacagtattctccgtttaaatggtatattggcagataaaggattagacatcctggtgggcccttcagggactaatgtttcactgtcatctcaacttttcactaattctttatcttcggcgggcagttacgttgccagcgccgtaattgtactggcagttccatag

SEQ ID NO: 447037 - DNA, 5856 bp, Serratia marcescens
atggataagctcaatcatccgctggcgcggggcgccagctatttgctgatctacctgacggctttccagccgttgcacccggcgtttgccgccggcattaccgccgccaacggcaatacgcaggtggttatcaagccgggcgacgtgccggtggtgaatatcgccacgccgaacggtgcaggcatctcgcacaacacctataaagatttcaacgttgggccacagggcgccgtattgaataacgccacgcacggcggcaaaacgcagctgggcgtggaaatctacagcgcgcagggcaacacctacctgaagggaaagccggcggagttgatcattaatgaggtgatcggcggcagtcgttccgagctacagggcaagctcgaggtgttcggcaacaaggccaacgtgatgatcgccaacccgaatggcatcacctgcgacggctgcggctttatcaacgcgccgggcgtgacgttaaccaccggcaaaccgcagttcgacaagcagggtgcgctggaagcgctggaggtgaaaaaaggcggcgtcaccatcggcggtaaagggctggacggcagcggcgccgactatgtcgatatcatcagccgcgccaccgagctgaatggcaaaatcaacgcgcaaaatctgtcgctgacccagggtgccaaccgcatcagcttcaaggacggcagcatcaaaccgatcgccggtgaaggcgctaagccccaactggccgtggataccaaagcgctgggcggcatgtacgccaacaaaatccgcctggtggccaacgaggatggggtgggggtgaacctgaaagacctcaccagcaaacagcgggatattacgctgagcgttaacggtaacctggtgcttaacggcaccacgcacagcaaaggtgacctcaatgtcagcgccaaggagttgcacattacgcggggtgctgtcgtgcaggcggacggcaacgccacgttggcgacgacgacgctggtgaatgacgggcaaaccagcaccagcggcgatatgcgtatttttggcgaccatatccgcaacgcgggggaaaacgccaagctgcacgccaataaaaatatgtggatccaaaaggatgcgcagggcaacaaggctaaatccgtcgagaaccgttcggcgaaaatcctgaccaacagtggcgatttggtgatacgcacggagagtttgaacaatgtgaggcaagaggttcaagccgtttggaaaagtactcccggtaactccaaagcgttcaataaatccttggtgggaagttattacgactcgcggcaaggtgttgacgctattgtgctgttggaacctgaactgaaggactttggcatcggcagttggtttggcgaaattaacctgtcgaaaggcgacaaggttaatgtggggaaagacgagtatctcctggtgaaatcacaggcgccgggagtgataaattcaggcaacaacgcttatatcaacgcgacaacgttatggaacgatcagtcgaatatcagcgcggccaaagatctgatcctgacggggaacgattttaccgtaaagagcattcaactcggtcagaaagatcggtactggcgcctgggaacgaacacgtttggcgttggggagtttgcccgtgacgaagatgcgcctcccggagattgggatctgctgtatgttacggaaaaagccccttataccaagcagcaggagcttgttgtctggcaagcaaaggggcagcaacaatcatcgattaccgccggcaataatctcactgcggattttaaaaataagatagaaatcagtacgccgacgcctcatgaaaatcagctgaatgaagtggtcacctccggcaggccagagtcgcttaaggcgcggaatgttctgctgcatgccaaaaacatcgtcggtactgatgcgattcgtgccgacggcaatatcaccgcgattgccgaagatcgaattgttcttgggcaaggcattttggccgccggaaaagagctgtctctgacggcagtcaacgctatcgacgcatggcaaagtgagctgaaagggcaggacgtcacgttaaacgccaaaaacggtgagataaaaatacattccagtgagaaacctcactacttccgccctgacggttctcgctggttgggcagccttgaggcttcacgcgatttgtctctcacggctggcagcaccattacgttgctgaatacgctgttggcgccacaaagccgcaatatcgccatgacggctaacggcagcattgcaatcgtcaaaaacagcgcgttgttggaggggccgctattgggggggccggtttctccggctaagcggcaggaatacttcaaccagctgttggccagtggccaaatgagggcaacgggttcggttctgctcaatagcggtggctatctggcgctccgcggcgccaagattaatgcggataaggacgttacgctgttagccgcccataacgccgatcttaactaccgtgaacttgacggccgattcaatgcgcttttccctgtgtcccgtacgcctgaactgggcagccgggtacacgccggcggcaatttgctgattaactcggcccgcgacatcggcacccagggcggcgcgctctccgctaacggcaatatcacgctgctggccgggcagaatctatggttgtcgaacctggcctattccgccattgatgccgccaacgacaacaacaaagacgaccgccatgtggtcacagcccttagcgcgggtaaaaacctgaccgcgtcggcgaataaccaactgctgacttacggcgccaggctgacctccggcgccaacatgacgctgacctccggcggcgatatgcgtttcgaggcggtgcaaaatcacacttaccgcgagggcggcaacgagttcaccgaaactcgcacccagcaaggcaccgagctgaatgccggcggcctgatgacggtgattgccggcggcagcattctgttccaggcgaccaagctggtggttaaaggattaggggcgaactggaaaccgtcggtggcggtgacggattggggaagccggatagcggcggcggagcaggcggttagaaatgcagagcaaaatgttaatcaaaaacagaatgtactgaacaacgttagaaatacgcctgaaggtttgttactcgataatcctgctcagcatcctatttcatacaagcacagtagttctgtaatgataccgggtacggggacttatcacctcgatatggggaatattgaaataaaaacccgttcagatctggatagattgcttaatgagggagggaaggcatttgacccattcccttatggtgtcgatcctgcggaaacatccggtgatggttatgagattgcgctggcaattcgaaaaaagacgatagatgaatatgaaaatttgcgtcaacgcataatcaaaaaaaagaatgagatacacgccgcccaacaagcgttgaattctgttgatagtgaaaaggtaaacgcaaataggaaattagttagcgtccaacaggaagcccaagctaaacatgcggaagaaacaaggctgaaagcccaggtcgatgcccacaaccaggcagaggccatgcgtgtcggcaatatggatattgccgccaagggcggctatctctacgcccaggcgatggaagagtccagccattacgagaaaaaggaaaccaagcgcaaatggtggggcaagaaaaccgaggttaagcagacccgccatgacgtgaccaacaaggttaccgagtttaccgccgccggcaatatcacgctgatgagccgcgacgacagcacctatgaagccagtaaaatcgccgccgggcaaaacgcgcgcctgaccagttcccgtggccaggttaacttccgcgcggtgaaaaacacctctttcgaacagaccgtcagcaattcgaaaggcttctttatcaagcaggccaataaagggtacgaagacaataagtgggtgctgccgagcattcataccggtggcgccttgaccgtagaggccgccaagggcgtcagcgccgatgtgaaggtgaaaaacgggcaggcgctgcaaagcgccatcgacgccctgggcaatacgccgggcaccacctgggtcaaagatctgaacaagcgcaacgacgtgcagtggagcaaggtcaaagacgcttacgatagctgggattacaagagccagcacctgaacccggcggtggcggcggtgatcgccatcgcggccgcggcggtgaccgcaggcagttcactggcggccacggcggcctctagcgtttccggcgccgtgggcggcggggcggtaaccagcggtgcggtcaccgccgggatgtcttcgctggcctcccaggcggcggtggcgttggtggagaaccagggcaacctgtcgaaaaccctgcaggcgctgggtagcaatgagaacgtcaaggcgaccgccacggcgatggcgatcggcggcgcgctcaacggtttcgacagcgcgatgggctggagcaaggacgcggcgggcaaaccgctcaatccaaacaacgtcaaactgccgcagctgagcaacggcgactggagcaaggtggcgcagcgggtggccgggcaatcggtcatcagttccagcctgaataccgccatcaacggcggcagcttcaaggacaacctgaccaatgcgctgctggcgaacatcggcagccaggttcaggccgagggcgccaacctgattggggataacggtcaggttctcaatataccgggccgagccgtaagccatgccgttctagcgggcgtggccgcagaaatcggcaagggcaatgccaaaggcgcagcggcaggggcgctggcggcggagctggccggggtgatattgggcgacaatatcatcaagccggaggagtggcagaagaaatcggaacagcaggcgcagatggcacgagtgctgggcgcagccgcaggcgcagtcttcaccggcaagtctgatggtgcttacagtggcgccaccggtggtgagaatgcgttccgatacaactatctcagccacaaacagcaagaattgatggagaaagatttggcggccgcgaaatcgccgctcgataaagcggttgtgttggcgaactggggaataacgagccatacccaggatggcgcctttgcggcaggtgtagtctcgggcatcccggttgaaatcagcgatacggtggatggtttggtcgccgtggccagtaatccacgcgaggccgcggatgcattaatagctctgataaagaacgatgaacgattctcgattatcggagagagtgtgaaacaggaatacctggggcggatcgagacattcaagacgaagtacgaacatgccggcgtggatggcgcttttggtgcaggtctggagtttggtaaactgacgatggccgggctagggctgtttgctggggccgccggtgcaggtaagctgggtgtaaaaataactagtaacacgcttaaagctacttccaaagctgccgagaaaaacacattaattgctctagaccgcatgcccaaaagtgagacgaaacttccgtgggactcttggcaaaattatccgaaaaaaacagttgatggacgtcaatacgcacgtataggtgatcgtctttactctcaacatgccgttgaccgaatgcaaccaacaagcttaggttccccagcaggaaccattggacctggaaaaaccatttctccaaatatagttgaacatgtaattaaaacaggtgttactgaaacaagcatatccaatggtattcaaaggacaatttatcgggctggtgacattggtgtggttactgaaaacaatggtaacatcataatcacaatccttcgtaggagtgaaaaatga

SEQ ID NO: 447038 - DNA, 345 bp, Serratia marcescens
atgattaaccgcagcaaactggaacacatcctggcatatgctcgacagcagaaacagtttggtttccctacatgcagaataccaccgggggatatggtggaaatcatggagaggcttctggctcaacctgtaagttgcggttacaagttggtgccagtagagtcaactgacgcatgggctgagcgttactgcgaattgacaaacaagcacccagacggagggctgacgacatatatcggtgacggcgctgtaacaatcacgttccgcgaaaagtccaaacgcgaaattgacgcaatgctggccgcagcgccggagggtgggaatgatcacgatacccgacgataa

SEQ ID NO: 447039 - DNA, 234 bp, Serratia marcescens
atgagcaaggtaaaaacgatgggcgccagcgccttaactggaaacatctattacggcacgctgaacaccgaaaaggggctgtgggttgggcagaaaactgacgtgacagaaatggcgtgtttagcggttgctgaacatctgtacaccacgaaaaagagcaaggtttatcacttaagaaacggaagcgagctggtaattagcgtacaggtacgggaggtcaaggatggacaataa

SEQ ID NO: 447040 - DNA, 324 bp, Serratia marcescens
atggaaaacaacgcaatagcacgaaagttggagccgccgatcatcaaccccgttgagattgagtgcgttctgctcaaccggcttgcgtcagtagggcagaaagcctatgccgagcaccttggcatcagtgaatccacagccagccgacgcaaaggtgaggggcactttgcagcgatggcaaaggagttggcgtttctgggtattcaggccgctcctcccgaagcggtactggtgtcccgtgattatttagcgtcagtcgagacattggctgatatcggattgaaagcagagcgcagccgaccggggccgctggggtgggactaa

SEQ ID NO: 447041 - DNA, 1047 bp, Serratia marcescens
atgagcatgaacctgatggcgcaggctatgagcatcaaagtgggtaacccactgcgcaagctggtgctgatcaagatagccgacaacgcgaacgacaagggcgagtgttggccttcatatcagcatgtcgctgaccactgtgagtgcagcaaaagcgctgtgcgggcgcacattgaggcattgataaagatgggactactcaccaaagagaaccgcctgggcgtgaacaacggcaagggtaatacctcgaatctctactatctgaccttggacaaccctgtgccgtcagaaagcatagccccctgtgccgtcaaaaagcatagccctatgccgtcaaaaagcacaggggtatgccagcaggtgatacagggtgtgccgtcagaaagcacaccccctatgccagcagatggcaccagaaccagtcactcttttgaaccagtcattgaaccaaaagaaaaaccccccatagccccccagagcgatgctggagcagcgaaccaatcagctgaggctggggaagttctcgattttctgaatgaaaaaatcaacggaaggacgccaaagcgtgccgatacgttgcgggaaattaccgaacgcctggtggacggcaacagcgccgccgaactgaagctggtggctgaacaccgcgcaagtctgctgctgggcgatccgaagatgggccatatgctcagcgccaagatgattttcgatgccgtacggttcggtggatatttggcagccgccaaagcctggaatgagaaacgagaaaaacaagcgtttgcagccgcagcaacggagcgccaacgcgtcgagctctcgggatttagggtggttggggcctcaacggaaaaaatcccagaaatagattttgatgaagcgttcgaccgcctaatccgtgatgcgtccattcctgaaaacgaagctgagaagcgtgcgctgcagcaggtacggaaaaatgggtttgggaacgtggacgagagcaaggcccgtcaactgtggcgcccaattttaaccagagcttacgcaatgtcaggagttcaggcatga

SEQ ID NO: 447042 - DNA, 1236 bp, Serratia marcescens
atggcttcggcagcagaacccgttaactggaaacgcaaccttttcgtcgcctgggtagggtgctttctcaccggcgccgccttcagcctggtgatgccgtttctgccgctgtacgtcgagaccctgggcgtaaccggccatcaggcgctcaacatgtggtccggtctgctgttcagcattaccttcctgttttccgctatcgccgcgcctttctggggcgccctggccgaccgacgcggccgtaaactgatgttgctgcgctcggcgttgggcatggcgatcgtcatggtgctgatgggcatggcgcaaacagtctggcagtttctcgcgctgcgggcggtgctggggttgcttggcgggttcatacccaacgccaacgcgctgatcgccacccaggtgccgcgcaaccgcagcggctgggcgctcggcaccctgtctaccggtggcgtcggcggtgcgctggtcggcccgctgatcggcggcctgctggccgatctgtacggcctgcgtccggtgttttatatcaccgccgcggtgctgttcgtctgcttcgtgctgacgctgctgtatgttaaagagcaattcaccccggtgcaaaagcgcgacatgttgcacgcacggcaggtgttcgcctcgctgaagaacccgaagctggtgctcagcctgttcgtcaccaccatgatcatccagatcgccaccggctcaattgccccgatcctgacgctgtatgtgcgcgatctggccggcgcgacccataatctggcgtttatcagcgggctgatcgcctcggtgcccggcgtcgcggcattgataagcgccccacggctgggcaagctgggcgatcgcatcggcccggaacgcattctggtctttatgctgatcgtctcggtgctgctgctgatcccgatggcgttcgtgcaaacgccgtggcagctcggcgtactgcgctttctgctgggggcggccgacggcgcgctgctgccggcggtacagaccctgttgatttataactgcaccaatcaggtcgccggccgaattttcagctacaaccagtcgttccgcgacgtcggcaacgtcagcggcccgctgctcggcgccgcggtctccgccggctacggttttcgcgcggtcttcgccgtcaccgctttggtggtactgttcaacgccggttattcctggtggtgtctgcggcggcggccgggctatatgcgggaagacacgctgcaggaagagtaa

SEQ ID NO: 447043 - DNA, 561 bp, Serratia marcescens
atgagaactataggttttttattgctcgctgtaggggtgatttggctattaattgcctttaatatggatacttctgttgctactgggtatggcgagcgtgtaaataatataggtctgatagcatctaagcaaaatcatatgttaatagcctctgtggtctctctcggagctattcttatggttatatttggacgggagtcatcaaatgacgtcggaacaaatgtaaagtgtccatattgcgctgaaaggattaagtctgatgcaattaaatgcaaacattgtggaagtgatgtggcggagaaaataaaggcacaagatgaaagtaagttttctttcaatggctttgatttcagttcattgctatccaagcaggatggtttgtcattgattgacgatgaggttaagagtctggctgataaaataaaatctatatctcaatcaaaaagagcatcacatatatttggtgagcatcagtctgaaatcacatttttaaaatacaagctaccttctagtgttcagagtgactttattaaaagactgaagtactggcttgcaaaataa

SEQ ID NO: 447044 - DNA, 354 bp, Serratia marcescens
atggcacaacttaaaacattctatttccctccgcgctatggtgcggctggggaatttgaaccggttgttcgggaagtgcagtttggtgatggctacaggcaggtgaccggcgatggaatcaacagcgaaaaggaaagctggccattaacgttttctggtccctggaaatttgtcgaaccgatcgtggcatttttgcgtgaacataacgggtaccgttcattccagtggcgtaatccactgtatcagctggggctctacaacgcaggggcctttaccctaacgcccacttttgccaacgctcagggccgtaattacaccctgacggttactttcacccgcgctaatcatccgtag

SEQ ID NO: 447045 - DNA, 3126 bp, Serratia marcescens
atggcggaacagattgctgatcttgtcgtcaatttggatgcaaacacggtctcttttcaggagcagatgggccgcgttgagcggcagttactcgagtcaagccgaaaggcggatgtgtctaccgatcgtatgcgtcgcttggcagaacgccaggcagcaacgatcagtgggatagctgaaaatagcgccggtgccaccacgaagatgcaggccagccaggctgttgccgtggatggcatgaaagggaaatggtctgaggcatcgcgggccgtcgatgaaacccatcaacgtatcgcggagctcagtgccaggctgcgtgaagagcagcagcaatcgcaggttaccggggatgcacaggatcgcctgaccgcgtcttttttccgtcagatcgatgcagtaaagggaaccgaaaacagcctgcaagagctccgtgtgattcaggagcagatccgggttgccagggcatcaggcaatattacacagggggattacctctctctggtgacagaaacggcgacaaaagagcgtgcactggcacaggcagagcgtgccgcagctcaggccaaagacgattacctgcagaagcttcgtgaacaggttgctttgcaggggaaaaccgcatcacagattcaggagtacaaagcggcgcaattgggtgtttctcaacaggcagcaccgctgattgccaagatgcgcgaacaggaggatgcctggaaacgcggtgcgatttcggctggccaatatcgcatggcgatgcgccaattgccgatgcagatcaccgacatcactacctcgctggcgtctggtgctccaatatggctggtggccattcagcaaggtggccagatcaaagatagctttggtggcgccggtaatgcgctaaaagcaatgctcagtctgttaacgccggcacggttgcttattggtggtactgccgcgttaatggggttgctcgcttatgatgcctacgacagcagcacgcggatcgccgatcttaaccgtgagcttgttcggactaatggtgtttccgggttaacgaagcaggggctgcaggatttagtctatcaaggcacggctgccgggcagtcttttactgctgtgaccgattctttgaaggcgctgatcgcagccggtgccacgtccggtaccaacttttcacaggtgagtcaggctatcgccgcctattccaaagaaagtggcgaagggctggatgtgttggccggcaagtttaccgcgatagccaaggatcccagccagggcattttggcgctgaatgaaagcctgcatttcctgacggcagaacagtacgccaacatccgctcgcttgaggaacaagggcggcaaatggatgccgtgaaattggcctcagatcttgcggctgatgcgatgcatggtgccgcagtgaagatgaaaaccgaactttcctcggttgaatcttacatgcgaacactgaaggatatggctggcggcatgtgggatgccatcacgggtgttttccgtgacaagacggccggggaagctaccgccgaattgcaatcccgcgcggcaagtattcaggcgcagatcgcaaactctgagcggactggctataaccagaagaacggcaagctgcaagcctggcgcgaagagctggatttgctcaatttccagcttgatgccttaagtctgcgccgcggtgcggagaagggtattcaaaccataggccagcagcaaaaggaaaacgagcaagaacgcttacgccttgcgcagcagcaggatgccctggctaccacgctgcagaccaaggaagaaaagcgcaaaaagctgattgaccagacaaatgaagcttttaatcaagggcttatcaagtctacagctgcgcgcgataagcaaataaaacggattaacgaacagttcaaggatccaaagactgccaaaggaccacaataccgcacacctgccggtgaacgggcgacagatagtacgcagtcagagatgttggctctgcagactcaattgcaggtactacgccagcacagtgggctgaatgacacgataagccagcagcgcaaggacctatggaaagctcaagcgcagttcattgtattggaggaggcggctggtaagcgtcagctatccgcacaggaaaaatctctgttatccagtaaggataaagtactggcgttggcggaacagaaagccgcgctcggcgatcaaatcgctcagcaggaacggatcaacaaactgcaggacgcctcgaccaaatatgtcacccaaatggccgagaagcagcaggcgctgcagcgcagtgccggcttgggggatcgtgccgcccagcgtgaaagcacctttgctcaactgagccagggatggcaaaaccagggagggagcctggacgatgcaggttataagcgtcagttgcaggccgcacaggattattatgcagcggaggacaagttacgaggcgactggatggccggcgcttcgtctgcctggagcaattatcaggatcaggcgtcggataccgccggtatgaccaagtctcttttcacgggtgctttttcgggtatggaggatgctctaacgtcctttgtgacgacgggtaaagcaggatttaaatcgttcaccgtatctattctggcggatctggccaaaattgcgttgcgaatggcgttgagtcaaggcttacaaagtcttttcggggcctttagtggcggtgctggtaataatccaggggcggtaccgatgtttgctaacgccaaaggcggcgtctactcgtctccgtcgctgagcgcatacagcgggcaggttgtgagccagccgacattcttcgcgtttgccaagggcgccggggtgatgggtgaggcgggcgccgaggggatattgccccttaagcgcggtccagatgggcgtttgggcgtcagtgtttatggtggtgcggcttcaggtgctaccggcgctgcgccgcaagtaaatatcaaaatcgcggataatggtcagtcatcgcaacagcaaacgacgccaggattggaatcgtttggtgctgatatcggtaattatgtggcgaaaaaataccgtgagttgagggataaggatcttagacaaaacggcgtgttaaatcaggctattcgcggcgggagggggtaa

SEQ ID NO: 447046 - DNA, 738 bp, Serratia marcescens
atggcaactccaaaccctttggcgcccgtaaaaggcgccgggacaactttttggctttatacgggcaatggcgatccgtacagcaacccgctcagtgatgatgggtggacgcgtctggcgaaaatcaaggaactgcagccgggtgaaatcacggctgactcttatgacgacagctatctcgatgatgaagacgctgactggaatgccaccgcacagggggcgaagtccgctggtgaggccaacctgacgttagcgtggaagcccggcgaaaccggccagcaaggcctggtagcgtggttccattccggggaggtacgtggttacaagatcaagtacccgaatggcgccgttgatgtgttcaagggctgggtaagcagcctgggtaaaaccgtgactgccaaagaggtgatcacccgctctatcaaggtgaccaataccgggcggccgtacattgccgaagacggcgattcaccagtcgtgccagtcactggtgtgaccgtcgcgccgaccaccgcaaacgttgcagttggggcgacggtggacttgacctttaacgttctgcctgccaatgcaactgatgccggtttgcgtgtgagtacctcagcgccggcgacggccacggtaactcaaaatggcaatgtggccaaagtgaaaggggtaaaagccggcaccgtggacatcatcgggatgacaaacgatggcctgctggtggccattgccaagattaccgtagcctaa

SEQ ID NO: 447047 - DNA, 402 bp, Serratia marcescens
atgattaagcatgcggagatccgcaatgcggtactggaccgttgccgcgcaacaatcaccggagatgtgacctattttgacggccgtcctgcgttcgtcgatgagaacgatttgccggcagtggccgtatttcttgatgatgcacgttatacgggcgcatcgatggatgaggacagttggcgcgccgtattgcatgtcgtggtgtacctcaaagcgagccaacctgatgcggcactggatcagtgggtagaagagaaaatctatcctgtccttaatgatattcctgatatggccagcctggcagaaaccatggttcccgtgggttacgactaccaacgggatgatgaaatggccacctggggcgccgccgatctttcctaccaactgacctataccatgtaa

SEQ ID NO: 447048 - DNA, 321 bp, Serratia marcescens
atggctacgaacttcgtgcaaaacggcaacaccatcgctatcacggccacagcgaatatcgccagtggcgccgcggtaattgtaggggacctggtcgctgtggcgatcactgatatcgccagcggccgcaccggtgatggatttgtctcaggggtgtttcaactgcctaaattggcggcagatgtaattccggcaggcaaaaaggtgtttatcaaagatggtgtggtgcagttggcagcggcggacggtgtggctgccggctatgcctgggaagctgcggcaaaaaacgtcactgtgattgcggtaaaaatcaatggctaa

SEQ ID NO: 447049 - DNA, 216 bp, Serratia marcescens
atgaatcaggctgatatcgaaaacatgatccagcgctatctggacgcagaaacatcagtattggagggaaagtcgatcacgtttaacggccaatccatgacgatggaaaatctgtcagaaattcgcaaaggcagagagtcctgggaacggcggttgacgagtttgaccgcgacgcgccgcggacggccgatgtacaaagtggcgaggttcccatga

SEQ ID NO: 447050 - DNA, 2109 bp, Serratia marcescens
atgacagttaattgttacgcatcggccagcgccttgcgtcgtgaagttgccactttgctgaagcccccccggcgtatgcctgtggcggaagcagtgacaaaatatatgcgggtaccgatgggggcggggagttctcttccttgggatccaaccctaaccccctatataattgagccgatgaactgcctggcttcacgggaatatgatgcggtggtgtttgttggtcctgcgcgtacgggaaaaacggtggggttaatcgacggctggatcgtttataccattgtttgtgaccctgcagatttcctgttgatacagatgacagaagaaaaagcccgcgaacattcgaaaaagcgtctcgacaggacttttcgtgtcagtaaaaaggtggctgaacgtcttagcccacgaacaaatgacaataacgtccatgacaaaacattccgggccggcaactacctgaagatcggctggccgtcggtcaacatcatgtcttcttcggattatcgttttgtagccctgacggattatgaccgctggccagacgatattgatggggaaggcgatgggttcacgctggcatccaagcgtaccaccacttttatgtcttcaggtatgacgctggttgaaagttccccagggcgggagatcaacggtaaatggcgacaaacctctccgcacgaagcgccgccaaccaccgggattttgtctttgtataaccgtggtgatcgtcgtagttggtactggccgtgtccgcattgcggcgaatatttccagccatcgaaatctaacatgacgggattccgagaacatacggatccggtgattgccagcgaagcagcttatcttcaatgtccccactgcgcgggccgggtagacgccaaccaaaagcgagagcttaacgggcggggggtatggctaaaggacggtgaaaagataagggccaatggggaaaggtacggtgacgttcggcggtcacgtatcgcgtcattttggatggaagggcccgctgccgcatatcagacctgggcgcagctggtttacaaattactgacggctgaacaaacattcgaagccactgacagtgaagaaacgttgaaagcggttatcaacactgactggggcttgccatatttgccgaggtcagcctctgagcagcgaaagtcagatgcactgatggccagggcggaggagatcaccaaacgtgctgtaccagattgcgttcgtttccttgttgcaacggtagacgttcagggtgggaaaaatcgccggttcgttgttcaaatcatgggttacggtgctcacggggaacgctggctggtggaccgttacaacatcaggcagtcgatgcgatttgacaagaacggtgaaagcctgccgattgatcctgccgcttatcttgaagattgggatctgctgcgaactgatgtgctggacaaagcctggccgttggataaaaaccccgacatcaaaatgccggtgctggccatggctgtggactccggcggtgaggacggtgtcacgggtaatgcgtacgaattctggcgtaagtgccgccgtgatggggtgcataaacgggtttatctcttcaagggggacagccaggcccgtagcaagttgatcagtaaaacattccccgataacacaggccgttccaaccggcgtgcggaggcacgcggagatgtgccgttatatctactgcagactaatgccctaaaagaccggataaataatgcgctattacgtaatacggcagggccgaattatgtgcattttcctgattggatcggtgaatggttctatgacgagctgacgtatgaagaacgcgggccagatggtaagtggaagaagcctggccgtggtgctaacgaggcatttgaccttatggtctatgcccatgcgttggtgatattgcgtggctacgagaagatcaaatgggaaaaaccgcccccttgggcgcaaccctttgaaatgactgaaagctcaactccatcacccacacctgtaccccttgccacatctgaaagattaactgaacaaaaagacaccgcagcccctgaaagtaaaccttcagcgtgggcacccattaattcatccggagggtgggtatga

SEQ ID NO: 447051 - DNA, 771 bp, Serratia marcescens
atgcctcaaccattaccaaagtttgtagaaatcaatgatgaactcactgatcgattgagtgcaggtagcgtgctctctgagatggaattttatcgatatatcagatcgatagaagctgttaatgatagagccgtacaaagctatttgtacgcgatggcaaatgctgcgtatggtcagaaggaaaaggcggttgccttctttgaagaagccttaagctatagagttgacattgctccagacaactacttagcgtacatcaatgatgcgggctctttctccgaagtgaaggagctgtctcatcgattagcaaaatctgttgtaaagaaacagatttttcatagtgcgtaccagactagtatttttagcggaaatctagagcaagctagcttctacgcaaaaaaatacattaacattgctgatgtcaaggagagccaggagatggctagttctctttcagatgcaacaaaagagatccaaaaatttaaggaaaggtctgggttgtctgatgcagactttcagatggttgcggatgcgactatacgtgtcgtagagactcacggctgtaagatttctggcttgtcatatcagagtattcgtgaagaaagcgcccattcttatgtagtcctagttaagagcagtgaccctgaaaaggtcgctgaaatgaacattgatcttgcttttgcacttgctgattatgatcaactgaccgacaagaggttcagcgcttggttcaaaggacaggaggctgaccataatgccagttttagctga

SEQ ID NO: 447052 - DNA, 999 bp, Serratia marcescens
atgcgtgggctgataaaaggtgtagttgttcgtgagctggggcaagtaatcctgaagcctgatgctgaacttctgcctatgtttggtgatcgggtgctggtggccacggtacctacagagtttcgcgatatgccatctggtgcgctgccggcagttaagcagcagttagccagtgatccgcgtttccgcccgttctttcagcatgagcgtgttcttgctgccgctgggggcatcaacagcctggagagttggctaggtcgccgtaacgaatgtcagtggaagtgcgccgaggacgattatcacgacaagaacatggagaccatacgttatggcgccggtgctattcgtttgtgctggcaccatgcgaacttgtaccgcgataagtccatggatgagctatcagccatagcagatcaaaatattgctgacttcgtagtctaccgggccagaattcacttcatgtttgatgagagtcaccaactgactttaccggaactctgctggtgggcttgggtgaatgaggtcattgatctgatccctgatgatgtcgctgcagcctcgttacgcattaagccgcgcaccattcctaccgggcaccgaagagaggcagatattacccccagtttgtcacctacccaacagatagcggagatagctaagaaggccgcaaaggtgttggtaatcgatccggagcccccaaaggcattattcaagatcccaaagcgtgagcgatggacgagtgaaaagtttactcgctgggttaagtctcagccgtgcgcgtgctgtggcaacccatccgacgacccacaccacatcatcggccacggccaaggcggcatggccaccaaggcacacgatttttttaccattccgctttgccgaaaacatcacgatgatttgcatcgtgacatgtcacggtgggaagaagatcacggcactcagatcgaggtgtggttcaggttcattgaccactctttatcgatcggtgccatttcataa

SEQ ID NO: 447053 - DNA, 183 bp, Serratia marcescens
atggaaaacgaggtaatcgtgccgtttgaaatggattgccgtgacagtcacggcgtaatcgttcgcgtgattggtgtcgatcaggtaaatcagcgcgttattttccgtcgtccaggctacccatacgactgtgcatgtccacgccgggacttcgggacaaaattcaagaaggtgcaggaatga

SEQ ID NO: 447054 - DNA, 246 bp, Serratia marcescens
atgaaccctatcgaattcattcgcaagaacgtcgttacgcagttggtaggagaaggcttccccgaggatgtcgccagggggggggcagaggaggcggtcgatctgtatcgccgtatgtctcaggcaagcaggaaggggcgcatctacgacgattgccttactcaagcccggcaatactgccgattccacacaccaaaacacctgaaagggggatccaatggaaaacgaggtaatcgtgccgtttga

SEQ ID NO: 447055 - DNA, 621 bp, Serratia marcescens
atgattaacacaatcacgatcgatactgaaaccctggacgtgttgccgtcggcagtgctgctctctatcggcgcgtttgccttcaatattgacgacgttcaccagacccagcaaagcatcatcaaggtggcgcgtgagggtgagctggcagactactcgaccaatgcattttactgtctggctgataccttcgatcagctgatgaaaggccgtaccgtcagcgaagaaacccagcgtttctggcgcaagcaaggcgaagaggcgcaggaagctttagtcggtgaccgcgaacctctgtgtcaatctcttgggttgctgtccaactggattaagcaacaccccaatgcgcggatcttcttccgtggcaccgacttcgacggatcgatccttgagcatgcctaccgcatgtatgggatcgaatgtccgtggcactggggcggaaagcgtgatgtgcggacctatatcgatgccatgaccaaaggcacaaaaggttttctgcctaaaacccaccagccatgcttctcgatggttaaacataactccctacatgacgctatgaacgacgccgaacagatggccattgcctatcaactgaatagccaacaggtaggtgcagcatga

SEQ ID NO: 447056 - DNA, 132 bp, Serratia marcescens
atgactggtttcgccatgttccgtcacgccgatacgatctacatcgaaactggtgcaaaaccgaaagccgatgctggcgcagtggaaatactgggtagcgagtacaacgcggcaaagcaggaggccaaataa

SEQ ID NO: 447057 - DNA, 207 bp, Serratia marcescens
atgagcaagtcacagatgaaatatgccaaccgtgcgtggcgcaaggctacggcgaattggggcatgaacaagaaaaaccatcgctccttttgccgtgagaacgcggcaataactgttcacgaatactgtgggcgcggagcggattttcagtgccaagctgatgccgactatcaagtcgctgaagaacttacgtattgggaggagtga

SEQ ID NO: 447058 - DNA, 522 bp, Serratia marcescens
atgggcaataagctgagcgaactgagcaagccggtggcgtggacatggagtgcatatggcatgcagcacgccaccactgaagaagatgagtctgctgaacttattctcgatggtgtcgatgtttgtcccctctactcgcaagagtacgtatccgccctgctggcagatctggaattcgaaaagcaaaacaatgctggcattgccgggatggtcgaggactacgaaaccaagcttgaagcgaaggataagcgcatcgcagatttggaagctggattgcttaattcacatcatcgcctgatgaacacgactcaaaattgttctgagtgggaacgtaaggcgatcagcaattttgatgagtgcgcgaatatgagccagcgcattgaagagctggaagcaaagctggctacgccggtgcggttgcctgacccggacgaaaatgattacggctatcagtcgatctcgtatctgcaagccattgacgcgatcaacgatgctggcttcaccgtagagggggatgagtag

SEQ ID NO: 447059 - DNA, 1011 bp, Serratia marcescens
atggcgggtaaaaggaaaaatcctgcggataacgcgctacctaagcgcgtttaccgtggaaaaacacaatacgaatttcaccctgtaggtggcggttctatctctctttgtgcgttggattcccctctttccttggtctgggcgaagttcgaagaggaaaattcaggcgcgcaaaaaaaacgttgctttgctgctctggttgatgattttttcggttcagccgatttttcaaagctgagcaatgaaacccaaaaagattatcggaaatattccaataaggtactgcctgtgtttggcaaaatgttacccgatgaaatcaagccacagtacatccgtcaatatatggataagcgtggagtaaaaagcacaacccaggctaaccgagaaaagtccttcatgtcacgggtattccggtgggcatatgagcgtggaatgataaagatgaacccatgcaaaggcgtgaagcagttcaaagagaatgtgcgggaccgttatataaccgatcaggagtatgaagctctctattcggtttctcctccgctggttcagtccgccatggagttagcctatctatgctgcgcacgacaaggggatatcttaggactgacaaaatcgcagcttctttcagaagggatattcatcaaacaaggaaaaactggaaaaaaacagatcaaagcatggaccgacagactgagatccgcaatcgacatcgctgcagcgctacctatcaaggaaggtatagcgagcctatatgtgcttcaccaacctcgtggccatcgatacacgagagatggttttaacagtcgctggcaaagtgctagggaagcagcgatcgcagcatttccagagttagcatttgatttcaccttccatgatttgaaggcaaaaggtatatctgatctcgaaggttctctcacagagaagcaggcaatttcaggacacaagagcattgggcagaccgctagatatgaccgtaaaactaagatcgtgccggtagtcggcgggcagtaa

SEQ ID NO: 447060 - DNA, 708 bp, Serratia marcescens
atgtatgaaaatgtcgccgtttcattaacaccgcgctttgggctgaaactttccggtgatggtgtttcagtacagaaaatttataacctctccggtccggattttatcagcgtaactcaggctggtagctggctgccgcaatggaattcggcaactggctctgttcgcgtgcaagtgaattcatcagtcgcaggttatctccagtctgccagtaatatcacggttcaggttggcaattcatacattgtcagttgtgtaggcaaagatacagatccaacagacgcggttggtctgacacttggcgcggtgatcggtaatttgccgatggcctattgccgcatccaaaaaacgccaacacaggatgaagcatatcgctatggtacgagagatagtgcgtatacgagccccagcagtgctggcggagcggtcagcgccgttaaaacgccgtacatcgattatcagccgtctgccgcatttttcgatgtcagctcgggggtagttatgccgtttgacaacggccgcgcaggaacaccggcaacggcaacaacgggagcactttacgcgatgcgttctgcgacaccggtgataatcggcaatccagcattcacagggtcagtgatgcagaactgcgatggttctttccgtgattttacgattcttagttcagcacaatccgcagatgctttgattttgtcgcgcattgtgtag

SEQ ID NO: 447061 - DNA, 708 bp, Serratia marcescens
atgtgtggcagatttgcgcaagttcaaacacgctctgactatctcgacgtgctcgcttctgacctcgaattcgccggtgcgttagacaatgttccgatcggtcgctataacgtagcgccaggtacccgcgtgctgatccttaatcaacgcgaagacaagatacatctcgatcctattgagtggggttacggcccggattggtggcgtgaaatgaaacgccagcctgttatcaatgcccgcgttgaaacggcagccaccagcagaatgtttaagccattatgggatcacggccgtgcactggtgatggctgatggctggtatgagtggaagaaagacaaacacgacgccaaagtaaagcagccttacttcatctatcatgaatcgaaatcgccgatatttttcgctgcaataagccgccatcacccagatgaaaaagatcctcctgatgatgacggttttgtcattgtgaccagctccagtgaatctggcctactcgatattcatgatcggcgtcccgtcgttttaccgccggcggcagcacgcgaatggatggacccgagcacgagctcagagcgcgctgaagaactggcaaaggaagctgccacgcctcccgatgatttttcatggtatccagtaggtaaatcagtcggcaacatccgtaacgataatgccgaactgataaagccaatctcaagcccgctggtttaa

SEQ ID NO: 447062 - DNA, 1689 bp, Serratia marcescens
atgttaatcgacccttcaagcaaatatcgaccgttcccgccggtggctttgccggaccgccaatggcctgcgcgtacgctgcggcaggcgccgcgctggtgctccagcgatctgcgcgacggcaaccaggcgctggcggaaccgatggataacgcgcgcaagcgcgagttctatcaattgctgttgcagtgtggttttaaagaaattgaagtggcttttccttcggcgtcgcaaacggatttcgattttgtgcgcacgctgattgacgagcagctgatcccggacgacgtcacgattcaggtgctgacgcagtcgcgcgacgatctgatcgaccgcaccttcgaggcgctgcagggggcgccacgggctatcgtgcatctgtacaacgccacggcaccgatgtttcgcgacatcgtgttccgccaggataaggccgccaccgtggcgctggcggtgaacggcgcgcggcgcattcgccggcagtgcgaggcacagcccgataccgcctggtgcttcgagtattcgccggaaaccttctgttttactgaattggcgttcgcgctggagatctgcgaagcggtggcggcggtgtggcaaccggggccgcagcggccgatgatcatcaatctgccggcgacggtggaagtgagcacgcccaacgtgtatgccgatcagattgaatggttctgtcgccacttcagccgccgcgccgatgtaacgatcagcgtgcatccgcataacgatcgcggcaccggcgtggcctgcgcggagctggcgctgttggccggcgccgatcgggtcgaaggctgcctgttcggcaacggagagcgcaccggcaatgtcgatctggttacgctggcgttgaatctctatacccagggcgtggcgccgggcctggacttcagccgcctgaagcaggtggtggaggtggtggagctgtgcaatcagctgccggtgcaccctcgccatccttatgccggcgagttggtgtttaccgccttctccggttcgcatcaggatgcgattaaaaaaggcttcgccgcccagcgccagcgccaggatggctggtggcaggtgccttacctgccgctcgatcccgccgatgtcggctgcagctatgaggcggtgatccgggtcaacagccagtccggcaaaagcggggccgcctggctgttggaacaaaatcacgggctggcgttgccgcgcggtttgcagattgatttcagccaggtggtgcagcgcgcgaccgacggcagcggcaaggaaatgagcggcgcgcagctgtggcgcttattccgcgacacctatgggctggtggagcaaccgcgcttgcagctgctgagctaccagacggaaagccacggcgtagaggcctacagcttcaatgcgcgggttgcctgtgagggagagccgctgcggctgcagggcgccggcaatggcctgctttccagcgcggtggatgcgctgcgccagcgcttcggcttgccgctggcgatcgaggattaccacgagcatacgctggggcaccagagcgacagccgggcggtggcctatattcgctgctcgttgccgcagggtgaggcgacctacggcgttggcatcgacgtcgactccgccagcgcctcgctgcaggcgctgctcaacgtcgccgggcgctatctggcgtcaacgtcggcgcggccgggctga

SEQ ID NO: 447063 - DNA, 216 bp, Serratia marcescens
atgctgtcgaacatatgtgagctgatcggtggcggtgacagaatacggctgcaccacgatcggagcgccaatcgggttgccctcatcatctacatcgttggcttttgtattgatgcggctgcctacctggtcaatcacgataatcgggccggttgtggcgccagtgatcccgttgaagtcggtaagacaatcattaaaatatgggccgagcaatga

SEQ ID NO: 447064 - DNA, 633 bp, Serratia marcescens; identical to SEQ ID NO: 30074

SEQ ID NO: 447065 - DNA, 792 bp, Serratia marcescens
atgagggtagcggtgaccatcgaaatttcgaaccaactatcagaggtgctaagcgtcattgagcgccatctggaatcaacgttgctggccgtgcatttgtacggctccgcagtggatggcggcctgaagccatacagcgatattgatttgttggttactgtggccgtaaagcttgatgaaacgacgcggcgagcattgctcaatgaccttatggaggcttcggctttccctggcgagagcgagacgctccgcgctatagaagtcacccttgtcgtgcatgacgacatcatcccgtggcgttatccggctaagcgcgagctgcaatttggagaatggcagcgcaatgacattcttgcgggtatcttcgagccagccatgatcgacattgatctagctatcctgcttacaaaagcaagagaacatagcgttgccttggtaggtccggcagcggaggaattctttgacccggttcctgaacaggatctattcgaggcgctgagggaaaccttgaagctatggaactcgcagcccgactgggccggcgatgagcgaaatgtagtgcttacgttgtcccgcatttggtacagcgcaataaccggcaaaatcgcgccgaaggatgtcgctgccgactgggcaataaaacgcctacctgcccagtatcagcccgtcttacttgaagctaagcaagcttatctgggacaaaaagaagatcacttggcctcacgcgcagatcacttggaagaatttattcgctttgtgaaaggcgagatcatcaagtcagttggtaaatga

SEQ ID NO: 447066 - DNA, 987 bp, Serratia marcescens; identical to SEQ ID NO: 99328

SEQ ID NO: 447067 - DNA, 951 bp, Serratia marcescens
atgaacgtattcattgatacaaatctttatctagacttttatcgtatggggcaagacaagctagatgaactaaataaagtatttgctttgcacgactatgggcaactaaaaatttgggtgcctgaacttttaaaaaatgaattttggagaaatcgttctaaagtagttgctgataatattaaagaaattgagaaagactataagccaacattaccacatattttcaggcaacatgcagatcaaaaaacattccttagaatagtaagtgaagcaaatagacttaagaataaaatttttgaagatatacagcagcaatttaaagatgaaactttggcagcagatttggttatcaaaaaaatttttgctgcagcagtaaaaatagaagttgatgaagcaactatcgaaaaaggtaagcgtcgttatgacttgggcaatccgcctggaaagaataaatcttacggcgacgcagtaaactgggagtgcttactagctgctataccagaaggtgaagacatatacctaatcacagaagatggtgattataaaagttctttcattaaagatgatatgaatgaatatctgaaatatgaatggcaaaccaagaaaaaatctgaaccgcatatctatgctagattatcggagttcatcaaagagcactttccgcaagctaataatttagcagatatggaagttaacttgaccattaaagaattagaagagtcggcgagttttgctagtactcatcgtgttgtttcgaaacttctaaaattcaaagagtttaaacaagatcaaattttcaagattataaaaatttatttcgaaaacaatcaggttcgatacatcaaagatgatcccgatgtgaaaagtttagccaacatgatcattcaacaaggtgacgaggaaaaagatccagaaggcattcttgaagctttcagcgtaatgatagattaa

SEQ ID NO: 447068 - DNA, 588 bp, Serratia marcescens
atgacactaacgactgagaagtacaccgaagggttgtgcggggatggcgcggcaatcctatgcgatggcgttccgatgagcgtaagcgaaatcttggcgacgctgaatgctgcggtgatccgggaggcgcagccggtggcgttctatgggagcaatggtgcctactacaacacaagcaaggcagccataaaagatgggtgcgaagacgtcaccccactctacacctccccgccagcgccagcagtaccggaggaagccaaggttggtgaaatgccattccttggcaatagtgagccgggttatgtcagaggctggaatgactgccgcgctgcaatgctggctcaacctgtaagtagcggttgcacgttgaactctccggtaattccggatggttggatagcgtgcagtgagcggatgccagaattggataagcgagttctgctgtattttgacagttacgacggccatatcgaagatggctgtatcggtgatgatggcgatgggccatatcattacttctttgatggcgattcactgcagcaagagccaacccactggatgccattacctgcagcgccgagggtgtga

SEQ ID NO: 447069 - DNA, 333 bp, Serratia marcescens
atgaccgaagtattgacttatgaggcactgaaggctgagcgcgatgcgctggctgtggagaatgcggcgctgaagtcgaaagtcgccgagcttgtgcatgaagcatctgaagtctactcagcatacaacgccacaatcaaagaaccagacggtgacttcatggatatgcagacgctgtatgagatgaagtgcatcgaaaccccagccacctccgcagcacttgcagctatccaggcgcagggggtggagatgttcgctgatagtgagcattgcagccaagaggctcattgctgcgcacatcgttatctcgccgcgctgcgggaggccaaatga

SEQ ID NO: 447070 - DNA, 138 bp, Serratia marcescens
gtgaatgcggacatcaatggcaacaggttgttgatggtgaaattaaatgtccttgctgtggaagcgattatcttaataaagcagacattggtggtgaaattccagaatggtttaatccagatgaaagttaatcattaa

SEQ ID NO: 447071 - DNA, 354 bp, Serratia marcescens
atgactgattacagcaagatgagtgactttgagattaacaaattggttgctgagcaactgtacaaagacaagccttcattgattgtgcagcgcgacgtgccaagtcggccggcggttacagtattctgcgacattggtgatggagaaatagtttctatcctatgtgctgattactgcaacaacccggcagacgcatggccgattattgttgagaataaaataacgataatggcggcttcattgggtgataaatggatggcgcaggcattcaactactcaattgccgacattggaacaagaccacttcgctcagccatgattgtcttcctcatgatgaaggatgccgaaaaatga

SEQ ID NO: 447072 - DNA, 522 bp, Serratia marcescens
atgggcgatgaaataaacaaaggcggtcgcccatcagattacacagaagagttagcggaaagcatctgcctaagactggcggagggcgaatcgcttcgctccgtctgtcgtgatgatgggatgccatgtaagcaaacagtgctgagatggattagccgaatccctgagtttcgcgcccaatacgtgcgagcgaaggaggaaggcgcagaggctattgccgaagagctgttcgatattgccgatgacggaagtaacgactggatggaaaagctcgataaggaaggcaacgcgatcggataccaacttaacggcgaacatgtgcagcgatcaaggctgcgcatagatacgcgcaaatggtatctgtcaaagatcatgccgaagaaatacggcgaaagaatccagcatgaccagacgatcacaatggctgaccgttcagacgatgatattgataagcgaataagggagctaatgaatggacaagctgcctctactgaacggaatgacgaagagccagaagattga

SEQ ID NO: 447073 - DNA, 1974 bp, Serratia marcescens
atggccgatatcgtccctaacgttgtcgtctcgatgccttcgcaattgttcacgctggctcgctcgttcaaagctgcagctaacggcaggatttacatcggcaagattgatactgacccgaccataccggagaaccagattcaggtttacctggagaacgaggatgggtcacatgtgccaatggcacagccgatcatgataaacgctggcggatatccggtgtatggcggtcagattgccaagtttgtaacagtcgaaggtcatagtatggccgtctatgacgcatatggcgctcagcagttctattatccaaatgtattgaaatatgaccctgaccagtttaagcagtggttattaacacaactatctagccctaatggctcttcgatgattggttttgatatcgatgtagattatccagtagggactatcggacatgcagttagcaacatattcaaaactgagcagcacatccaattctactatgacaaaattgggaattgggatgatgcaatctttgctgctcaagtcaatgtttacactaaaggatactctcctaagcttatacttcctgccggaacgataactctaaatagaccaattcttggcggcgtggctctcggtgacaaaatccactcaacatatccagcgttgaatttctataactcagctactgggcaatatgcggccacatggccattgataatccatggcgtgtttaacaagcagcgcgatgcgacaactggaatgccttcgggtacgcagattaaattctctggctcagcatctagagcagacgttagctggcgtgactatggagtaatacactgcgcgcctactgaggtcgctcaaatcaggcagacggccccggtgttaaaattctggcctggttatgcagatttgcgtgatttcaacatctggggggtcaataaagatgcaagcagacaccctaatgttcatgggatcgtaatccacaacggaacccaggtaaatattcgtaatgttacggtatatcaagtatatggttccggcgtgctgttcgattggtcttgggatagcatcgtagaaaattgcaagtttgtgcaatgtgggcgcatgtcaccaacttggggggcgtggcagaccgcaggaaatacagggtacgactatcagacatatgcagctatgcacgtacttagatctcgctcaacggataacagcaactttattagattcaaaaacaatcatatagaggactgctattacggagctgcggacatgatcgtaagtggcaactcatctccaatatggctggaggattgccacttcgagtgcgatgctggagatggcgttggagcggcagggaaaaaactcgcaattggcctgggtaattttggggtgacttatttcactcaggactcagacccaagctacgattacactaatcgtcctgacactggaaccggtggttatttagtgtggcggggcggtggcatgtatacgcctaattatggaacaggccaagttggcggcatgctcttcatgacgcgatactctggcgcaatcctaaacgatgtaggcctcccaaacgctggcgatgtatgggttcgcggcggtaatgctgaaccttatttccatgcaagcaattcgtttatcggaaatatccaggtcacaggtggtaatagcaaccagataccacttaaattggacggggtaaagtgcggcaacgtaacagttgattttgcaaacgcagttagattatccaacgtaacatccaatggaacattcaatgcaactaatttcaatggaacggcagcatctaacgtcaccgttcttaacggggtttcattcgcagttatgaatgctcaaattccaaatgcgatggggatggtctacctaacctccaccacaacggcatcaaatattcgcgccggccgcggcaaccttgaaattgccgattacgcttggttccgcaatcatgttgggggcaactaa

SEQ ID NO: 447074 - DNA, 507 bp, Serratia marcescens
atgaagcaattttgcttagctcaatcatcgtcacggataaacttctggcgggactatggtattttctcttcaacagacatatccagaatgaacgaagtacaatttacttcggatttaatatataatattattaatggcctatctgatttcagcaactcatatttagatcaaatgtataaagaatatgatgatgaattcaatgatgagcagaaaatcacggaaagacttaatgcgacgttcaacaaactggctgaaattgaaccaaggaaattctctgacacaattttcaagcgtcaaccactattcttttccctatttttaattgttgacgaattaggaagtaaaagaactagaaagattggtgaagtaattgatgagattgactctatatttaacgccgataacaaaaaaccagacgatattgcattcgcaaatgcttgttcatctacaacacaacgaattgcacagagaaaaattcgcgcggactatataaagagatttttctaa

SEQ ID NO: 447075 - DNA, 615 bp, Serratia marcescens
atgtctactcctaagttgagtatcacaatacgaaactctcatcatgcacttgaccgtctattatggtataggagagagtgtatttctttggatgccaaacatcagcacatcatatcagaaatgattatgcttagagtattctcaatcttagagttacacatttcagaaatagcgttcaaaatcgcttccggggcttgctatacaaacaacatacaacctattacatttatgagatgtaagagcattgctggtgctaggaacctcttcttaacctttggtcgtcacaagcccattatgaatctaaaatggacaaaagcaaagtatataaccgatagtgtaaagtatgttattgatgcaaacgacttttatataaaaaatgcaaacatacatagccacctaattaatgagatgagaattgttagaaatgtattggcacatcgaagtaagtcagcaagagacgatttcctcttattaataagaacagcttatggagctcaaaataacataacccctggagcatatttaacaacaacaagacgagggccaatatgcaatatagagcgctacataacctcatcaaaaataatattaaatgatttatgcaaaggttcgtaa

SEQ ID NO: 447076 - DNA, 210 bp, Serratia marcescens
atgacggacgggtatgactgttatcagaacgcgctggcggaacagataaacgggatactcaaaacggaatacctgctcggtaggccagaagatatcgcgcaggcaagaaagatggtcagggagtcggtgaacttgtacaacacgcggcggccgcacctgtcgctgaaatacaaaacgcccgatgaggttcatcgggcgttatccggctga

SEQ ID NO: 447077 - DNA, 1782 bp, Serratia marcescens
atggcaaaagataatttggatatcgactcaaagtcaatagaagaactttactcttggtatctcgatggtagtttgattgtcaataggagatatcaaagaaaactggtttggtcattaaatgaaaaagtggcattaatatcatcaataattgcacagtatccaatacctcttttgttatttgtcaatcttggagagaaaagggaaattctcgatggcatgcaaagacttgagtcgataatgagttttatcgagcaacgatactcaattgatgggtgttattttgatctcgattccgttgctttaactaaagggttgaaggataagggaatgattgagcagaaaacaccaatgcttgatagagatatatctactgcatttgctagatacaaatttgcaacttcagaatactcgtcgtcagaaggtgatattgatgaggtatttagacgaataaactcaaatgggaagaccttatcacgacaagagatcaggagtgctggatgtgtaagtaatttctctgaaattgtaaggaaaattgcaaccttgattagaggtgatacgactcattctgatacaatcccgcttgaaaaagttcatcatatatccatatgcaatgacggccttgattatggggtgagtatcgattcacatttctatgttaaaaatcacatcctaacaagaaggagtattagggagtctgcggatgaggagcttgtcgcaaatattgttgcctatacacttcttgatgaaaagccaacttctggatctagttcgctcgatggtttttatggaatacatgacactcaacatacaactgaagtcagagaagctctagagcataatattcaaacgataaattctgatgttatcataaaaagatactcctatgtatatgactctttagctgagctattttctggagataatgttgtttttaataggcatattcttggtgatgactctacatctcaagagtgtccacgatattatcaagcggttttcttgacattttatgatttaatgattaatgatcatatggttgttaaagacccagatggcttgcttgttaaactaaaaggaataggaagaggggacgctattataaatgttacggatgggggacgatgggctgctagggctcgccaagatagtgttgaaaatttaaaggcacatgttttaagatattttgaggtttctgataaaggttatatcaatcataacttcgttacagaggtgaatgaattgttgatgaattcaaaaaccgaacaacctaattatgattttaagcaaggtatagttaatttatctggtgaaaataaagttgatgaagaatgtgttaaacatataatagctacttgcgttggtattaataatatatcatccgaagctgttggatatattatagttggtgtgtcagaaaaccaaggcacagcacaaagagtgaaggatttattcggttgtgagtctatccatattaacggtttttatgtatctggtatagacggtgaagcgcaggctcttcaaaagagcttggatgattatttaatgttgattaaaggtatgattgatgaatctggtgtcgatgaagcgttaaaacaacaagtgttaaaagacatacaaatatgctcttatcacggaagacatgtattgaaaataaaggtcaagagtattggttcagtttgtacatatgccaatacgtatttcataaggcagggttcgactacaaggggaattgaacctacagatgttaatgccgttaaagctttgtttggcaattacaaataa

SEQ ID NO: 447078 - DNA, 273 bp, Serratia marcescens
atgtgggtagttgtacggactctcttatcctgcggccttaatgtggacactgaaaataaaaaatacttattaatcaaaataaaaaccaacaaaaaagggaggctttcgcctcccttggtaactcccctgcctgaatcagtgattacggatgtattcgtccatatcggttttcaggttgtcggacttggtgccgaagatggcctgcacgccggagccagcgacgactacgccggctgcgcccagtttcttcaggcccgcctggtcaacttttga

SEQ ID NO: 447079 - DNA, 762 bp, Serratia marcescens
atgacaactactcgcgtttacatcgatagcacggttacagccacacgatctcttgggagaattacatttccaattaccgcgctaccaaatttagttccagggatgcttttgcaatttgatgtggactctacagggtctcttgtgcgtaatagggtaggcagtgacatgacagttattggctctcccgttgttagtgattatgaagtttctcttaatgaaacaaattatattgataccggaataaacattgagccatattctaccggtgatatgacatttattggtatcagcaagaacccaggcggcaagtttaacgtcgtgggggtaatgcaggtatccccacctatgcgcaccaggtgtcatgagtatgagatagcaaaacgagtgggcggccggtggttaaactctgccggagctggttggatttctgtactcgatacgacgccaacagaggcgttagcgctggatagcatctttgcagtttctcgaacagtagtagatatcaaagatgggactggccggctcggtatccatgcagatattcctgcaactggccagcatgcgcttgtcccatacgggactgttgcccctgccagcatcactggaaacatcctgataggggcaagtattgaccacggcacaacagtaacgggaaaaattatggcggtactggcttttaaccgggcaatcacagatgaggagatgtcattgatttatcaggcgtacaaaaaccattacgcggcattagggaagaaaatttaa

SEQ ID NO: 447080 - DNA, 2142 bp, Serratia marcescens
atggctaccacaccgacaagtaacccaatcccaagcgaatctttgaatgatttaaggtttaataccgggaagattgatgaaatagtaaactcagacaatagaaaatacgttgataggtttggagttgaaagatacacatggtctggagcgttggcaaatattgcacctctggggcacccatggactgtgtcagaagcagatgctgctattgcgtcaggggagatcccgaatctagcgtattattttgtttggtcgcaagatggcaataaaattgctgatgtatggcagaacgttaatggagttggtcagaaaacagggaaaagctacccatcaagtgaatttgtttatgaactacaaaacaaagttgatttcgtttatgacagcaatgccaaaaacgtttctgggttcccaggggtagctgagatggcgacagataaaaaaggtaatgtaacttaccggcgattagaagatggtacatcgcagtttcctgccgttatggttggtagccgaattgagcaagtgcagggcgctaacgggtcaacctttcaatcaagagattcaggagggttgattctttcgctatctgaagatggtagcattggaatgcttaaatacagcacgttcttctctaatgagtacccagattacgcagaggtacatgttgataagaatggagacatcttcaagatagttaagcgagatggaacagtaattgatattcgcgatagggatacacaacagacaagcccggttgtctcatcagatggtggtcttgcaatagaggatgatggatttattaagttcatatccagcaatggtgaaaacaaaagtattacatctgattccggaaataaaaatccagtcactttcaaggcagtagacgatagttattttgtaaagtttgcgtctaaagaaggtgggaacggtgattatagtatacatcgcatcaagccagacggcctttctcgcattaagcagggaaattcaacattaattcatgttatattagttgggcaatccctgtcagttggcggagcatcagtggttcaatcccctgtgacaacttcggccaggcatccatatggggcagtaacgtttaatggtggccctaaatacgacagcgcatatccggcaaagtcagttgagctttcagatctggactacttagtatcctctgtagaaaacattgggaaatgtggtgctcaagagtctgattgtagtggcattggagagcgaatttttgagctctcgggtattacatgcttggtttctgcaactggatcatcaggtacatctctggcaaatatttcaaaaggtaagccatcatttatctcaacacaaatggtgatgcgtagagcatatgaaatagctacaggtctggggatggaatatcgaccgtacatgctcctcattcacggcaatgcagatgctgtgaataacacaagcgctcaagactacaaaaaccttatgttaactcttcgtatggattatgaggattatctacgagatgttacagataatccaaatctaaatctgaagatgtttgttcagcagtttagtaatgcaactgttcaggccggagcagcgggcgctgatgtgaatctaataattgggaatgcgcaatatgaaatctgccgtgataatgatgatttcatccttacaggcacacaatatactcgcccctatgtcgataaagatcatctgtcaagtaacggttatcgaactgatggggaaattgcaggtatctctattgctaaatacttaaatgatggtaacaatattgcgctcagaccagatgattcaaacatcactcaaacatcttctgaaattgtcattcctctattggggggggtaggtaatgcagtgatcgatacatcaagagtatcagaccccggaaattatggttttcgtcttgttggcgccactataactggtgttaccattgataatggtaatacagtaaggattgcaaaaactggcacggcaaccgcagtgaactatgcatatgtaggtaataaatctaatatgccaggtgccaataccggaaaccgagggtgtattagggattcgtctactgacgtttcaccagtttcaggcctgccgctctacaatgatcttatcgctttcaacaaatatttctaa

SEQ ID NO: 447081 - DNA, 633 bp, Serratia marcescens
atgaacagacaaacagcgaacacgagaatgccattaaatatccctgaggctggtttcaacaccaagcttaacgtcacaggcaacaacatcgagcacacgaccgctttcatgcagaaaggcgttgtggacttctcgctgcctggctatacgacgcctcacggttatcgtctcgtaaaagcccgcactgaagaccattatcgtttggtaacggattcccaagatccggtcactgtgtacgctgttcgtctggagttcatggaaaacatcgtaccaggtagaagaagctgcacccagattatggtctggcgtagtgttcagccgcagtacacttctgctgtgacaggattaccaagaatgttcttccagtacttcttggagagtcattcgatcgtcgtatccgacagtgaacagaccagcgatggtcgtcgattctgggaaggcatgattgcatgggcgattcaggcagatggttaccatgtttatgtttcagatggtactgaagaagatcgccctctgacctttatgacttcgtgggatgatttctacggaacttggactgatttctgttggggtgatgatcgtgactgtcattcacatcgactgctggtaatcagcaaagatcagcttcactaa

SEQ ID NO: 447082 - DNA, 135 bp, Serratia marcescens
atgagtaaggccatcggggcgcatggctatatcgtcggctgcctggttcaaggtcgccatgatttggcactggaagaatcacgtaagtgggtcgatgcgttttcacagacagcggagctaatcaaaaatggataa

SEQ ID NO: 447083 - DNA, 540 bp, Serratia marcescens
atggataaattcagtgaactgaaagcggccgcaatggccgctacgtcgggtccgtgggaatggttcacaagtaacagcatggcgcgattgagcagcataccaagcggtcaagatggtgatgtgataagtgcctttctcgcatccgatggagtgccatgtgtgagcgttagccaacccgacatggaatttatcgcagcagctaaccctgccgtcgttctcgccctgctggcagagctggaagccaaggatgagcgaattggcgagctggaggtcatcgccaccgagtacgccggtaaattccagaaggcgcaggacgcgctgaaatacgcggcaatcatgagcgatgaggacaagaagaaaattgccgagttggaaaagcggctggctacgccggtgcagctacaaaattgtgacttcgagtcagtagccatcatggctcactggtgcactgatgagcaactggaagcatgggtgaagggcgttgaacacgccaaaaagcaaatccgcgccgctgggttcaaagtcgagggggatgagtag

SEQ ID NO: 447084 - DNA, 141 bp, Serratia marcescens
atgatcgccgaaggcgtcagcatgatcaccaccaagcaaaacgagtgggcgtctacgctgcgtactcagggcatcgacggcttgaccaaacagctgcaggccgctgccgcgcagcccatctcgctggacaagaaaaactga

SEQ ID NO: 447085 - DNA, 1476 bp, Serratia marcescens
atggctcgggaactcaggcatccaccaagcgcagcatgtctttcggcctcaatgagggatcttgggtattcgctcgaaacggcaattgctgatttgatcgacaacagcatttctgctggtgcagatattatcgacattatttgtgatgtgtcaggtaagatgcctattgtctctattctcgacaacggaacagggatgacgaaagatggattgatggacgcgatgaaacatggaactggtaattccaggcagcatcgttcgccgtgggatctgggccgttttggccttggactgaagacggcatccttctctcaatgtcgctccttgacagtggtaagcacaaagagtggggttatctgtggtgccgaatggaacttggatcgaatcgatcaagaagacgactggattctgagtattcttgatgatgccgatatcttggcactgccttatgtcaatggccttggcaatcagggaacggcagtcatctggcaagaactagacaggttgatggaaaacgagactggggagcgtggacaggaaatcgtgaacgagaaacttgaggttgtggggcgacatctttccctcgtctttcatcggttcctttcgggggagattaaggaatatcccaagatctcgctcaccatcaatggtcattccatcgccgcatttgatccgttttgtagaaaaaatttagccacccaagtttttccagaggagatcgttcgcatcggcgatgctgaagtgcgcttgcagccctatgtgctgccacatcacagccgtctttccgcgtccgagtatgctttctaccaagatcgcaatgatttcatctcgaatcagggggggtacgtctatcgcaacggacgtctgatggcctggggagattggtttcgattagcaccgaaaggggaggccaccaaactggcccgcgtgcagatcgattttcccaacagtctggacgaagtttggaccatcgatatcaagaagtcacgcgcccgcccaccgcatatggttcgtgagcgcttgcgccagatcatcagccagataacgagccgtagcgtggcggtacatcgggggcgcgggcaaaaactgtttcatgaaattaaagctccactatgggagcgatatgtcgataaaaccgggatcaggtatgccctgaatgggtcgcatcctcttgtgaaggggatgcggaatcggctgaatggtgaaggtgtccagcacttaggtcttcttcttgaggcagtttccgcatctttaccaatcgagatgatttattctgattattctacctctcctcatgaggtgaagtccaacacctcaatgcaagacgtgtgggagaagctacatgaactgaagttcgctctttgggggagtgcgccggggaatgcggaagtattcaaggacattgtcatatcgactcgcctatttgtcacccatgacgaaattgtcgatcagtatatccagaaggaattttcatga

SEQ ID NO: 447086 - DNA, 2670 bp, Serratia marcescens
atgagcatgcagttggacaaagaaaaaattgtgctggccgctttggttggagcatttgatggtcaagaaaatcttccgtcacgtgaagatatcgtggccaaggctgcggcgctttccccgctcttgggatattccggtgatctaacgaatatcatcaccgaagcggaatctaccttacctcagcgcatgagtgccggcgtttctatcgtggatgttgatgccgcgcatgatgaagactggattcacaagcgtgaaatcggcacgacatatgcggatgcttatggcggctatcttaggggcgaaggctggaagccgaccgtcatcaatacgttgcttaatggtgatggggcgaagatcttgggcctgttacaagacccaaagagtgagggagcttggagccgtcgcggtcttgtcataggccatgtccagtctggtaagacagcaaactatatgggcgttattgcgaaagctgcagacgccggctataaattgatcatcgttattgcaggtatccacaacaatctgcgcaagcagacacagcagcgcatagatgaaggttttgttggccggtccagcgatcccgccaaccgtgtcagcatcggggtaggagtggatggtaaataccccaagccagtaactctgacaaccatcaactctgacttcaataagcaaactgcgagtgtgagcggagcgcagttgaatgacttcaggaacccggtgattctggttattaagaagaatgtcaaaacgctcgaagctttgcacatatggctgagggaactgaacgcgaaaggtcgtgaccgcattgccgatgtgccaatgctggtaatcgacgacgaggctgataacgcgtccatcaacaccaacaagcctgacatcaatccgaccgctaccaactcttggatcaggaagatattgcgcctgttcactaagaactgttatgtcggatatacagccactccattcgcaaacatatttatcgaccctgatgcctttgataaggatgcctatgaggagttgtttccgagtgatttcattcattcactcgatgcgccatcgacgtatttcggaccggacaaggtttttctgaacgagaccagcagtgatactattcttcggaaaatcaccgactgtgagaaatatcttccgcttgcgcacaagaatggttcgacggttgcagaattgcctgagagcctctacaaagcgcttgatcaattcatcgtggcccgcgccatccgtaatcttcgaggtcaggaacgtaagcattgctccatgctgatcaatgtgtcgcgtttcgtgtcgttccagaaagatgttcggagcttcatagatctacgtcttcaccgcatccgggatgcggtgaaggccaactacatgatgccggaagaaatatcggcgaagaatggatatatggcgcgactcaaggccattttcgatgctgaattctccgacaatgagttcgctgaaaggcactatacatggggtgacgtaaaagcctctctctggggggttttcgagcatctgcgaacctatgtggttaacagcaagagtgacgaggtgctggattttgagaaatacgagaaggacggtattggcctcaccgccattgccatcggtggtttaagcctgtcacgtggcctaaccattgcaggcctgacgatcagctatatgtaccgcaacacgcggatgtatgacacgttgatgcagatgggacgttggttcggatacagaccgggatatgaagatatttgtcgtgtttggctaccgtttgactctatcaattggtataagcacattgctttagcgtcggaggaactccgtcagcagatcacgcgaatgcgccaagccgatatgagcccgagggattttggtctctacgtcaaatcgcacccggacagtctgatggttacggccaccaacaagatgcggagcggtgaaagggtcgttctgaaccagaacttcacaggtctccttgtcgaaagttacgaccttacccttgatccaaaggtcagtgcagacaacgaggcactcatcgaagaatactggcggaatggatttggcgagaccgtgagtgaaaccgaaaagggttggttcatttctggtgtcgatgtcgagagaattgatgagttcctgttgcgtttcaaatcacacaaggatgcacgacagagaaagatatcggccgttgaatatcttcaagcaatctcagatagatatcccaaaggggatgtgcttctaatctctaagggggcgggcgatcttgacagatttcgcctcggtgcgcaggagcgtcaagcggaggatgcaactgcagaaaaatggcgagtatctggatatcgtgtcgccagccgtggcgacgaaaaactgggccttagcaaggatcaagtggctgctgcagaagtacttgctgctgaagattccaagagtaaatcaaagaagccatcagacatacactatcgggtagtgcgggacaaaccattactgatgctgcatgtccttgaaccgaccgataacgatgaatttgtgggccatcgtgtaccggcatggggggtgagctaccccgctggtctctattctattgagatcgaggtcgtcgccaacaaggtctggatggaacagtacggcgcgatggacgacgatcctgatgctgatgaggattacgacgatgagtag

SEQ ID NO: 447087 - DNA, 972 bp, Serratia marcescens
atgagtaggtctgttccgtgggacagtattccgactccggctgcggattttaccgtcgtgcgtgtagtcgaggcaggcgtaattcccatttactgggggcgcgatactgatgcacagtgtctgctgatattggaactgcaaggagatcacgctgcgcagtttcgtcggggtatggtcaccctgcatgggatcggagtcgatctgcgcaatggggataagggaggagagcagcggcttgtcctcacgctaggtcgtcatatcgacagcgacctattctttggcctttgtgaaacgctgataagcagtctgaataatgttgtcgattcagctgcggcactttccgtggctcttgcccatctgaaacgttggaaaacatttctggcaggtaagaacgctcgtctcctttctcctgaagaagttcggggtctattcggtgaactgtacgtcctacgaaagctctatcaggatacactcgctcaggccggtgccgtcgaggcttggtgcgggccggatggttctcatcaggatttcattttcggcgatcgcgccatcgaagtgaagtcgctctctgggcgagagcgcagcgcagtccgtatttcgtcggaagaccaacttgaatcgctttccgatgagctattcctgctgacgctacgcctaatagaaaggccagataccgagcaggcattatcgttgaacggtgctgtagcactgattacaggagagttgacggattctgaatcagtggagcagttcatgagtaagctggcggatgtgggttatgcaccactcatcgaatatgactccccttgttttgttgtgcgcgacgttcagggatatcatgtgcatagcggtttccctcgtttgctccgctctgaacttccgactgggattgtcaaggttgcttacgatatcaaacttgaaacgatcgcccggtatcagtgtgacgattcagccgtctttggaggtgattaa

SEQ ID NO: 447088 - DNA, 2073 bp, Serratia marcescens
atggaacagagtgccgatgaattcttccatgactttcgacaggaacttctgtcaggtgctgaagccaatggccggttccagcttgatgagttcatggaaactgttgctgatgaacttgtcgaaataggcatcactgaggggttcgagctgtgtcactatcgtcctccacagggcggcatacgggtggatggatactggttcaatgacgaagggaatctcgatctttttgttgctgatttcgatttccgtaccaaattgacttcactgacaaaggcagagcttgaggcgacattcaagcgtctgtctaggttctttgaggcaagtatcgaaagtaatcttgcggtagatcttgagatcacttcgcctgtgtatggtctcgccagacagatctccgatcgcaggagtggcatcagctcactcaacctgatccttttctccgagcgtatgctcagcgggacagtacagagtcttcaggatggggaggttgccggtgttcctaccagctatcatgtttgggacatctcgcgacttcaacgtcagcgcagttcacggggtcgtaaggaaccactcgatctcgactttgtgcagatgttcggcaagggtattgcgagtttgcctgcacatttgggtgcagactcatatcaatccttcctcatggtcatgcctgcagatgctctggcgaccctgtacgggaaattcggagcccgcttgcttgagcagaatgtccgaacattcttgcaggcacgtggcaatgtgaacaagggaattcgggcgactatcctgaacgagccaggaatgttttttgcctacaacaacggtatcactgccactgcgcagagtgttgagactgagctaatggatgtaggtctaacgatcacaaggattgtcgatctccagattgttaatggtggacagactaccgcatccctgttccatacgcggaagcggaacaaagctgatctttcccagatattcgttcagatgaagctatccgtcatcgacaaccagcaaagtgagatggttgtgcctaagatatcggagtatgcgaatacccagaatcgggtgaatgctgctgacttcttctcaaatcatccgttccatgtcaggatggaagaattttcacggcgaatctgggcgccagcgctgaagggagctcctcgcgatacacgctggttctacgagcgtgcacgcggtcagtatgcagatgcgcagtcaaaactgacgacagcggagcagcgtcgcttcaaggctgagcatccaaagccacagatgttcaccaagacggatttagcgaaattcgagaatgtctgggatgatcatcctaaatgggtcaatcttggttcccagaagaacttcgcgcgctatgctctacgaatcggcggtgagtgggaaaaatcgtctgacgccttcaacgagttctattttaaaagagccgttgcacgtgctcttctcttccgtgctacagagcgtattgtttccgcacaaccgtggtacaaaggtggataccgcgctaatatcgtggtctacactttggcgatgatcagtgaaattacaaaactgagaagggctagtgtcaactttctgggagtctggaatacgcagatggttaattctgttttgggggaggctattactctagtatcgagacaagtgaatgatgatataacccaaccaccacatgggatctctaatatttccgaatggtgcaaaaaggaagcatgctggatgaggattcaggctcgtactgaagtcattgccaatatcctttctaaagaattttacgatgaacttgtttcgagcgatgatcaaattgcagctgaacggtcggctaagaaaacgcaaaggatagacaacggtattgaggcacagcaaaaagtactggatgtctcatccagagaatgggggcatatttatcagctactgttcgaaaggcatttactcacgccgaaggaagagggggtgctcagggtggcaatgcagataccaaataagattccaacagagaggcagagtctaattctactggaggttcttgataaagggcgactggaaggcattgttgtaagtaaataa

SEQ ID NO: 447089 - DNA, 819 bp, Serratia marcescens
atggcaaagctcatccctcagccaatcatttccgttgtagctgagtacatctcaagcgttgaaactcacgcaaccttagacagtttatttgcatacgctgatgcaccaggcgaaccccctgttgcttctaaagccgccaaatcgcttgagtggttgagacgaatcaataaagaatgtgaagaacccctccccattctggggagactcttagagggatacatggaggccgaccaaccttcttcccctaatttcgactgggaaaaaactcaagtagagttcgttgagaaaatacatgacctcttagggaggtatgggcttagatatataactggcggtttcataaccgacggctcgtcaattacgacgcaatccctccaagaggcgataaagaaacgtaacatccctgctgtcgaaatggagttcactagagcacttgaaaacttacattccgaaccacgtgaagcagtttccgcagcctgcaacatattagaatccacgtttaaaatttatatagcagatgagaaaatccctccacctgcaaaacaagatttgcaaggtttatggaaagttgtccgtgactcgttaggcatggatacgaaatccgttgaagatgaagatttaaagcgcatattaagtggcttgtactctataactgatggtatcggcgcactaagaacacatgcaagctctgctcatggtgcaggcaggaagatctataatttaaaaccccggcatgctcggttagcaataaattccgctcatactctaaccatgttcattcttgagtcatgggatgatagaaaaaagattcaacaatga

SEQ ID NO: 447090 - DNA, 1074 bp, Serratia marcescens
atgacagtcagaagttataaggatttaaatctggtcagggctaacatcgaaactgaatgcaggcagttcattcaaaccagaacgtatgcaattcagtcaattggcccgatgccggggcaaaggtccggactcagagtgacattcgcgaaaacaggagagaacttcgctaccgttaacattttctataacggcgatggctcgtgtacagttcagtaccttacgggggctaatcagcctctgggcaaggagcttgctgatcacctttttgaaaccattaatcctgcagaatttgaacatgtaaatatggtcgtggaagggtttgtggaggacacaattttacctgtgcttgagttatcagcagaagaaacgcatattgagttcagggaacaccttcgtaacactcattccatcgtgtggaaaatcacctctactacctatcaggatgaattgacggttaccctgcacaccacaacaggcaagcttcagattcaaggacgcccgctatcctgttatcgggttttcacctttaatctggcagaactgcttaatttgcaaggtctggaaaaagtgttaatccgccaagatgatggcaaagcgaacattgttcaacaggaagtcgcccgcgctaacctggagtctataatgggtgatgcttatcctcacttgcacgccactgctgaaaaattgctcatttcaggtctgtgtgttaagcttgccgcccctaaattgccagactactgcatgttgctctacccggaacttcgctccgttgagggtgtcttaaagaataaaatgtacacatttggaatgtctgtacagcaacctttagggtttgggccttttttcgataaggttggtttaaattacactttgaaaccacaatacgcggcccctctcaggccagagcaggctaatatcatcaatgatgcctatactttctggaatggggaacgtcatgctgtgtttcacatggaaacggtggttgataccagccgcatgatttctgatatggcccgactaatgaccaaagccactaaagcgtggcaaataatcaaggatttgtatcttgtttga

SEQ ID NO: 447091 - DNA, 330 bp, Serratia marcescens
atggcgaccggctacgagaacccgttatcttcagtcaacgaaattgagacgaaactcactgacctgctgggccagaatgaaaatggtaaaatccttttcgacctcctatgcgctaacggtcttgagtggaaccgatttgttacgcttgaaatgaaatatggccgcatcatgctggattcggccaaaattattgatgagcaggaaataccagcacagatcctgagtaaactgacctttactttactgaatcaccctgagtacctggaagcgtccgtattgactcccgatgacgtgcgccaagtcctttcaatggatatgcaaggggcttga

SEQ ID NO: 447092 - DNA, 396 bp, Serratia marcescens
atgataaaatatttattccttcttcttcctttttttatctctgattgcccaatgggggacaggtttaacctctatcaagtaaaaagtaagatcgtaggtggtaaagtctgcgtcttttttaatgagagggatatcgtaaaaaacgaatccatactgagtatcgccatctggaagcaagggggcgatacctacgtatacgaaaaatcatatgcttacagcccgataacgttggaggccaacaagtgtgttccaggtatcggtgagtttaattttatcgctggtgaaggatacagcgtgttggtaagaacaccgctgaattcatatcggaccagttttgttgtgtggaatataaatggaagagttatggtaaaggcggggtggctggtaaaaatgtga

SEQ ID NO: 447093 - DNA, 1062 bp, Serratia marcescens
atgacaatagaaaaagagaaaatagaaaagaaattctcaaaatcacaaaactctcttgtgctccaacaagctgacttatctttatcttccatatctgatatggtgaataacaatgcaattgatatcagtccaaaataccaacgaagagagcgttgggatgacgacaaggaatctagtttaatagaatcatttttattaaacataccagttccacctatttacttagctgaagatgagtatggtgtttactctgtgattgatggaaaacaaagggttaccgcaataaacaaattcctaaacaacgaactaaaacttaaaaatctagagaaattcaacgagctagagggactaaccttcagtgagttacccccatcactatcaaatgctttaaaaataaggccttacctccgagttgttacattattaaatcaatctgacactgatttaaaacatgaggttttcttgagattgaacaaagcgggagttcccttaaactctcaagaaatacgaaacgtagcattccgaggtgatttcaataacgctttattcgagctatcagaaaacccatatttcaataaaatacttaaggcatcaaagaactcaacaacataccgtgaaatgatagacgtacagtatgttttaagatttttcaccataagaaattattggaattccttcccggggaatatggatatagcaatggataactttatgcttgctaattcaaaaatgaataaacaagatgtcagtgctagtaaaaagttatttaatgatgcgctagttttctgcgaaacagtttggggtgacaatgcttacctaagaccaaatggaagcaaaaggataatacaaggcttctatgatatacaaatggtttgttcgtcattattaaccgaacaagaaagaatgcatgcgctaggaaacgcaaacgcagttagggatgcattaataaatgaactcgataataatagggaatttacagaggctatatctcaattcacatcgaatcctaaaaatctaagttacaggatcagtcattttgtaaatatattaaaaggtatttaa

SEQ ID NO: 447094 - DNA, 918 bp, Serratia marcescens
atgaccgctaaaacagatttactctctcgcatagagtatatagagagcgcgattaacctcccacccttaattgataatggaataggcaacagtagtcacaacagcatcgcaaatcttttaaggaaaggcttaggaattgtttcgtttaatattttagaggactttattaaaaaacgcactgtggaagcttttcaacatatatcaacatcaagagtaagatttgaaaacctccctgagcaattacaatcagcagcaactcaaggtgtattaaaagcacttataaatagaagtgctttagagaaaaaaaacaatggtgattggttaggattgatacaaaaagagtctaatattatatactcaacaagccaagggacatattccatatcggaactatctttacttaatgacagctcaaacatcgctcctgacgatatcaataccgtaatgaaatgttttggaattactggagggtgggccacattaaaaagaatttctgattcctttggcggagggatattagacttatgtgaagtgtataaaaacacttcaaatcgcagacattcttctgcacatgaagctaattttcaatatcaatattcttggctgcagaacattaccaatgaaataaaatcaattgctgcatcattcgatattgctttgtcagcaagatgtcgacaaatatcaaagcagccatcaaaaaaagttaatgagcatcaacttgatgaagttttaaactaccgatttctacacaaagaaaatggatgctacaaagagaaaaaaagttttacagggcgttccacaaagaactgggacgatttagaggcagcagttgatagtttatccccaaatcttgaaaacaaagccgagtttctagtagtaataaacgaaaaccgaagaatagagaactggtatacttaa

SEQ ID NO: 447095 - DNA, 387 bp, Serratia marcescens
  misc_feature (274)..(283): n is a, c, g, or t
atgagtcacgaaacaaactgcaccaactacaacagcaccgccgcctactactcttcaggcctcgacctgctgcgtttcggcactgaagacgaaatcattgatgcgttagtatctggcgagatcaataaggatcgcgtctaccggttccgctgtgatgaggcaacacaggaacgaatcgaggtcactggccgggcgctgaaagctgcaaaccgtttggcccgccaactgaagaaagcacgcgaagcccaaaacaacgatttggcttcggtactgnnnnnnnnnnggcaaccatccacccgggcgacgccaacgacctatctgattacgttcttgatgagttgcataaccaaattacgtttgcccacatcgcgtatggcgtggatatga

SEQ ID NO: 447096 - DNA, 453 bp, Serratia marcescens
  misc_feature (436)..(445): n is a, c, g, or t
atggttgaagtgaagagtccggggcagggtctgcagcctctttatctggagcaattggtcggtaagaaagccaatcgtgaccacgaaaaaggcgggtatttctatgagtcggatctaaatgatgtggcgatagaagccaaggactatgatttcaatcgtccgttcggcattccagtgcgctaccacgattatggcaagttgaagaataaatccaatctggacttcgtcgagttccatctgagctatcaggatatggaactcgatttgacagaattcttctccggcgctgaaaatatcggttttgcggtacatagccccgagctgtttgccaacgatcatattttggatctggcgacggatgatcccgtttatcttgctcattcgatcaaacagctgcagcgtgtctgcgatgtgactcgcgcgttgaagcaatatnnnnnnnnnnaaaactga

SEQ ID NO: 447097 - DNA, 1053 bp, Serratia marcescens
atgaatgcaaagcgacaggcattggtgatcggcgccaatggcgtgattgggcgccgattgattgaggagctgaccggccagggctggcaagtggtgggcgtctcgcgccggggtgggcaaccggcgccgggggtgcgccacctgcaggttgatctgctggatgcggcggcgacgcgcgacgcgctgcggccgctgagcgcgattagccacgttttctatgccgcctatcaggatgcgccggactgggcggggctggtggcgccgaacctgcagatgttgcaacacgttgtcgaggggttggagccgaccgcaccggcgttggagcacatcagtctgatgcagggctataaggtgtatggcgcgcatttggggccttttaaaacgccggcgcgcgaaagcgacgccgggcatatgccgccggagtttaacgtggcgcagcaacagtatctggcgcagcggcaggccggcaagcgctggcgctggagcgccattcgcccgagcgtggtggggggcttctccctcggcaatccgatgaatctggcgttaagcatcgcggtttacgcgtcgatcagcaaagtgctcgggttgccgctgcgcttccccggtaaaccgggcgcttaccacagcctgctggaaatgaccgacgccgggctgttggcgcgcgccacgctgtgggcggcgaccgagccggcggcggccaatcaggcgtttaatatcaacaacggcgatctgtttcgttggagcgagatgtggccgaaaatcgccgcttactttgggctggaatgtgcgccgccgctgccgatgccgctggagagcatgatggcggacaaagcgccgctgtggcgcgagctggtgcagcggcaccaattggccgaaccggactatcgcgcggtggccggctggcgcttcgccgatttcgtcttttcctgggactatgacatgttcgcggacggcagcaaggcgcggcgcttcggtttccatcagttcgtcgaaaccgaagccatgtttttctcgctgttcgatgagttccgccgtcgcggcatcatcccctga

SEQ ID NO: 447098 - DNA, 876 bp, Serratia marcescens
atgcgaaaagttggaagcactacggatactgcagatgcaaacggcgaatacacaaatggtaatgttgctcaaggtattccccctacaattattaatgctgaaatgcttaatacatttcagagggagctggttaatgttgtcgaaggggctggaatttcgttggacccatcgaatgattctcaggtgctagaagcagtgaggaagttgctttccactggccgattattgaatgtgaaaactttcaccacttctggaacgtatacgccaacacctggaactaaatcgatcattgttgagggggttggtggtggtggtggcgcaggaggggctccgtttactagttccggctactatactggaacaggtggtggtggggctggggggtatttcaaaacgcgaatcaccaatattcctgccacagtactcgtaactgtaggaaaaggggggagtggtggcgcagggggagaaatcggaaacaactcaaatggaggtgatggcgagcttacgagtttcggttcctatgcacaagcatcaggcggaaaaggttcgacaactaccaacacaccagaaaacactggtttatcatatcgatttggatctggctttggcggttttgctacaaatgggaacattattaatagtaacgggagtgcgggaactgcatcattaattctaacagtaggtagcggccttagcggtgctgggggggctagtttctttagtgctggtggggcacaaactccttttaattcgcccggttctgatggtaaagcaggtgctggtggaggtggtgtggtcagcatgagtaattcttcagtggtttgcaaaggagggagcggaggtgacggcctagtcattgtctatgaatacgcctaa

SEQ ID NO: 447099 - DNA, 1197 bp, Serratia marcescens
ttgcccgccattgctgcgcactgcaccgccggtattttccagcaaaccaagaatgcgcagcgccacgcgttgctggccgtctatcgtcccgccggcattgttcagcgtttgtgcgtcaagttgaagcgcctcgccactttgcactttcccatcgcggttattcagcgcatcgctcagcgcaaggcgttgttgtttctggctgtagagcagcccgccctgcgcattgtcgagtgcgcgggcggcgatagtcagcccctcgccggccagccactgaccgccagcgttattgatgccgccggcgtgttcgccgtctttggtacccgtaacagcaagctgcccctgcgccgaaaccttgccgttgcgattatcgatatcctgcttgatgcgcagcgccaagtcgtgtgccgactgcagtacacctttagcgttgcccagccagttcgccgcaagttgtgctccctgcaagctctgcacactgccttccgtattgtcaaaaccgccgctgatcgcctgccagccgccctgactgcccatccagccacgggcgttgaaaatgtcctgcgcctgcagtacctgagacgattgactaaaaatccgcccctggccgttatccagcttgccggtgaactgcatgttcaggctgccaagtgcgttgatggtgccctgggcattgagcagactggcagcgcgcacctcggtgcgcccattgccggtaaacgtgccgccctggttgtcccagccgccggtcaggttcagggaaagcgcctgcccaccgagcaccacaccggcggtgcggttggtcaactcgcccccctgaagagacaggtcgccgccgctctgcagggagccgccgtcattatcgaacaggctggctgctccgccgttaacggcaagggcctgctgcgcggtcagtttgccggaacggttgaggatattgcctgcggcgtcaagcgtcaggcctccgccggactgcagccgcccgccggtattgtcgagcgactgcgcgttggcggtgacctgccggccaccttgtgcggtgccgccctgattgtcccaatcgccatcagtgttgacggcgagtgcgctgccgccttcaagccagccggcggcgttgctcaacccttgcttcgccgtcaggttcgcatcctgcctggcgaccaccttgccctgagcgttatcgagacgctgcgccgttag

SEQ ID NO: 447100 - DNA, 1116 bp, Serratia marcescens
atgttcgctgaatttataggtgatcgtctacgcttagctcgcctcttgaaaggttatacacttcaagaggttggtgatgcagcttgtgtgactcgccaaaatatccatcagcttgaaagtggtgcaagaaaccctagtgacgatgttgcaaaagcactggcagaattcttaggggttaaagaagattttttctttaaacccttagaaacagaagtaaagtctgaacaatgccattttagaaaaagaaagaccacaccagtcaatgtagctaatcgcgttttagcgtttggtactatatttgaacagcttgtatctaatttacatgaacagcttgaattgccagagcctgactttgatatcttggaaaagtataacattagtgcaaaagcatttgacgcttcaatcattgagaaagctgctgaaaaagccaggttacactgggggcttgggttaaactccccgatagatagtatgacaagggtactagaatcagctggggctatagttgtttttattgatgatccgtcagataaagttgacgcattgtcaatgaatagaaaatacccagttgtcataaggaacacagctaaagacaatacttgccgtatgagattcgatcttgcccatgagtgcggacatttaattttgcatcaaggtattgagactggtgattcgaaaacagagaaggaagctgatatgtttgcaagtgcatttctgtttccaagaattgcatttgtgaaggagtttcaaaaatgcatggtaggctctaaacctataattagaaaaataattgagcttacattagcatggaaagtaagcgctaaaatgattatttaccgggcccgctctctaaatttaattactgctgtagactatagatcattaaacattttcttaaacaataaaggttatacaaagaaagagccttacaatgacttaatcaacgatagtgatcctgagttattgcgtgatgcattagaagttatgcatcgtgaattgggaataacagttgaaatgcttgctgataaattagggcttactatggataccttcaggattttcgcaccatacaacataagtgatgaaaaaaacaacatcatacctctaaggttctaa

SEQ ID NO: 447101 - DNA, 249 bp, Serratia marcescens
atggttccccaacgactgaaaagcgcccgcctccgggctggttatacgcaggaaaaactgggtgtcctggcgggtattgatgaagccaccgcccgttcgcggatctcccagtacgagagtggtacctacaccccttcctttacgacgatgtgcgcgctggcacgtgtactcaacgtgccggaatgttatttctatgtactggacgagggatttgcggagaaagttttattgcttcacgttcaaagctga

SEQ ID NO: 447102 - DNA, 192 bp, Serratia marcescens
atggcaaaattcaagtgcggcaggaaaatcgatacagaatatatagtggtaattctgctcctgcagataattcaggctgactatttttacattgacgtttttacaatcagacagagcggaattaatcgctttagctgcaccagagtcgtgagtaaagagaacgtcaatctgataaatccccgtgtcatttag

SEQ ID NO: 447103 - DNA, 879 bp, Serratia marcescens
gtgaagtttgagtttggtgatttatataagttcatcgtatcacttggtgttgtcttgctgatgtctgcagtaataataccatggcttttcctgagggagccgttcgatattttaaagtcagtggttggggttgaggcgttgactggtgtggcacaggaaataattaagactcgagagaatgttgttctttttgtgctgaggtatttgttggtttattccgtagtgagctttattcttggcttttgcgtcattggttacggattgtataagtggcggcaaaatcaactaataatagatgagcgaacaaaaatagaacttgaggaaaagaaaagagcaaaccgagatgctacagatgacgaagtagaaaccaaaattcttttagatgctgcgcgccaagattctgcggctgccaaggaggaagtgagtaatattactcgcaattattatgaagtggaaaacattgcttttaataaattcaatgaatattactctggcgggtatactgtaagaagaaatagagttatagccgacatcggaattgacatccttctggaaggtaattcactgttcatcaaggattttattgttgaagtgaaatatataaggaaagggtttaattttggatggttacgccagtgtttttcaaaaaatctatatgcaaagactatctacatgcaatttgagaacaaaataccaaatacactgctcttggttgtcgttgatgataatgcctatgagagaaataaagaaaaatacaataatatgagcagtgagattaaaggtgaaggtaggaaagggaaggatcatgtagtaatagtgaaggaaaaagaattcattgaggctaacagtgaaagattcaaagaaatcgtcggaatttag

SEQ ID NO: 447104 - DNA, 630 bp, Serratia marcescens
gtgattaaactaatcaaagcgcggctaattcaggctgaccttaaagaaattgaccgagagtttgaagaaaaaggttttgggaacctgtttacgatggtgttatttaagcaagctctaatctctgttgccaaccttgtcgattttgaacttacaataagattgatgtaccgagagcaccctgagctctcgcaacactaccgtaacactttgaacgaatttgagtttgccaagtatctacgcaataaatttgttggccatataaaacccgaactcatagagaaagcaatagagtggcgtccggagatacgtttttttctaaataacacatccgataataaaataatgaatttatataacgagtggattctcgaaacagctataaacagttacgttgatacagacggaaaacataaaatatttgatggcgaaacagctcttgattatccacctgacagaacgcgctttcttatttacatgacgaaaattatcaaaaatggcatttcatttcttgaagaattgatatcagcaatggatgttgactatgagaggtttagtagtccagatttacaggagcagctcaggctcgcccgtattgctggggagatagacttcgaatttatcaaaaaataa

SEQ ID NO: 447105 - DNA, 789 bp, Serratia marcescens
atgaaactaggaataaaaaaagagttacctgttctggcgattgttaccgcagtcggttatttgtcagcgtatatgtttcaatctggagttttaaattactttggggtgccatttgaatttatatcggttgatattaattcaattcttttttccataattataatatcatttttcattgttttcgttcttgttccgttttatattctagctaaaattcttgagctcgaaggaaataataaattcgcaaaatgtatccctgttattttgatggagttgcttcttgttggtattatttctttcgtttctactaagtacatagtcgaagttaaagaacctacggctggtttttggtctgtttttttaattacgtatctgtttttccttgttgttgttattcttcttaatgccttggttttgtttgtggaaacaatagggcggcgcatacctgaaatatataaatacgtggctttaatggcgtattctcctgcgacgatggtggttccatttctttgcggtatgatttatgcaaattttcattccgccgtttcattttataaagatactgactattttttggttttggataatccaaaaggtattgtcgtcgctaaatgtaatgacaaaaaaggaatctcttataaaagattgaattcaaatgatgttgagttcgaggtaaattacaatcgaattgtaaataaaagtgttgccagctgtataaaaaaatggggtgttggtggtaagaacatgaattctctcaatgattatttatacgataatagtaacctctga

SEQ ID NO: 447106 - DNA, 1221 bp, Serratia marcescens
atgaatcgttcaaaaaaacagttgaaactcttggactcacttaggttacatgaaaaaaacaatcataagttctctataaaagatcttgttaactctaccggctacaatgaaaatagcatcagaaaatatattaatgaaaagttaaacggcgtttacttacacccaatcaatgaaaaagaatggcgatgtgatgggctattaaaattatcaaatgatgattttataagaatgatgtctcaatctttgaaagcaaaaaccgtcacacctgagttgaagatatataaaggactattaaagcgcagtttagatgctttcatcctttcacttgaagtatataacaggccaagcttagataaccgtgttgaagcattttgcattctttcaatcaatgcgtgggaattattgcttaaggctgaattaattaaagcgctaagtttggatactgtattcaagtctagtggccattcgattagtataagtgatgcactaaataaaagattacaacagaatgatcccgtcaggaagaatctagaaacactagttgaattacgagatagcgcgatacacttacttatccctgaattacagcccgagttgtcaagactcttccaagcaaatgtactgaactatcaacagcgatatttaaatgaaacaggttcatcaccgttatcaggccaaagcattggaatgctcagcttagttattgatggtccacagagtgatatctctattattaaagaaaactatgggagtatgacagcagcagtagctgaagagtttctgggaagattcaataaaaatgcaagtgaatatgattctgtagaattcacaataccagtggactataagttaacgctaacaaaaaatactaaagagagtgatttgtcattaggcataggtgagacaggccataatgccattattattagagaggtcagagatcccgatatcacccatccttattatgaagggacagccattgaaagaataaacaatcagcaaagtgagttctcgatcactcgatattcattcagagctgtaattagtaaacacaaaattcaaaacaacaagaagtcccctatgcattttgaaattgacaagagacatagatactctgaaaagttcgtaatatggtttgtagatagtttaaaacagccagaatggttagatgatgcaatcagttatttgaaaaataagaaagtgaaaaagatagctagttaa

SEQ ID NO: 447107 - DNA, 333 bp, Serratia marcescens
atggctaaagagttccaagaagccatggcacgcgacgatgctctaggtctcaatccggatgagatcgcgttctacgatgcattagcagaaaacgaaagtgctgtgcgtgaactaggtgacgacacgctcaaaaaactggcaattgaagttaccttgaaactgcgacagtccactacggtagactggcaagtacgagaaagtgtgcgtgccagactgcgtattttggtaagacaaacactgcgtaaatataaatatcctccggataaaaccgcaggcgccgttgagcttattttgaaacaagccgaggttgtttcgtataattggaccagctaa

SEQ ID NO: 447108 - DNA, 1491 bp, Serratia marcescens
atgctcaatgcccgtgaatcaggcggaattatttttaccaccgtacaaaaatttgccccgctggacggcgaaaaaactcacccagcgctcaatctacgcagcaatatcgtcgtcatttccgatgaggcgcaccgcagtcaatatggccttaatgccacgttggatcgcgaaacaggcgcttataagtacggttacgcccaacatatgcgcgatgcattacccaatgcatcgtttatgggctttaccggaacacctgtatcttcagaagataaagatactcgcgcggtatttggtgattacgtctctatctacgatattcaggatgcggtggaagatggcgcaaccgtgcctatctactatgaatcacgtctggcaaaactcgaccttaaccacgaagagctggaaacgctctctgagcaagttgatgagctggtcgaagacgaagagaccgatcagaaagagaaaactaaaggcgacgggagccgcctagaaaaacttgtaggttctgaaccgcgtatcaatcaggtggctgccgatctggttcagcattttgaggcccgtaatgccacaatgaatggcaaagcgatgattgttgccatgagccgtgaaatctgcgtgaaactgtataattcattggtcaccttacgtcctgaatggcacagcgatgatgttgagaagggtgaaatcaaaatcatcatgaccggctcagcctccgataataaattcctgcagccgcacatctacaataagcagaccaaaaaacgccttgaagcgcgctttaaagatctcaacgatccgctaaaactggtgattgtgcgcgatatgtggcttaccgggtttgatgccccctgctgccataccatgtatatcgacaagccaatgcgcggacataacctaatgcaggccattgcacgcgttaaccgagtctttaaagacaaacctggcgggttggtggtcgattacatcgggattgctaacgagctgaagcaagctttgaaaacctataccgattcaaaaggtaaggggcagaccactatcgatgctcatgaagctttcgctattctgcttgaaaagctggatgtgattcacggcatgtttgccaaaacaccaaccgctgccgggtttgattacactggttttgaagaagtaccccaacggtttttactcaaagctgcagattacgtgctgggcctcgatgatggtaaaaaacgcttttttgatgtcgtactggcaatgaacaaagcctggtcactgtgcagtacgctggatgaagccaaaccattgcaaaaagaggtagcgtttctgtcagcggtgaaagtagcgattatcaagctgacgacaaccgacaagaaattcagccagtcagagaaaaacacgctgctcggtaaaatccttgataacgctattattgcgacaggggtggatgatgtgtttgcactggcgggggtgggaaaacccaatatcagaagagtttctagaagaagtgcgtga

SEQ ID NO: 447109 - DNA, 555 bp, Serratia marcescens
atgcagttgcggagccctttgtggggtacgtattggctatgtgccctaaagaaagtaaactatcgtgtagtaattattattataacaagtatgaaggtcgagatgaaaaataaaatttacttttccactctgctagtaattgccttttctcttttgacctatattgggtggagggttactgggggcagtgaggagggggattttgagtgtcaggcaaagttacacgtcgatatgggggcagatacatgtaaggggagcagtgtctttgaattatttttgtctatgcatgataatggtaaaggttatttgttagttacagggagttattcatgccctaatagtcaaaaacagtttgtcgacagggccgtagattttacttataaaaaggaagggagttattatacacttcattttggagcgaaggaccacgagcttactaacatatccagcatatttaaatatgataacatcaggatcaaaatgacgaaactggacccgatggagtatctttttgatgtgccgttacgctcaccttttgtatgcaaaaaagagtag

SEQ ID NO: 447110 - DNA, 126 bp, Serratia marcescens; identical to SEQ ID NO: 438598

SEQ ID NO: 447111 - DNA, 597 bp, Serratia marcescens
atgaggccaagattacttatagcgtttgcgatatttcttggttcttatctaccgcttagtacgattttgcttgttcaggattttgataagaaaaaggcaatgggtgaggtatgtctaaatgtctttttaaacgaaaattgtcattttcctctgcaaaaaccatggctttcaatcggttttctcgttctttgtttgatatgttttttattctcgtggattgcattgaagttaacaaatgaaggagggacagatatatatataaaaacagtaaaacacacaccctcggatctgatgaattatgttttaccttatatagtatcttttatgagtatagattatatgcaggatgctaaatttatagggtttttgatatttttactatggttattttggttgtcatataaatctggacagattattcttaatccaatgcttgtggttctgaactggcgaatgtatgaaattacctattattaccctgggaatgtagatgatgaattcacaggtgtagttttatctaacaaaactcttgagcctaatagtacgacaaagactcaaaatattcagtctgtgattgtaataaataaagagggataa

SEQ ID NO: 447112 - DNA, 912 bp, Serratia marcescens
atgcagataaaagttctcggctcggcagcgggcggcggctttccccagtggaattgcaactgcgacaactgccggggcgttcgcagccacagcatcaacgccacgcgccgcacgcagtcttccatcgccgtcagcgacgacggtaaaaactgggtgctgtgcaacgtttcaccggacatttgccatcagctgctggcctcgcccgaattgaacaatcccgacgtgctgcgcggcaccggcatcggcgcgatcgtgctgaccgacagccagatcgatcacagcgcgggcttgctcaatctgcgtgagggctgcccgcaccacgtctggtgcacccctgaagtgcatgacgatctcagcaccggtttcccggtgtttcccatgctctcccactggaacggcggggtgattcaccacccggtaacgcccggcgaaccttttcacacggcggtctgcccgaacgtacgctttaccgccattccattgctcagcaacgcgccgccctattcgccgtaccgcgatcgcccgctgccgggccacaatgtggcgctgttcatcgaagatatcgcgcgcggagccggtctgctgtacgcgccgggcctgggtgagccggacgaggccttgatgccctggctgcgccgcgccgactgcctgctgatcgacggcacgctgtggcgcgacaatgagctggccaacgccggcgtggggcgcaacaccggcaaggacatggggcacctggcgctggcggaagagcacgggctggcggccctgctcagcgccttgcccgccaaacgcaaaatcctgatccacattaacaataccaacccgatcctcaatgaagactcggcagagcggcaaagtctgaccgccgccggcatcgaagtgagctgggacggcatgaacatcgaactgtag

SEQ ID NO: 447113 - DNA, 531 bp, Serratia marcescens
atggaatgggtcggaaaaggttttcatcatttttccattttcagcacatacagtgcctttagcgacgtatctctgcccagtcccttcaggaaacttatcaaacgcatttacaactgcactttcttcggtataaacagaaacaccgtaacaacatttaagattcaacccgctgaattttttcagtctattaggtttctctttatacatactcaaaaagcacccctgctgcggagggttactcttcacgatacgaaagaactcgccttcagcatcctttgcttctttgggtggaacgttttcagggaaataattcgggtactcatcattagcctgattaactttttcttgtttttggtctgtcatattctttgctctttaaactattcaaactgccaagttcaacgtgagctaaaattaccgtccgttggcatcgcaactgaatatagcagacacttaattgtcaagacatactgtaaattaaaacagaagacactgaaaagttaccattcctgcttacataacagtatgtag

SEQ ID NO: 447114 - DNA, 1296 bp, Serratia marcescens
atgagtaacttattcttgtccgacacacaatttggctctttgtttttcaaaaacatatatgagtttttcgaagagcctaggtttttttcagtatccaatgaagttggagggctttttgttgtctattggataggtgatgatgatgactatgataaatggtttataatcccaatatccaaaggcagactggagcatctagagcggaagagaatagacattcatgctgtgctgtcttatcaagaacagcgctcttattaccaggttaatattccgtatgatgactctgaagagccggagtatatggcaagagagtctcaagatattgcggcaacaataaagcttccaaaacctggactattcattagtggggtaacaccagtccttgatactggtaagttgggcgcggaagtgcagttttcgacccatgagattcatatcgaaaggagcgctaaaaatagccaagtgcctttgatgctgaatggtgtttctaaagttttcgagaaatttaatgatttatataattcgatattagaagctgtcggtgaaaaggatgcgatgacccctatatcaggaaggcctgggtcgttcgcactttcatttcaggctgaaaagcttgagcatttcgaaccgcttttgaaaggtcttaatgaccttattctgtacaaaagggatatcattccctacattaaaaaaaataatatagacgtgcagatgattgaagccctgtttcaaagtgtaattgaaacaagtacaacaatggagctgaaaagcaatagtactggtgagttgattttctctctcagcaagcctaatgcattaatctacatcaatggattggctaagcttgcaagcgagtttgtcggcggctatcaagtcccacaagccaatattattgagcaggtatttaaaattgtagagctaaaacataaagataaatacctgaacttggaatctacgggactagatgaacgccatattttctattacattcatgctgcaaaaatacttggcttcttgaatgctaatggctccattgccgctttaggacaacagctcgcagagtcttctgtagagtcgaaacttaaaatagcggcaagaagttttgaagcgagccactgtggctgggcttggattatgtggagcaatgcgaaaaacctcaaaggggtcaaagctgagacagcagaagagttcctaatggaaaaatgcttatcccttagtaccaccaccattaagcgtcgtgcatcgaccttacggcagtggtgtgatgcttttcaaccagtttaccaagagttttaa

SEQ ID NO: 447115 - DNA, 330 bp, Serratia marcescens
atggaggctggaaagcttcataaccgaatcaagttgttccgacccgtaataatccgtgacgacaaaactggtgcgccggtgaaatccttcgaatttgttgtagaggtctgggcggatgcggagccgatctccaaccgaaaaattcgcacgggtgaacaggggcaggtggtggaaaccatgctgtttacattgcggccacgggacgaaattaccgttgactggcaggtggtctttcaacagcgaacctttaccgttcgtgcgcctgaccgttcgcagcgagaccggctgttaattacggcggaggctgccattcgtcatgatcgagtatga

SEQ ID NO: 447116 - DNA, 156 bp, Serratia marcescens
atgactttagaaaaacgaattgaaattatggaaagggaaatatctgacctgaaaaaagcggtccaaacgttcaagaccgccgaaatttttctaaatcttggtgtggtcaaagatgcgaaaattagtggtgagatgagttcttcggataaaccttaa

SEQ ID NO: 447117 - DNA, 714 bp, Serratia marcescens
atggcagaaaaacatgatgaatgggttcatgttgttgatgtcggctggaagggtagtattcaagataatttggtaaaagcgacccagcgcaatatgtctggttactatttcggtatattggatggggctgaaacccataagaacaatattaaagaggggctgctgtttgatcatcagtgggggcagcgccttggtgatgatatgtttaacgagttccgtgccggttttgaagtttttatgggggcctcgcatggcagcctaaagagatatggtgttgacatcgataattttgttttcgaccataacgactcagagctcgctttcttctatgagcaaatagcgccattccaagagcgtgcattgcatcaattcaatggtttttcaaaaatagagcgtgtttattcgctatctgatcatgagatcagcaaagcggttaaaaagttttactttcgtggcgtgatgttgccgagtcgggttgaacgtgaaaaattttcgttgatcaaacactatgagaattttggcgtattcaactttagctcctttgggcagagtaaacgttcccccctgtcttattttaagcgcttggtgagaaatcctcgacacaccattggttctgcttggtggaaacctctggatttccatgcaaatggcgtatggtatttgaaatatccttattttttggtgaaaaaaataaagtttaaaggggctaaataa

SEQ ID NO: 447118 - DNA, 1770 bp, Serratia marcescens
atggataagataactaattcacttttagagtctttcagtgatcagtatgaattaaaaaaactcgatgcaagtgtaagatttgaacacttctgtaatttctctataatttcaaaactaaatagaagcacatttgatcttgatgaggttcacacaggggaaggcaatgactgtggaattgacggattaattatttcagtcaatggaaaaataattgactcagtggatagctttgcggagtttttgcctaactgtagtttcctggatattgacttgacttttatacaggcaaaaacatcatcctcatttgaaggtgcgcaaatttttaattttgttaatggtgtcaaagattttctctctgacactcccaaattagttcaaaaccaaaaaataagagagtgtaaagagctttgggaagaggttctgaaatactcttcaatgatgcacaatagaagaccaatatgtcgactttactatgtaacaactggcacctggatcaatgacgctaatttgacaggggtgattggaaattgcaaagatgatttaattagactggcaatatttgatgatgttatattccatccccttggcgctcaagaaattcaaaaactgtacattgagacaaaaaacaaactatccacaacaataaatttccaaaatagaataacactcccggatataaaagggataaaagaagcctatcttggtgtagttccattccaagaatatatgaaattaattcaagatgaaaataaaaccatttacaatatattctatgataatgttcgggatttccaaggggagaacagagttaacgcgaacataaaaagtacactcgaaaatcaaaagttcgatctgtttagcgtgttaaataatggagtcactatagtcgcatcatcattaactccagcaggaaataggttcagtttacgtgattatcaggttgttaatggctgtcaaactagccatgtactccattcttgccaagctcttgctggaatagaaagtgttctcgtgccaataaaagtaatcgtaactgatagtgacgatataaaaacggacatcactttagccaccaacagccaaacagaagtaaaacctgaacaacttgagtctttaagtacattccaaaaacagctagagctatattacacaaccgagaaagcattgccattatattatgaaagaagatctcaacaatataactcattggatgtaagaaaaacacaaatcgtatctattccaagtcaaattaaatgctacgcctcaatgttccttgactctcctcacttagttaacggttactatgggacgatatttaatagatttaaaaacaacatgttcaacttggatcacaagttgatcgcctattatgtaagtgccctttgcttgtataaaatagaacagctatgccgtactgcagatctaaacaaagattataaaaaattaaaatatcatttactcatgataataaaaatcatcgtaatggggcctgaaaaacacccagcaaacagcaataagttagaaaaagcatgtgaacaattgaaaaaaatattgatagatgaacgtgcaagtttcttgctaataggtaaagcattcactatagcgatgagttcaggtattgaccctaccagagaaaggtataaaaccgaaagcgaaaccgagataatgataaatgccgcacaaagcgcatttgctcaaaatggttacttgaccaaagagaaattagataatgaattcaatgcgttacttggctcgacaccaaagttttaa

SEQ ID NO: 447119 - DNA, 930 bp, Serratia marcescens
atgaagaaattcaaacttggcttagttaaagtgctctggggtgtttacgcactctaccattttctcaaggatttcgttccgtttctaaacgaatcgatttcactttttgagaaactgttgagttactttaacatagccctcaactaccttttcctaaggcggttttttttaatggtaaagtgggaaagcaaatttgaaataaaaaaagatcggtgggtatatgttccaactgatgaagtacggttgtatggcgagaaattacataactatctgagaaaacgatgggttccccctttatatttttatcatttaagagacggtggacatgtcgcttgcgcaaaaaaacatttggcaaatgaatatttcgctcttattgatataaaaaacttctttgaatcaactgggcaaagtagagtaactcgtgaaataaaaaattattttaaatacaatgacgcgcgagaaatagcaaaactatcaactgtaaggaacccactacctgtggggccaaagtacatcataccctacggtttcccacaatcaccaattttatctactctctgtttgcacaaatcttattgtggaggattgtttaagaaaatagactccagtttcggtattgatatttccatttatatggacgatataattatatctggaaatgatcttgaattgtgtaacttgaattacaagttactctgtgatgggttgataagatcgggttatgaagtgaatgaaaataaatcacaggccccatcaaagtcaattagagcatttaacttagaactaaaaaaagactccttaagggttctatctagtcgcgtcattgagttcttagtggcttacatcaaaagtgacaatcctcatgtccgcaaaggaattgcttcttatgttggtagcatcaatgctgagcaggctaaactttttagatga

SEQ ID NO: 447120 - DNA, 531 bp, Serratia marcescens
gtgaaaggtaagataggcgaacaattgtttagtctttcagccattgcaataggagttggtgtcgcaggtttcttatctgcactagtaacaatgtttattaacacctcagagatgatttcaataaagtggataatcttcctgatatggattttcttatcaacttccgtaattttattgaaatatatcaatgatttatccaaggaaaatgagcaagcctcaccaatctattatgcgaagccattcaaaatagaaatagacggaaaaatactgctagtaaaaacaaataatttattcataaatcagtcagttgttggttgttatctgattgacaatgaaattgaatcattaatgtacatagcccaagtttatcatattcaagaaaagttcatgcaagtaaaaattatccatgatgtcagcacgaaagaacagaaaaaaagtctatctagccgtgggcatgacagtttgataatacgccctaatatttcactggaaatattcctaaaattgggggtcaatcctaatgagcagtaa

SEQ ID NO: 447121 - DNA, 1143 bp, Serratia marcescens
atgaataaattgattgtagcatcagctggtgcggggaaaactacttttgttgtgagtgatgcgctcaagaaatccgatgagggagctatcgttttaattacgacatttactgaggcatgcaaggatgaaatattcaaaaaaataataactgaacgaaagtgtatcccggctaacattcatgtttacacgtggttttcgttgctaattcaacacggcgtcaggccttatcaaggtaaattatttcagtttgatgttaaaggcatgattctttgtaatggccggtcagggcttagatataagaataaggctggtattccagtttattggggggaggagggtcactttaaaaaccactattttgacggtgagaatagggtttactctgataaattggctaagttggtaattagatgtaatgaaagttctggtgggctggtgttttctcggttggctaggtgctttacggatgtgtatgtagatgaagttcaagatttggcttgttatgatttagaaattttgagtgagatgttttcttctggggcaaatattactcttgtgggcgaccctaggcaggctacatactcaacaactagtggtaggaaaaatgaaagatataaaaaggctaacattgtaaactttttcttagataaggatatgggggttgaagttgacaataaaactctcgttgaaaatcacaggtgtcataaggagatttgtgagttttctaatgcagtgtatccacaagataaatttcctgattatcacccggcaatttctcatgtaaatggaggtgccgaacatgagggggtgttcgcgttgagttctaaagatgtgctagattacttagaaaaatttcaagcggttcagttgagggatagtattaaaacgaaagttaatgaggagtatcttgtctataattttggaaaatccaaaggtctcacatttgaccgggtcgttatttatccgtctgcccctatggtaaattggtttaaagatcgtaatttcgacttggcacaggctgcgagagcaaagctttatgttgcgttaacccggcctagaaaaagtgttgcgatagtctttgaacctaaagtaatcgctttgcttaaagatcttaaaatttataaaaaagaagatggctattga

SEQ ID NO: 447122 - DNA, 1650 bp, Serratia marcescens
atgattattacacaagttgtcattgaaaatttcaaagggtttaaaaataggttttcacttaaacttaatgagggggttaatatacttgttggtgataatgaagcagggaaaagcacaatactagaagctattcatttcgcattgactgggatgtataatggacgaagtattaaaaataacttgtctcagtacttgtttaatgagcaagcggtaaaagaatatattgaaagttttgctggtgaagacgttaaggcacctcctacaatgttagttgagctttattttaaagagacggctgagacagctattttgactggagatgggaatagttctggaatttcttcaccgggtatatttattaaagtggagtttgatgatgattataattctgcctatgaggatatgatagctgcgggagaggtgaaaaccttacctgtggagtattatcgagtcacttggaagggcttctccagagcatctatcataagtaggaatatcccaataaaatccgcattcattgactctactgcttcgagaagtaacaatggctctgatgtgtatattagtaggataataaaggagttattgacgtctgaagaggttatcagtgtttcgcaatcccatcgtaaaatgaaagagtcatttatgatggatcccgcaatagaggcaataaatgggaagataaaaacagccagcaaaataacagataaagatgttaagatttcagtggagctttcctctcaaaatgcttgggagaatagcttgattacttgtcttgatgaaataccattccactttattggtaagggcgagcaaagtattgtaaaaacaaatctagcgctggcgcataataaagctaaggaagctagtgttgtcttgattgaagagccggaaaatcatttgtcacattcaaaacttaataatttaataaaaaccattaaagacaattgtgcaggaaagcaaatattaataacaactcatagcagttttgttgcaaataaactggggcttggtgagttaatacttttgagtgataagaaaacaacaaaactaacagatttgaaagaaagtactagggagtttttcgaaaaaatagccggatacgatacattacgcctaatcctgtgtaagaaggcgattttagttgaaggtgattcagatgaattggtggttcaaaaggcttacatggttagtaatgatggcagactacctatcgaagatgggattgaggtaatatctgtcggaatttcattcctaaggttccttgaaattgctagccatttaggtaaacaaacgtatgtattgaccgataatgatggagatgttggtgctctggagaggaagtatgaggaatatcttggtggtaataaaaaagagaatatagaaatattatatgatcccgaagttgatgtcggtgacttgaaaataggagagaaaaaattcaattataatacattggaacccaaaattctaaagatcaatgggcgtgcagtcattaatacggttttaggaactgattttgatgaggatgataaattgcatgtctatatgaaaaagaataaaacagaatgtgctttgaagatttttaattatgatgacaatgccgttgaaataaaatacccagactatatattggatgctctaaaatga

SEQ ID NO: 447123 - DNA, 729 bp, Serratia marcescens
ttggaaggattaattgtatttgtcgcccttgcttctgcggtggcgtttttcattggtttgataaaacctcaatgggtacgcatgccaagcaggattggctctagcgttatttatggcatcatttttatttgcgcttcaacgttgggggctgctttatatccgactgagaaaaaaaactcagtagctgagagtaagcctaaagtcgaggccccaaaagccccggcagcatttgaacaggcagatttaaagctggttgagtaccgtcggaagccgcaggcagaccgtcaccaaatcgttagcgattacgttcagtttaaggggatacctgcgagtgatggcgatgggttctacgcctgcctgagccagtacagcatcactaagtcagaggatttgccgctcggtgaagttcttggatggtgtgatgccggttatcaaaaagaccctaaatcgatggctgaatataccaatcttgacgcgttccagaagaattttagcggttgggatggctcatatcgcccgcttgagaagctgattaagaaaagtatgaatgatgattcatcgtacaagcatgttgaaacgatgtcgcatcttgttcttgggaaagacccgcacgcagtggttaaaaccagatttaaagggacaaatgtttatggtggtattgttacccaaactgtgacggcacgtgttgatattaaaactggtgatgtgataaaaatcatagaggaatga

SEQ ID NO: 447124 - DNA, 264 bp, Serratia marcescens
atgagaggacatgtgcaacgtgaacggataactttcgtccaagctaaccccatcgttcctggaaccatactcttgagtaacatagacagtgccgcttgcatagatattgatgtagtcatcatcaatggacgtgattccaaattcctcaacctctgtgtaatctacatacgcatgattcgcgatagttacaagattttcaggcattgtgcttactgctgtgtcgatcactgcatctctgattttaccttcgagagtacggattaa

SEQ ID NO: 447125 - DNA, 144 bp, Serratia marcescens
atgatttctcaaaccatcaacgggattttctgcgtgaccgtctgcggctgtgtcagttggcggtttgcagatttcaatgaagccctgcactgggcatttacaacacggttagcgatcgataccgccaaccggatcggagcgtaa

SEQ ID NO: 447126 - DNA, 582 bp, Serratia marcescens
atggacaataagctgagcgaactgagcaagcctgtggcgtgggcattcaaagacgccaacgacgttgagcatgcatcgataatcaagaaagccaatctgtatggtcgtcacgatttccagcccctctactcgcaagagtacgtctcagccctgctggaagataacgagcgcgttgcccgtgaccttgtcgctaggaatggcgagattgaatggttacgaaagagagctgccgaactggaatccatccgagcagacgcatcccaggtgttcaaagaaatcggcaacgagcttggctgcaaccccgacaacgagtcgatcatgatggctatcgatgcgctgaaagagcgggaaaatcgcgtggtggcgttggcaggcggcaacgctgagctgtgggaaacaatggctgcgaggctcgaggaagcagaaaagcggctggctacgccggtgcggttgcctgacgtgcgccaatcatcttcaggcgacagatatcaatggtctgatggtgcacataactaccgcctggatgttatctcaatgcttcttggcgctgggttcacagtagccgtagagggggatgagtag

SEQ ID NO: 447127 - DNA, 1857 bp, Serratia marcescens
atgtctgatgtattttcccttgttccagaggggcaagcctggacggattacaacgccaaaccggcgaacagagaagactacgacccgaagtttttcgctggctccctaacggcgatcccgcagggtgttgcgtctggcgctgtcggcctggggcagaccgtgaccagcttcggcaagcaactgatctcagaccctgacgtaatgaatcaatttgcgccaagttatggggtggttaaggctctgtttccagatgcagatgaagccctaaatgatagctatgacaaagcagcgtcagctctaacagctgctcagaagggcgtgaagccggaggctaacagccagggaactgcagcgcaggttctgtacggtctcggtcaatttgtcccagccatcggcgcgaccattgtcggcggtccggctgccggcggcgccgtggcttttggaagcacatacgagccgaccaggcaggagtttttagaaaaaggggttgatgctgataccgcgggaactttggcggccattcagggcacggccaatgcctttggcatggctctaccggctggcgtcggcggcacccttgcaacccgtcttctttccggggctggcatcaataccgggttcggcatggctaaccgttttgctgtgggtgaaacgctggatagccatgggtacaaggaattatcccagcagtaccgagcatgggatgggcaggcgatgctgattgatggtgtgcttggtttggcattcggtggcgttcatcactggaacgcgagccgtgccggtgatggttccgaaagtgtaccgccaaccgatgatgtttcccctgtcgccgagtcaggtgatcagcctacgcctgttggaaacgatattccacctgcagcaaacgaatctccactacctagctccgatccccaggtgacaccaaattctgcgcctagcgtcgatatagattcactgcgggcatccgccggtcagattttatcacgaggtgaccgcaaggtatggcagtcggaggttgcgaacggtgagcgcatccttgggcgattaaacgagcagcgagccgctattctggaagagcaggtgcgaggtagtggtaaggctctttcagcagcgagggctgacaagcagcgcagactaggtgatatcgatcgacaaattgcatcagcagaggagcgcacgcagtacgcccgtgatgttctcgaaccaaatatgccaggcggtgagtatttcgaagcgcgcgcagaattgtcacggttgcagcaaagcattaagccaagcgacgtcgacgcagcccacgtaatgaatgagggactgtattacgacattgaggcttcccccgtgctccacggttcaacggcgagcctaaacgcccacgtagcggctatggatgaggcatcgcgtgcactgatgagcggcgagccggttaatgtttctcagcagatccgtggtctggacggaataacccggcctgatgctatatcaggtgcgccagatgatcatgcggcagtgcggcagacacttgatgaaaatggcgtcgattattccgagcgaagtgagccggcagttacagctccagacgtcaggccagaaagtgccttttcgcgtgccagtgatgaaaccggacaggtcagcaccgatccagatacgggcgatgtcatttcatcaaacagttatgatctccttgctgcccgcgacatggcggcagttaacccagatgctaaggtgctgcatcccgacacagggaaagaggtcaccttagccgaagctttgtcagacctggatggtcaacttgccaccgtgcaaaaagagtcgaaagtttatagcgcggccgccgcctgcttcttgaggaatttgtga

SEQ ID NO: 447128 - DNA, 780 bp, Serratia marcescens
atgaagacattgttgaaaaatacaggtttgatttttaatcttaccaagcgggatgttgaaagtcgctatcgtgggactagtcttggtatcgtatggtcgctgctaaaccctgtgattatgctttctatctatagctttatttttggctttgtttttaaagccaagtgggggctgacaacgacagaaaattacactttgattatgtttgccggtctgctgacacatggttttattgccgaatgccttggcaaggcgacaacaatatatgtatataatgtcagctatgttaaaaaagttttatttcctcttgaatccttgtgctgggtgtctgtttttggcgcattattccaattctttatgggatgcattgtttttgccattttttgtattttactaaagcaacctgttagtctaatggcattattagttcctattgttattcttccattgattttattatcatatagcatttcattatttttgtcatcgctaggtgtttatattcgtgatatggggcaggttgtttcagttatcattgccttaatgttatttatgtcgcctatattttatcctattactgctgttccagaacaatatcgtatgctgatttatattaatccgttaacgtttattgtcgaagctttacgtgatgtcgtcctgtacggaaaattattcagtcttgaaggctatgcactctattggggtatcagtattgtgctgtacgtattagctataacttggttcaaaaaggtaaagagaggctttgctgatgtcctctaa

SEQ ID NO: 447129 - DNA, 660 bp, Serratia marcescens
atggacgatattaaaacagccagtacacggttaatcttatcctctgctggcctcattctctttttagggggctgggcatctttcgcggactctatcccgattggcaatctggggctaaaactaacctcactgcatgttgctcctatcatattgatcgctttttggctctttagctggcagcgtttttttgtgttatctcgggactctaacaagccaacaattgacgatttaatgctcaaaaatgttaatacctctaagctcgtctattcgatatttcaacccgcattgtttggtttacctgatgccaaagggatagcaaaatgggggtgggcccatgcagaaatcccaaataaagccccacatgaccatatattttataagagaacattttttaagcgtttattcatgttccagtacttcggcaatgacgtaaatgaccaagcattattcgtccactttggcccagcggcttccaatgttaataacggagctgtaacaccaataaaacttggatattggaaatgtatactctttgaaatcaaggtattaactcctagattttttgataatccaattattggattccattatttcccccacattttcgcctggatcgcttttacctatctgtgcatttggagctttggtctggtgatataa

SEQ ID NO: 447130 - DNA, 672 bp, Serratia marcescens
atgtcgctgttgcagctcactgctgctggaagtagattgttcttccgcctctttttgtgccatgccgatcatgtacgattctgcttccggcgttgggatcacctggcgaatatcgacaaaaacatcatcgccgaaacggtagggtgtcaccttgaagcactgcgccctaataccaaattgcatcaaccacagtgcggtattggtgacctctttgcggaaattggctgctaccatgatgacgcgctgggtacctttacggttgagcaccccttctttcaggctttcccatcccataaactccgcaatgacatcagccgcttgacgtttttcattcggatcataaagatcgagatacatctgaaagatttcaaccacgctttcctgacgcagattagcgcagtatccggcatatttcagtgcttgccacaccacgtcgcgcccagaatcatcaagcttgttctcgatgatcaccagattgccttttttatcaagagccagcaggtcgagtctctctttggtatcgtcgaaacctgcaaactctttctggataatcagcagttcgtcttctttgtcatctttcttggtcagcgcctgcggattttttgccaaccattcttgcaaatgatcgcgctcacgaaagccgaggctgctaaaagaaacttcgagcaatga

SEQ ID NO: 447131 - DNA, 126 bp, Serratia marcescens; identical to SEQ ID NO: 438598

SEQ ID NO: 447132 - DNA, 573 bp, Serratia marcescens
atgaatttagatctagacaaaggtgggcgtgcagcaatcgagcgaatgatagatgcctatgggtgcggtactaagacagcacttgcagaacttttgggaatttctaaaggaacgttatcaaatcgttatctaagggatactttccctgctgactatgtgattcagtgttctcttgatacgggagtatcattgaagtggctagcgactggtttaggtgctatgttcaatgatataagccaggatgtcgtatctatccctcgaaaaaaattaatccaaggtgaattgtttgatgcaaacttatacttgtttgataaagcaatcctccccaaagacataaaaaaacctgtagccatacttgatgaaaacactattcacataacagaaagtgattttactcagataacggatggtgagtgggtgattaatatcgataaaaaaataagcatcagaaaaatagcattactccctaaagctaaagtcaaagtatccaactcagaaaatacgtttgagtgttccattgaggacatagggtatatttccaaagtaagagctacatacattaataaaggctaa

SEQ ID NO: 447133 - DNA, 297 bp, Serratia marcescens
ttgctgggtgatattcaggcgcaggtgtttttggtagccgaaaaggtgctcatcggcgaacgcgtcgaaatcctcctgagtcagcgcagaaatatcatttttgcggtatttgcgctttttctttcccccatcctggccactgtcgccggcagcggaatagtcgccatttccctgggaagcggcggcggcaagtttctctgcatgtttggcttgctgaatacgcagtttgcaatgatgcgcgatcaggctatcaagttctttgtgctccagttctgttttaccgtcacggtgggttaa

SEQ ID NO: 447134 - DNA, 846 bp, Serratia marcescens
atgatgaatagaacggttgttaagtgggcgggcggtaaagcccgtttggccgaggcgttacggcaatatttgccagcgggtgatcgcctggtggagccgtttgccggttcctgcgcggtgatgatgaacacggattacccggcctatctgattgctgatattaaccctgacctgatcaacatgtaccaggtgatcaagagggacgtgcaaccctttatcgatacagcacgagcgttgtttgcgaccgcgaacacgccggaacagtacctaacgtttcgccaggtgtttaaccacacctgcgccgatccgttcaaccgtgccgtcattttcttgtacctaaaccgccattgctttaatgggctgtgccgctacaaccgcgccggctatttcaatgtgccttatggcaagtacaaagccccttactttcctgagaaagagatccgcgcgtttgccgaaaaagcgaagcgggccacgttcatttgcgccagctttgaggaaacgttaggcatggtgcgacctggggatgtggtgtattgcgatccgccgtacttgccggaggaggggaaagaatctttcaccagctaccacacggacggattcggcatgttggagcagttggcgcttgccgcacatttacgtgttgttgccgacgctggcaaccctgtaaccgtgtcaaacagcattcgcgcttctgaggttgggttgtacagcggttttgatgctgttgtggagctggacgccccgcgaagcattggcgcgaaaacggggggcgcaaaaacggcaaaagaggttttggcgacgatcaccccgtttgagcatgtattacagccagaggcggcgctgtga

SEQ ID NO: 447135 - DNA, 726 bp, Serratia marcescens
atgaagtcctgtcaagctggcggtggtgactgtactgggatcattaaaaattacgaagaactgagtatcgcccagcaacaacagctcatcagtgattgtgcaagcagcccaacaacctgccagaagaagtacggtaatgtcttggcggatagcctggcagtgaagcaggcaatagatcgcgcattgggagaagatatcccgatcaagatggtctatgatttgacggcgacttgggcgcaccagatggatgctgacggggttattgccagtaataaagtgtcagagcagatcatggccaaatatggccttgatcaggttcaggcggatttgattgcgggcgtagcgttaagtgcgctgggtggggtgagtaaggttggaaaaggttctggtggctctgcaaatagcacagctaaactttcgattaatcaagggcaacagaataaacacgtgccaggaactaatgaatacaaaatagcgtctgaagcaggattaaataaaagtgtactcacagttaagcctgattcattactttcaaaattaggaacaggtcaacaagtcggtagtacggttattggggtgccaggctctaaggaaaggattaactatggaaaagttattggaaactatatagatcctcaaactggcgtgtccacgccgactaccaatggtattgttcattatggaaaaaatggtgttcatattgttcctgcaaggccgtcggagtaa

SEQ ID NO: 447136 - DNA, 705 bp, Serratia marcescens
gtggatcggcgctggctgtggcaggatatcgaaccggcaccgcgtatcgatcgcccgctgacggcggggcgcaccggcatgcgtcagggcgtgcgttcctgcgcctgctgtacggcgatcctgccggccaaccaggtgcgctgcccacgttgccacacccccggctatgtgcgccgccgccacagcctgcagtggacgctggcgctgctggtgacctctgtcatgctgtatattccggccaacctgatgccgatcatggtgaccgaggcactgggcaacaagatgaactccaccatcatggcaggggtgatcctgctgtggggaagtggctcttacccggtggcgatggtgattttcatcgccagcatcatggtgccgtcgctgaaaatgctggcgatcggttggctgtgctgggacgccaacggcaggaagaaaccgcgtgccgacagcgagtgcatgcatctgatttatgaagtggtcgaattcgttggccgttggtcaatgatcgacgtgttcgtgatcgccgtgttgtcggcgttggtgcgaatggggcagttgatgagcatttatcccgcgacgggcgccgtgctgttcgcgctggtggtgatcctcaccatgttcgccgccatgacatttgatccccggctgacctgggattgcgcaagtgaaacaatcaacaaggagccgcaaggtgacggaaaataa

SEQ ID NO: 447137 - DNA, 567 bp, Serratia marcescens
atgccacgttctgccaggcgcaagatttgcttaagcaggaaccgttgcaggcgaacgaccgcgaccaactccgcgagatgctcaatgcccgtgaatcaggcggaattatttttaccaccgtacaaaaatttgccccgctggacggcgaaaaaactcacccagcgctcaatctacgcagcaatatcgtcgtcatttccgatgaggcgcaccgcagtcaatatggccttaatgccacgttggatcgcgaaacaggcgcttataagtacggttacgcccaacatatgcgcgatgcattacccaatgcatcgtttatgggctttaccggaacacctgtatcttcagaagataaagatactcgcgcggtatttggtgattacgtctctatctacgatattcaggatgcggtggaagatggcgcaaccgtgcctatctactatgaatcacgtctggcaaaactcgaccttaaccacgaagagctggaaacgctctctgagcaagttgatgagctggtcgaagacgaagagaccgatcagaaagagaaaactaaaggcgactggagccgcctag

SEQ ID NO: 447138 - DNA, 240 bp, Serratia marcescens
atgccaactatcggccaagacattagcaaccgcgccgcgcgcgcctccatgaaacatgcgctcgacctggcgcggcgtgaggcccaggcggatgccgccgtgaagttttccggtcacttagaccgtatggcaaccgcgatggccaaccaagagttatccgccgtggagatcgtggagctgctgcgccaggacgctgagaactggaaaaacgaggggctttcatgttctgggtgctgctga

SEQ ID NO: 447139 - DNA, 222 bp, Serratia marcescens
gtggtttttgagccaaacaccacggcttataacagcctgattaacgatatgacgatggacaataaaatcgccccacatgtgacttatttgcgtcgcatcgttgcggcggaaagtaaagccgttctggacgaactgcttaaattgccaggttccgctttgcaaatcgcggaagcggtaaacgcgaaatatgcgccgaaactggaaattgaagtaaaaaactaa

SEQ ID NO: 447140 - DNA, 201 bp, Serratia marcescens
atgatcaagccaggacgccagaatccacgtataaccacatgggtgcgcataatgtatattatgttaaattgcattattgggtacgcaccgccgttagcctggccgtcctttctcacctcaccttcaagccttatcaagctgctaaccttttttatgtttaagcccatcatcagcccgttcagtttcaacacctcagtttaa

SEQ ID NO: 447141 - DNA, 330 bp, Serratia marcescens
atggccgcccccagtcccagcccggtcaaaaaacgcagcagcgtcagcgtcgaaagcgagccggcgaaggcggtcagcaggctgaagccgccgaacagcagcagcgaaatcaccagcactttcttacggccgatgcgatccgccaacgggccggcggccaacgcgcctaccgccagaccgaccagcgcggcgctcattaccggccccagcgcggttttgtctattccccactcctgcaccagcgacgtggcgatgaagccgataatggcggtatcgaaaccgtccagcgcgaccgccaaaaaacacaaaaccagtatcaaccactggtag

SEQ ID NO: 447142 - DNA, 585 bp, Serratia marcescens
atgctcttattctcaaagcatcggcagtttcaatccaaaccttttcgcggcagcaacggcttgctcatagccagcatcggcatggcgcatcacaccggaaccgcagtcgttgaccaacacccgagcaagccgccggtcagcctcatcactgccatcgcacacgatcaccattcccgaatgctgcgaatatcccatccccacaccgccaccatgatgcaaactcacccaggtagcgccgcccgcagtattgagcaatgcattcagcaacggccaatcggaaacagcatcggttccatccttcatgctttcggtttcacgattggggctggcgacagagccagtatccagatgatctcggccgataacaaccggcgcgctaagctcccctctacgcaccatctcgttgaaagccaggcctgccagatgacgctcgcccaaccccaaccaacagatacgcgccggcaatccctggaaagcaatgcgctcacgcgccatatccagccaacgatggatatgctggttttcaggaaacagcgctttaaccttggcgtccgttttgtagatatcttccggatcgccagataa

SEQ ID NO: 447143 - DNA, 351 bp, Serratia marcescens
atggttactagctttggtaaatatctcaggaagttgaggatagaccggggtatggtactgaaaaatatggccgatttggttggtgtgagttctgcctacctttctgctattgaattaggtaaacgagctatccccgaagctttcgttaataacatagcaactgcgttcagcataaatggtactgattactctgagctgtgcagattagctcaactgtctcagcccacgctcaaagttgatatgagcgatgcggaagagcaaaacaaagaggttcttcttgctttcgctcgaaagttcaaggacctaaaccctgaacaattggataagctgaataaaatgctgaaggactga

SEQ ID NO: 447144 - DNA, 528 bp, Serratia marcescens
atggtaccgaaacgagaacttggccatcgcgtttccccactgagcaatgaaaaaattaagtattatgctcaacaacttagggatgcattagaactcaacaatagccgttacatgaggcttgatgtcttgttagaaggacttgctgcaacagactcgatcatgttggaaattgttgaagaccgcgagcttcaaggccgctatgctttgacataccctgatcgcaataagattgtgttacggcaatcggtttatgatggcctttgtgaaggagaacaccactcccgcttcacagttgcgcatgagctaggtcatttgattatgcataggaatcaaatggcctatgcacgaagtagcacagcgggaaagcataagatctacgaagatagtgagtggcaagctgatgtttttgcaagccatttcctcatagattctcgattggtcgaacccggaagtacagcagaaaaaattagccatgattttggcgtcagtttatccgcagctacaacatggcttaggaaaaacagatga

SEQ ID NO: 447145 - DNA, 162 bp, Serratia marcescens
atgttcataaatatacctgtaaaagtttgcgctgttgacaaaactttgggtacacgtatactcataaccgccaagtttatcgtattcgtgtacgaccaaaagaaagccagcgacagcgatgcgctggcttttttccatatcgagatcatctgtttttcctaa

SEQ ID NO: 447146 - DNA, 825 bp, Serratia marcescens
gtgactgatatcaaacacccagcaatccgttaccatggagcaaaattccgtctggcgccgtggatcattgagcacatgccgacgcacacatgctacgtggagccgtttggcggcgcagctggcgtattgctgcaaaagccacgcagttatgctgaggtttataatgacctagacggtgagttagtcaacctgttccgcgtactgcgcgacccggtgctgaaccagcgcctgcaggactcatgcctgttgacgccgtactcacgcgatgaattttgctttgcccgtgagcatatcaacgatccagtcgagcgcgcccgccgaatggttgttcgcgcctgtaagggtttcggttccgctgctggcatcggcggccagtcaggattccgcattgatagcaaacgggaatatgccatcgcatcgcatttatgggcgcgctatccagcgaacttgtcagcagtttgccagcgtctgcagggcgtcatcatagaaaacaaaaaagatgcgatagcagtgatgcgcgctcacgacgcagagacaacgctgcactacatcgacccaccgtacgtgccggaaagccgcgtgcagggaaaccgctactacaaccacgaaatgaccgcagaaaatcacgaacaattactcgccgtggccagtaacgatggcaggtatggttatgatcagcgggtacgacagcgagctatacaacgatttgctggccggttggcggaaggaaacaaaatactctcggatcagcgccggccgtgggacgaaagtacgacaagaatgtttgtggatcagcacaaacagcaagaaggtgtaaacacctag

SEQ ID NO: 447147 - DNA, 300 bp, Serratia marcescens
atgcttaatcaaaccgaaatagccattggccagatatccgaatacatccaacgagtatgtcagggcatgcagctgcaggaagcaaaagaacggctggcaaaaaagttggttctgtactacgtagatggatgcaataccgaaacactgaataccacgtttgccgcggcactaaaaagccatacgcgtgattcattattttcgcatatcaagcagtcggaaagtaagaaattcatatgtcctcgctgcggagcggagggatggcactactgccatgctggacaggaggtagagcgtgactga

SEQ ID NO: 447148 - DNA, 213 bp, Serratia marcescens
atgaaagcgagcatcgtaaaaactcacatcgggacggttatcacgaaagacggacctaagcgcaagaagctgcacgaaacgagcgcgatgtgggttgtcgggaaaaacgagtattaccgaaaggacaccggcaaacgccattttgcggagcatacgcgccgacgcctggtactcgactccattaagccgatccagggggacgaaaatgcttaa

SEQ ID NO: 447149 - DNA, 1014 bp, Serratia marcescens
ttgattgattatcttcttttgctaatggtcatttttcttccattaataattccggttgtaatcgtggttctaaaaatgggtggtcaaggtagtatatcgtcaagaattaaccaggcattggtgttgcacgctagtaaagggctttcagagcaagggctgctttggctctcgatagccgtaccatttacatatgctttaatgtttggttttatttcttggcaaggacatacaattcttttgactggcgaagggctaagtaatttcttaaaaattagtgcgttcccgatagcatttatctccctgtctttaccccttgctgtattggtttcaaggttacatgctacaaagcaaaccgctgaacagattcgattaacaagagttaagaataatgttgatttatttcaatcgcataggaaggagttgttttcttacttcgctcaaattggtgatgttaattatttggattgttttgttgggcagtatagagtacatccaagggttcataagatatactttgttggtaatcaggagagtggaaccccagccttaaatttgagttcttttcaagaagtagaggatgatttgaattctgtaaggtttttcttggatatggtaatcagaaatataaatccagccttaacttttgatgcttatttgtgtaatttttgctctagaatgtatagggttagcgctaagctaggtttgcctgaaatatatgagggaatggctggtaaaagtgttctggttcctgtgaaaaaaataggtgatgggcctagctcattgattacggtagggacgacgacaaaagatgcgatagcatcgtttaggtatgcgtataattttttcaaaaatttatctgattttgctgggtatgttgagtctaaaagtgttgacccggaaatgagatatattgatgagggtgataaatatcttgagaaaagcgaattcttagttatagagaagatacataaatatgatatccctgaaatgcaagtacggttaatggatgattga

SEQ ID NO: 447150 - DNA, 1380 bp, Serratia marcescens
atggacgataatattacccagctaaaggcagtgctgattgaactccatgataaaataagtaatttaaatatgggttctgaaccattcataaacaaaggtgcctatacccatccatcctttagtgttgatgatattttaagtatgataactggtatgtctgctgaattagataaattgacaaagtatgttcctgactcagaagacctgcttagcatacagaaaacaatttcgatgataaataattccgatcaaacaattgcacatataaatcatgggaatgtttcggtttctagtccggccttattcagtttgatgtcgatgttaatgcttgtgaagtttaatataagcacttttttttcatttaaaaaattaaatgatagatctcttgtaccaaaaaacataataactcgacttgagttgtataaatctaatttggatagaatttcatctgataactctgatattgaaaataaaataaaattaataaatgaagcatatgatgctgctgagagcttacctacaaccttaaatatgcttaaagatgcaaactcagagttgatggagataaaggaacaatctatagagataatagatgaggttaaatcaaaacatgatgacataattcaatttcataaggattgtgccaaaagtgattaccagattgaatctttactagaaaagagtaagcaagaagctagtgattacatgtcagctttgaaatcacaagctcaagactatatagataagtgtgaagaagcgtttagaaccactacatcgaaaggtttagccggagcctttgaggataaagctaaaaaactaaatgtgagtattcgttattgggttgctgggcttgtaggtgcactagtttttgcttccattgttggatactttagacttgaggttctaagtaattatttttccgatcccaatgcctccgcattcaaaatgactgtgcaaatcgttatgtcacttatgagtgtaggagctcctttatggtttgcatggctcgcgacaaaacagattgggcaacgatttagattagcagaggattatgagtttaaagcctcagtatctaaagcgtatgaaggttatagacgagaagctattcaattagatgacaacttttctcaacgattatttggaaatgcactgactcgtttagaggaggctcctctcagatttatagatgaaccatcgcattcgtcacctattatggaaatgttagcatcggaaaatttcaagagatttatcagtgagaattcagatgttgcagatgcgatgttgagtaaggttggattgaagcggagcggaaaaataaaaaaagaagatgatgctaagccaaaagatttatcattgacaacaagttctgatagcgaatga

SEQ ID NO: 447151 - DNA, 747 bp, Serratia marcescens
atgataaagtatgttgcctttttagttatatcagttacatggtggatttatttcctcaacttcgatccgttaaatggttttccaatcgacaagtctgaatggggaacatttggtgatttcgttggtggcgtgactaaccctattttgacattttgtacaatggttatgttaataaaatcaataaacttgcaaaaagaagctaacattagcattattaaacaaaatttgcatatgcatgaagtttcagaaagacagaaagaaattgatgaattgcgttcttttgaatcatcgttttacagcctcgctgaagtttccagaagagattttgatgctcttaaaataattggtagaaacaaaaaaaactactcagctgcggatgcggtaacttatttggaacgttacatgataaactcatgtaaatcaaaaagttcaaaagaattatgtgaccagttttctatttttgacactgagtcttctatgtctgtgttttctgcggttcgtagcttttacattctatttaaatttacaaacgaatcatgcccagaaaattacaaagaaagatattacgaaattgcaaattatacgatgcccataaaatttcttcatttagtatgcttggcatatgtgtttagtgattggaaaataataaaagactttgaaagctttggttttttcaatcgaaaaggattagatcaatacaccaatgattttatgggtgttaagaatttctataagtcatcaggttaa

SEQ ID NO: 447152 - DNA, 819 bp, Serratia marcescens
atggaaattcatgttcccatggaagtagtagtaagtgatggagaagaaagattcacagagctcgatttttactatgggtcaaaagcacttgaaggcacgtcagagatagttactgtcctcactaatactatcctaaatcgtgaagtagttactaagatcccatcaatcgaaggcataactgcatcttttcgtaccagttatgaagggtcgtttagacaacgtttcatgctcaagatcaccggcgagcaacaacgtagaaactacgctgcaataggagaaggtgcgtttctagatgttatgtcttattatcttacaaggccattattaacaccttatattttcacatataaaagagctgctagaattgttgaagaacttaaaccggattatagctcattaatgaaaaggctttatggtccgctattgaagcttcataagcccatagaagagcaaaattatactgttgagctgaaacggaaaaggacaaatattgctcggtatgatcacacaacacttgaaaatctagttattgaacgcgctgatgatgaaaggagcattattgaggcctcgataacaagatttaatcggctaacagggactggaaggcttattcttgaggaggattctgactctgtaagttttgaaccttcatctctttggagagattttcctgcagatcaaaaacgtaagctatctaggaacttagcagctaatacagataatgatgactttactcgtttaaggctagaggtaacaacaattcgaaacttccttggtgttataaaaaaatacagtcttcaccgggttatgatggattga

SEQ ID NO: 447153 - DNA, 231 bp, Serratia marcescens
atgcgtaaaaacatttcaatcacggttcctacaccgcacgtcactatagaaaagtattgtgaactcacggggttatctaaaaataccgttgatgacatgctcgccgatgggcgtctgtcttcatatcgtcatcgcttaggcactggtgcaaaacgagagaaagtactaatcaacatggtgaagcttacgcttaatgcactctcggaatgtgaattctcggtaacgatttga

SEQ ID NO: 447154 - DNA, 207 bp, Serratia marcescens
atgatgaaaagtaataaattgatgggtgcattgatgggcgtggcgctgatgagcgtgtacggtatggcttcggcgcaggtgcacggtggcgatgctgttactgtggtcaacgctgccaaaatcagcttccagaagcagtgcaagatggaacgtgtcagtgcgaccaaaaccaaaatggtgtgtcgttacaccaactataaattttaa

SEQ ID NO: 447155 - DNA, 762 bp, Serratia marcescens
atggtagatattcaaaataactggcagccttccgagggtgtcgtgccgggcaattcaccgtttaacgatgcgaccgattggcttgtggtgcatgttgatgcctgctgttatggccgagcagggttacagttcgcattggaacatctcccgtttgccgcgggcaagaagtgcgttgtcggcgccagttcactggacgaggccttgcgtgtaacgcgtccctacgcgttcaagggtcgaactgttcgatgtctggtggtgcggttgccttccctggcgcgtgaggcgctgattaccctgttgcagctcagtgaggtgatgcagcatgacgttgtacgttatcaccaggtcgtggtgctgtcaccgttcgataccgtggccgtacagcgtatggtgaccatcatgggcatggctgatgcgcgtgttgtcgatgcgcgactttccccgttgacattatgtaatgccgtactgtttgttccggaaaaatggatggctgaaggctggtgcttgagtcaggtcctgactgagcacgaaaggaatgccctgcgtcaatcactgcagttctggcctataccgatgcaggccaggttacgccaggtgagtccgaaaaccgtatacagtcagcgatttcgggcactgatgaaactcggagtacaggatatacgcaccctgctgaatcttcttgtcccaggtggtaaggggcatatggcgaagggaggcttgcgaacggacgtgaacatgccactggccgcacgctggcgatga

SEQ ID NO: 447156 - DNA, 546 bp, Serratia marcescens
atgaaaacacccaatgacattaaaaaggcgcattactcacgctctggcgcggaaagcacctcacggatacgggtgcgcgcacaacaaagcaatcatggggggtatgacttgccaccgtgtttggctcatttgccggcaatgccgctgtatttggctgtcgcttatctggggatgttaaagcgcgtccccttgtcgcggttagaggtggctcaggcatttgggctggatacacgcagagctctggaggtgatgcgttatctggccagtggaaaaacctgcgtggcctgtgaacgggttcccttgcatccgggcgagtttggcaagggttaccgcctgcgcattgacgccattggtgaaccccagaaaagttttgtgggaatgcgcaaggaaacggcggaggacagtcatcgcactaaggctgaggttgttccggcttctcgcggcagaagggggcaggcacgccgacgccctcgcttgagtgacgagttggcacatcagtccttgcggcgttggttcttacgccgcccgaataccgacgagcagtga

SEQ ID NO: 447157 - DNA, 492 bp, Serratia marcescens
atgaaccgtcgtacacggtgggtcaattttggcatcatcgtctgggttatgttggcggcgaaagaggctcaagctgtcgaaagctcgcttgccggagcttacactaagttggcgttgctgtcggtcagtgatgatatcaatgccgcctcgtttcgcagtgaagaaataagatacacgcgatactccttgcccgggcagttcgacacattgccgcttacagacaacctgtcttgggttagtcagatgcgagtgaaagggttggatgtgcgcagcgtggaggcgattgattatagcgatgacggtcagtcgctactgacccctcgttggtcggtgagttcgctggttggtagtggccatctctcgcaagcaatcaacgcgtcgttgacgctgaattacggtgggagcattggtttacttaagcttgagaaccgctcccatttatcaggggcgttgagtcaggagcttattctcaacttaaaaactcgggaatag

SEQ ID NO: 447158 - DNA, 240 bp, Serratia marcescens
atgatatcaagaggacatggaagttcagcaggaactatcaccggcattagctcccgtgccgtgatgcgtgcgttgctctttatgctggcgtcactgctcgtggggtgccaggtggctgatgaggggcaatggcgtgaagagcgaaggggcccgcagttgcacaaccggttacagttgtgtgacgcggaggtgggtgaacttgcacgcaagcattgtcaacgtcgcgcagggatgcaatga

SEQ ID NO: 447159 - DNA, 780 bp, Serratia marcescens
atgaaaatacgtgtactgacaggcgtactcctggcggggatttctgctggggcgatggcggaaacaacgtcttccggtttttatttatcggcaaaagccggggtatctcaattccgctcgtcggaaaacgtcttgaatagctcgggcacgacggtgagtcagcttgcttatgatgtagacgcctcgcatttaggtaatgcgtcaaaaacggtattcacgccgggcattgccctaggctaccgttttgctagcgaactggagcagcctgtccgtgttgagttggcattccagcacttcggtaaatccgataaagacttttcagcgagctcgcaggcaacggggtactggggagggcagacgagtggtggtgttacgctgccgaccgccaacgatgtacgccaatcaacccgggtaagcacactgatggtgaatacctattatgactataccttggggggagctgtcacaccttatctgatggctggcattggcgctgcctttgtgcgtaatacagtttccagtaacagtaatgtggcaggtattgcactgaatagtggcgatttcagtaatcgtaagaccaatctggcctgggcgctgggggcgggtgtttcatgggctgcatccgacaaagtggcgcttgaaatgggttataccttcaccaatgccggagatattaagacagcatacactgcgcaaaatggcattaacgaaggtcggggtgatatgcacaccaaggtgcaactccataccttgcacgccggtgtgcgttaccatttttag

SEQ ID NO: 447160 - DNA, 570 bp, Serratia marcescens
atgaatgctgattttaaacttggctcttccttgaagaggggcgctgggcgttgccttagtgtggtgttattgcctgtgttgtttagcactcagccggtactggccgatgtcggtgcggtgaatatttatatgcgtgccaccatcgtgtccaacacctgcacggtgagtgccggttcagtcaataagactgtcaatatgggcacttgggcgagaaaacaatttgtagaaacaacgtcacttaccccgctggtcagctttacgattaacctggaaaaatgcggtccggccgcgtcgggggttaaggtgacgtttaacggcacatcagacggtaacggccaattgttcaaattgaattcggccagcacggcgtccggcgtgggggtggcgattttggataaagagcgtaacaggattttgccgggacaaaaaagtatgctctaccccttggtggccaatgcggccagtgccgtattgcaattttacgcacaatacgcggcaacgggcagtggaagcgctgttggggccggtaccgctaatgcggatgccacgtttacgatggaatacagttaa

SEQ ID NO: 447161 - DNA, 1026 bp, Serratia marcescens
atgtttagatttattttcatcattttaattgtctgctcaggtatgttgagtgggattgcgaacgctggctgggattgtggcgctggaggttgccccacatcggtaaataactcgattattagaaatttgtcatcaggcgaaaatgaatttggtcagcaggtaaatagcaacaacgttgttactcctgagagtgtgattaattttagtgggggagacttgggtgttgctgccagtgagtgggttgttttttctggtgaagcagtgccagcgcttggttctggatataataattggaattttagaaagatagacgactatttgtcgttgggcatcaagtatgtgagcaattgtggtgtgacttcatatgcgccttttaatcagaggattcaaacgcaaggttcatgtgttccttgggtgacagttagtgggacttggtattcaaggcaatttcaaacggcaatgcgtattgataagaaaatagtttctggaacgtattcaaaaaatattttgatcggtcaatatggtatatgctggccagcgggatctgattgcagatctaaaaggattactgtgatgaatttgtatgtgaacttggatgttacagttcctcaaacatgtactattaatgctggtcaggttatcaatattgattttggaaacttatcttcgggtgcctttgcattggcaggcgctcgacctgaaggggtcaatgatattgtccgtagcatcccaattgaatgcgacggtattgcggctaatacggcaatgactctacgtttacaggctgataaagtcagtggtaatgctgttgtcactaatgctaatgacgatgtgggctttgtcgtggcggatggaagtggtacagcgctgacacctaataacctgtcgagtgtcattccatttagtctggggaacgataataagtccagcgtgactattcgggtatacccagttagcgtgaccggcaataaaccggctgaggggccagtcacgtctcaggcttatttgcgcgttgacttcgcttaa

SEQ ID NO: 447162 - DNA, 2640 bp, Serratia marcescens
atgcagtgtttaaaactgccaatgcatttcagaaaaaatgcagtgtggatgagcctgttcatgctgcctcgtataagtgttgtcggcggtttgctgctgagcagcggcatggcgtgtgctgacacctattttaacccgtcattcttatccagcgatgcaaacaatgtggcagacttgtctcgttttgagaagggagagcaacctgctggggtttatcgtgttgaggtttatcttaacgatgaatatatcggtacgcaggatatgcggtttgatgtggcgaaatctgactctgcaaacaaggatgatacggggctgataccgtgtctgagtcgggagtggttgagtcagcgcaatgttaatgtcgaagcggtgccggtattgagtgccttgagcgaagggcagtgtgctaatttgccggctgcctttgataaagcgtcaacgcgctttgaatttgacagtcagcgcctttatgtcagcgtcccgcaagcggcattgaaaaacaacgtacgtggttatattcctccagatcaatgggataacggtatcacggcggggatgttgaactatgccttttcagggagcaatagcctcacgtcggccacaggatcacgttataacagttatttcttgaatctcaacagcgggctgaacttgggggcatggcgccttcgaaataacagtacctggaattacagcgacagtggacgctatcgcaacagtgattggaaaaatgtcagcacttaccttcagcgcagtattgtgccgcttaaaggggagttgactctcggtgacagttttaccaacagcgatgtgttcgacagcctgagcttcagaggggttcagctggcgacggatgacaatatgctgccggatagccagcgcgggtttgcgccgacggtacggggtgtggccaacagtaatgcgcaggtcaccattaaacagaacggctatgtcatctatcagtcttacgtcccaccaggggcttttgaaattactgacctttatccaacctccaccagtggtgacctgcaggtgacggtaaaggaaaataacggcaccagtaaccaatttaccgtaccgtactctgcggtgccgattttgcagcgtgaagggcgtgtcaagtacgcgctgacggcgggtaaatatcgctcagcatcaaacttgcaagatgagcctgacttttggcaggggactttgctgtgggggctgccggcgggggtgacgctttatggtggttcgcaattgtctgacaactaccaatcctatgcgttcggcgcaggtaaaaacctgggaacatggggagcggtatctgcggatgttacgcatgcgcgcagcgtgttgcctgacgatagccataaagaagggcaatcattgcgcttcctgtacgccaaatcactgaacgattacggaaccaacttccagttactgggttatcgctactcgacccagggtttctacacgctcaatgaaaccagctacaagcagatgcagggttataccctgaaaacgcaggatggtccggtcccaacggagccggtaattgaggattaccataacctctattactccaagaaggggcggattcaggtcaatatcagtcagcaaattggcacggaagcgtccttgtatctgacggggagtcgtcagacttactggcgtaccggcgatacggaccagctttggcaggtggggtataacggcaactgggaagacatcagttatgggcttgactggtcgtggaaccgaaacccgggcgtgcagggcactgacaagcgtctggctttcaatgtctcagtgccactgagccgctggttgaccggtggtggtaaggcgagagatatcaccaattcaagcaacagcgcgtatgcgacgtactcagcgacccatgacaaaagtggtcgggtatctcaacaggcaggcattaacggcacgctattggctgacaacaatctgaactacagcgtgcagcaaggttataccactaaaggcgaaggcgcctcgggcacggctagtctcaactaccagggacgttatggcaacagcaatgtgggatacagctacggtaaacactggcagcaggttaactatggcctgagtggcggtatcgtggcccatgcggacggcgtaacccttagccaaccactgggtgacaccaacgtgctggtgaaggcgccgggtgccgatggcgtacgcgtgcagaacgccacgggggtcagtactgactggcgcggttatgccgtggtgccttatgccacgacgtatcgtaccaaccgaatctcgctggataccacgacgctgaaagacaatgccgacctggaggatgcggtgctgaatgtggtgccaaccaaaggggcgctagtgcgggcaagctttgagacacgtatcggggcacgggccagaattacgctgacgcagcgcaatggcaagccggttccgttcggtgccatggtgacggacgaggcgggtaaaaccggcatagtcggtgatagtgggcaggtcttcatgtccggtctggcccctcagggcaagttgcaggtgatgtgggggcaggcgtccaatcagcaatgcgcggtcagctatgcactgggtgagggcagcgagaagcaaggtatcaactacacgcgggcaggatgtggctga

SEQ ID NO: 447163 - DNA, 711 bp, Serratia marcescens
gtgttgaatgctcaattgatgaaaaaaatggcgggcgtgataacgcttatatcgacattgatggtttcctcttctgcctgggcgggagggattgcgttgggggcgacgcgcgttatttatcccgcggatgccaagcaaacctctctggcggtaaacaatagtgataagcaggccaggtttcttatccaaacgtgggtcgaaaatgaggctggaaataaaacggacgattttatcgttacgccgcctctctttgtcagtaagccggcaagtgaaaatacactgcgaattatctacagtggtggaaaattaccggatgaccgtgaaacgctgtattggctaaacagtaaagctattccgtcggttaatcgcgacgacattaagggaaaaaatgtcttgcagattgcggtcttggccagaattaaaatgtttgttcgccctgcagggctggctgaaaagtcagcggatgcgccggggatgctgacattttctcgcactggtaacaacctgactatcactaacccgtcacctttttacgtgacgttagtgaatatgacgatgggtgggaagaatgtgaatgtggccaataaaatggttgctcctaaatccagcgcacagcttccgctgtttaatggtgcatccggcgtattcacctaccaaacaattaacgactacggcgcaacgacgcctgtaacgaaagttcaggtgaattaa

SEQ ID NO: 447164 - DNA, 549 bp, Serratia marcescens
ttgcaaatcagacagcttgtcgccgttctggcacttctaagcatgtcgggagggagtgctttggcaggaaatcggcatcacgtcattattgatggtggaatggtgcacttacggggcgcactcactgaagctgcctgttcggtatccactgaaagtgctcatcagattattgatatggggcagtttcgcagcaatcagtttggtgatttaggcagttttgcttcaccggttgagttcaatattcgtctgacagaatgcagcactgccgtcagtaacaccgtcggggtggcgttttatggtgtgacggatggtaaggatccgcaggtgttgaaagccggcgaaggggagaatgctgctacgggtgttggattggcgttgtttgaccgtaatggcgacattattccgccgaataccccgccgcgtacaggcatggctttgcatgaaggtgaaaatatcctgcgttttatggcgaggtatcgagccacatcccgacaggtagttgcagggaatgctgacgcatcaacatggtttgcgctgacgtatcaataa

SEQ ID NO: 447165 - DNA, 561 bp, Serratia marcescens
atgttgaacaaacaacgcgttattaaatccgttctggctgcagcattactgtccgctggcacgatggcgacggcggcgacgactgtaccgggcggcaccgttcacttcaccggccagattgtcaacgcagcctgtgcagtcagcgctggttcaaccgatcagactgttaatctgggtcaataccgcacggccaatttcaaggctccaggtgaccgctcaggtgctgtgccgttcaaaattcagctgcaggattgtgatacctctgtgtctactcaggcttccgtggcctttagcggcaccgcggtgagctccgacgcgaatgtcttggcggtgagcaacatcagcggtggcgcttctggctctgcttctggtgttggtattgaaattggagaccacactggcaaagttctgcctcctaacggcagcgttttctctacagcccaaacgctgattgatggtgttaacgtgctgaacttcaccgcgcgttacaaagccaccgcagcgagcgttactcctggtcaggctgacgcagacgcaaccttcaccatgcaatacaactaa

SEQ ID NO: 447166 - DNA, 924 bp, Serratia marcescens
atgaacgtctataaactgactttggacgccaagggctaccaatccatcgataaagatgactatgaaaaacgtaccggccggaggccaccctggtacaaaaccagtgatcggggtaccccccaatactttgccgtctgcccagcctgcgataacccgatacaaatcatcgggttctataagcgcctgaataacacccctcacccttatggtaaacatgttcctaaacctatacccggtgtgggacattacgatcacgatgcctacctctggtgcccctattcgaaagaaaacacgggaaataacgaggagcgtcccaaacgtgacgggagctatattaccgaacaactcctggcaacactgataacgcacttcgataaagtcgtgtacctactggggaaaaatatcgggatcatatcgatgaaacctaaactggtagaaagtatgctgcgacaatatcggcgtgaggagggatggttgtatgctcgggcaacgttgatgaatgtgccctggacatttgcctatatgaccgactaccaaaagattttgtatcaaacccggctcacctctgtattgactgacacgctggtcagtcaggcacctgaccacctttccgtcagtgaaacaggctttcttatccgacaccctgactgcaaagcgtatgtcgatctcgggatctatttcacccggcaccaccatcaggttcagggtgaaacattaacggaaagtatggactgtgtgtttaccctcaccgtagccaaccagaccaacagagaaattcatcgcatcacgattgattttaattatcagcactttaataacctggcccaccttgaccgctggacagaaacgaccagcggtcagacacaattgcaattggcagaagatatcctcggccccctctgtcattcccgtaaagcaggataa

SEQ ID NO: 447167 - DNA, 246 bp, Serratia marcescens
atgacgaatagcaaagcccaaacaccactgaacatgaacaacgccatcctccaaaatacacagtccccggatgaacagatcgccgagatgcattttgtgatgcgcgatcaatatcaccaatttagcctgccactggagactctgctgttgtgcttgcaggaagctgagcgggaggggggcgttccaccgttgcccgcagcctggtggttgctcctgcaggcggcttatcctgctttacgggaatga

SEQ ID NO: 447168 - DNA, 435 bp, Serratia marcescens
atgggaactcgttacgataccgacgtggtcgcctgggcgaatgaacaggcggcgttactgcgtgccggtaaacttagccaactggatattgaaaacattgccgaggagattgaggacgtgggcaagagtgaaaagcgcgaactggccagccggatggcggttttactggctcaccttctgaagtggcaatttcagccggggcgtcgtggctcaagctggcagcgaacaataaaagagcagcgtaaatcagtacgcttgcgtatacgcaagactccaagcctgaaagtctgccttgcagacgcggaatggctcgaagaggtgtggtctgatgctgtcgccagtgcggcagaagaaactggcctcgatggttttcctgagaattgtgtctggtcttcggttcagatcctggatgaagacttctacccagagcagtaa

SEQ ID NO: 447169 - DNA, 486 bp, Serratia marcescens
atggcgtctcgcggcgtaaacaaagtcatacttgtcggtcaccttggccaggatcctgaagtccgttacatgccaaatggtggtgcggttgccaccctgtcgcttgcgacctccgagacctggcgtgataaacaatccggcgaacagaaagaaaaaaccgaatggcaccgtgtggtgctgtttggcaaactcgctgaaattgccggcgaatacttgcgtaaaggttcgcaggtctatattgaaggcgctttgcgcacgcgtaaatgggcagatcagagcggccaggatcgctacactactgaggtagtcgttaacgtgggcggcacgatgcagatgctgggtggtcgtagtcagaccgataacccggggccctcagcgtctggtagttgggggcaacctcagcaaccgacccacagtggtacaccccctcaggcgtctgccggcaatgaaccgccgatggactttgatgatgacatcccattttga

SEQ ID NO: 447170 - DNA, 654 bp, Serratia marcescens
atgtctttccgtaacggtgttatgagagcatgcaagtttactggcaagtgctttacctttcctttcgtcaagcatcaggcaacttataacattgttatagcaatagtcactgcccttactttagtatgggcagctatgacataccacttgcttgatcagagagaaagagcaagaactgaacttttcgaaattaaagagagaatcaaaaattctgagtctactacagtaaaaattgagacatcattttataaagtttctaagagcaaaaaaagtaaagataattctggatattatttatatccggtagtgacaattaagaatgttggtaaggaaaagatactgcttaaactagataataactccttgacaataaaaaaggttaagctaagtggtgataaaataatggctgaggaaacttataatcctagttattatgaaacggtttcttcaagtgttgatgaaagtagtaaaagactaaagttaattgaagtgccggttgatggtgagagaagtattccgtatgctgttaaggtgaaaaatagtggggtttattatatcactttttcagctagaccatattttgaagagggtaaaagagaagtggatgagcatgagttagtatggttttcggcagagtacaaaaacgttcaataa

SEQ ID NO: 447171 - DNA, 1107 bp, Serratia marcescens
atggctgaatgtacaattttaaacatggacttggatgctaattgttgggttgtaaggcccggtagggattacgaatattatgagcattttatctatagtaaaattgctgcaataggacattttgatgattttataacaaaagaaggggaaatatccgaagatgacttcgcactgttaatgcgtgagtattatacggattctgcaaaaaaaggattatcccagcatacaattagcgctaatgtgaatcaagttaaaaagtttcttttttcaatggagattggtgatttagtttttaccataggctcagggactgttgttgctggaattattacttcaaatgcatatgtttcttatgatgtggtgaatccaaaaattgatgatcgtgaaaggaaagatctgaattttaaaataagaagggatgtaatgtgggggcagtcttataatagagaggtcatacctgatgcagttaaaagatcttttaaagctaatcaagcagtattctcagcatctgagcatttaaagtcaatctatcattggattaatactgtatttattagtgatggtactgtttattcaagttctcgtataaatcaggaagaagatattcatcactactctgttactaagttctcagaggtcttgaataaactggaggctttggcaacccttgtagagttgaattttgaaaatgagaatcttgattctgatatatctctagacgatattaaaaatcagttaaatgcattagcaattgatgacttgctaaatttgacgactcaacagtccttcatgtcacctggtgagtattggactggatttacaggacgtacacgagttgctacaattgccttcacattagcgatttgtgagttattgaatgttaaccctgtgttcgctgacgaaaaagatgctcatatcgcgcaagttattacggctccggtaagtactgcagttcaaaagattaaaaatgataataatatggatattgtaattggtaagttggagcttgaaatgccacgtcaaaataaaagagttgtagagaagtataaaaacattaaggaacaagacttccctgatgtagaagactcagataaaggtactagataa

SEQ ID NO: 447172 - DNA, 1002 bp, Serratia marcescens
atgaaaacattccatagagtaacgttaacaaatttagcggttttttttatagcatttaccgctagcgttgcaaatgctgcttgttctggctgcaatcagactgtaaatctgacgttaaacaatcaattgggcataaatcagaatgttgagggttatacatctagctcgtcatcgttcacagtggggagtataaacacaggatatggcacaagtcaaaagggcacgtcatttactttcttaggcggtgagcttcccaattacggctatgcaccttctagttgggtttatcaaaggatagatgagtatctatctgttgcagttaggctacgtcaacaatgcgggtatatatatgctcctttcaacaggcagacttgggcggctagaacatgtaagccacaggtcacaagcggtaattgggatcctactacttgggattcgtctatacgcgttgatagaaaaatggtaggcggtacgtataggaaaaatattttgctgggtacatggggggagtgtaatggtagtagttgtcagtttcaagatcaagtatatgcaagggtatatctgaactataatattacagtacctcaaaactgtgtaataaatgctggtgaagtaataagtgtcgattttgggtctttaccatcaacagctttctattcacctggtgttaaggcaaaaaacgttaatcctataactcgagttgttagtatgcaatgcaataatatagaaacacaaacaccagtgcgtttgagagtagaggctaatctagcatcaggaaatgcaatagtatctgataatagagatgttggttttgttatcggatctaatgatggaaaagagttaaccccaaaccttttctcaagttatattccttttagaacaagtaacgaagggggtacctcaagtgtacctatagttatctggccagtgagtgttacaggtagaactccaaatgaggggccggttaccgcattaggttttctgcgggttgactttgactaa

SEQ ID NO: 447173 - DNA, 507 bp, Serratia marcescens
atgaaagtatatgtggttgaattatttagaaatttttttaatttttcttttttgttgcttgtaattacctatagtggttttttgcatgcggatttaggtagaataaatataaggatgtcagccaaaattgtctccccgacatgtataattgaacctggctccaaaaatgttgttatcgatctgccagactatcctggagaggccagtatccgccttaagctgacttgtccgtttgatcgaggagtcaaatacaccttttctggtagcaccacaaatgcagaaggtaatattttcaccaatacaagcactaactcacctgcgcagggtgtgggtatacaactatcagataggcttggggtaatcaaagtcaaccaagaaagagaattgggaaccgtaggatcacaaggaagaaacttggatctaactgccacttatgcaacaactggtgccaagatacaagctggtaatgttcaatctgtcgtaggccttacgttcatatacccttga

SEQ ID NO: 447174 - DNA, 354 bp, Serratia marcescens
atgggacgttcaaaacctgtgacgattggtcagaaggaatttaaatccaaaacagccgccgtggactatttcatggatcagcgtgaagccgtcaaagcagtgagccctttgaaagagggcgagttgtttgatgaattgcgcgacctttatctgcgttactgcaaaatcacagactatcccctgggcaaccgggatatttacgcctttagtgtggattatgcaccccgtcataccaaccagaactatggctcgtatctgtgctattgggtgcagttttctccaaaggaaaaattggctttttcgatcaaggaagcagttgatgagatcgcaaaagctgcaactgaacaacggtag

SEQ ID NO: 447175 - DNA, 204 bp, Serratia marcescens
atgaagatgaaactgggacaacataagcagctgaacccggctctgcaggcaattcatgcaccaaaggggttgaccaagaaactgcagatgaatatcgacgaagagctacataaaagatttaagctagcttgtctgaagcaagataaggaaatgaccgagattactatagagttgataagtaactggctgaaggataatgaataa

SEQ ID NO: 447176 - DNA, 291 bp, Serratia marcescens
atggctgctgttgagactgcacaatttgcgcgttactttgaattattccccgagttgacgccgacacaagcaatgacctgtatcctgtactccatgggattggccatcacgaccattgcagatctgcgcgacgtctcaccagagaccgtgcgtaaagtgctgcaggaggcgcgtcaaaaactcgaattatccaacctggttgccgtcaccagcgccgtccaggtgaggctcactatggcaatgatggggattaaaattaatatgcaggatacagatatccaagtcgcttaa

SEQ ID NO: 447177 - DNA, 1176 bp, Serratia marcescens
gtgaagaccaattttaaccaagtaattaaccgccataacaccggctcggtgaagtgggactttatcgagcactatctccagttggatggcagcgatctgttacccatgtgggtttctgattttgacttcaagtgcccccctgaagtccaaaatgcactgcatagccgggttgaccacggcatatttggctacagcgaacgagacgatcactattaccaggctaccatggattggttcgcaaagcggcacaacctgcagctgaagcgagaatggtttacgtcggtcgaaggtgtcgttcccggcctggctctccttattcagatgctcagtaacccgggcgatgccgttgtgatacaagggccctactacggatcattcgccaagatcattaccatgaacggtagaaacgtcgtcgagaatccgctgacagaaagccctcagggatatcaattcgacttcgcccagcttgaaagctgcttccggcaacacacgcccccgctgttactgttgtgcaatccgcacaaccctaccggacgctgctggacacgtgacgaactgacgcagttgatgacgctctgccgcgcgtatggcgtgaccgttatctctgacgaaatttgggcagacctgctgctgcccgggcaggcgttcacatcggtcctgcacctggataaggactgccaggaacaggtgattgccgctaccgctgccagcaaaacgtttggattgtcgtcactgcggatctcgaatttcctgatccccaatgcccggatgcgaggggcgttcatcgaccgcctcaacgcccatggtttggatgtctttaatgcgctgtcgatgacggcagccactgcagcttatcagcacggcgaggcctggcttgacgatttgcaacgctatctggctgagaaccggcgctggtttgagcaggcgttaggctatgccgcaccctggtgcaaaatgacccgggcggaaggcacttaccttgcctggctggattgtcgcgccctggggttggatgacgatgccttacaacaggcattgatccacacatcgaagatcgcgccctcgatgggccgcagcttcggctcccaggggaagggatttatccgcatcaatctgggctgccctcgtcagtaccttgaagacgcaatcagagggttggccaaacttcccccttaa

SEQ ID NO: 447178 - DNA, 453 bp, Serratia marcescens
atgggcgttttcaaacgcgagcctctacaattaacgttgaccggcgccctgaccatcatcatcaaccgtctgctgaaggtggtacatacgaccggccaattgattgccgccaccgtcgcgaccactatcctcgtaaccggcgccaccagtgacgggaaacttgccctgcttataccggctgagctgttcaaaggcgcgtatcgccgcatggggctggatactaagaacctgtcacgaactgttgaagatgccggcaccgtcatcgagccgctgatcccatggacggcggcgggtatttatatggcgacaaccctgggggtcagcacgctggatttactgccatgggcagtccaatgctacgccgccgttgtgtttgcactgatttatggcttcaccggcttcggcattgccaggacacagcctcaaaatgacctgcagcagaaggatgcctga

SEQ ID NO: 447179 - DNA, 960 bp, Serratia marcescens
atggccagccggcgtaaggttatccctgcggattcgttgctgcaattgcggcagcggcttgatcgtctgcccctcaaaagccccgaacgggccgctcagattgcgtctgtcgccgacttgtacggcgtttcagccaccacagtctatcgggctctccggcgtgacctgaaaccgcatgccgcccaccgacgcgatcatggcaaacccagggtgttgtctacctctgagctggagctgtattgcgagattattgccgccctgaaactgcgtactaccaacaaatccggtcgtcacctgtcgacgtccagagcgatacaattactcgaagagcatggggtcgaagttggtcaggggctgctcaaagcgccaccaggattgctacgtcgccagacggtggaccgttacatctcccgttttcgcctcgaccagacccgtttattacgggaaccgccggccgtcaggtttcaggcggaatacagcaatgactgctggcagttcgatatgtctccgtccgatctcaaacatatcgagcggccagaatgggttgatcccgccaaaggcttaccgacgctgacgatattcagcgtcgtggacgatcgcagtggcgtcacctatcaggaatatcgatgcgtttacggtgaagatgccgaatcggcattgcgctttctgttcaatgccatggcaccaaaatcgcttccggaacctcatctgcagggacgcccgaagatgctgtatctcgacaacgggcccgtggccaaaagccgggtattcagtaacgtgatgcgggatttgcatattgactggcaaacgcatacccccacggcacccgcaccacggctcgcgccaaaggcaaggttgagcgaccattccggacagtcaaggaagcgcatgaaaccctttaccacttccataagccagaatccgagcaccaggccaacgaatggctctggcgttacttga

SEQ ID NO: 447180 - DNA, 447 bp, Serratia marcescens
atgaacacacagaacgtcaacatcaacgtcaacaccgccacgaaggaacactctgggagatatgaaacggcgggattgtgcgaaccagagaccccggagccgtgggaaaagccctgcgtgcaatatcctgctgccgtgcgcgcgttggaaatggagtttatttacttagacgacctgaatgacctgtatgcgcaaagcagcacgtcacccgacgagctggagcaggctctctatgtgattttcggccgaatgacagagcttgtccaaagctgcggggctgattataagcagcctgacaagccgagggttgcatacgagatggccaaatactggatcagggggcaacgggtagcgcagcaatgtttcggggaaatcggtcagcgcgcctgggagcatgcacgttacagactggcgttcgagttggcggtggagtattcgtacaactga

SEQ ID NO: 447181 - DNA, 474 bp, Serratia marcescens
atgaagacgatcagaccggagatttttgagaagcttcaagacaagtcaaccgcggcgaaatacctgcagcccggcaaatgtggttttcatactgcgacaggttcccgccgattgttcatcggggagacaactcgccaatactggactcgcgaaaagtatgaaagccccgaggtcgggaacacggaagcctatgtaaactacagactcgaccaggcatccggggatcttgctccggaggaaagggaggttcccgtttgcctgaagggggaggaaggggatgagcatacggcggtgctttgctatatgacgttgccggtgaagaaggagggggttactactgaggaattcctggcggaagtcgaagacaagctgacactgacgctggccgttcggtatgtctatgattgcctggaggctgaacggcgagagtgcgctaccggcgggtctgatgagattatcatcaatgacttctga

SEQ ID NO: 447182 - DNA, 348 bp, Serratia marcescens
atgtatcaaaccgaaatcagcaccgaaaaccgcatggcatgggatgcgagcaccgaggccgcatattggcaactgagggagcaagaagcgcgcacggaaatagcggagatcacattgttggaatttatggacgcgatcgcggtgttgtacccgaaagactgggagggagatgcgcttagcgaaactttcaagctggccgaaatgtattgcggggacgttacctacattttcgccaaagtcggcgatcgctattttaagttccgtgacgtggtgacgttatcgcacagcgccattttggcgcggatcaataaggaggtgctaagtcgggaaacgaagacccagaaatga

SEQ ID NO: 447183 - DNA, 288 bp, Serratia marcescens
atgaacacacgaaacgtcaacgtccaaaccgccacgaaggaacactctgggagatatggggaaaagatcatcgctgatttggattcgttgcggcagaaaacaagccgggcgctgtttaagtttcagaagaatgcgaacagaaatgcactcggcattcaaacagctgcgttgagccaggaacttgaaaaattggtgaagggaatgccggccatcccagaaattcaggaaagagtgaataaggtggtcggactgctgcacgttatggaagatttttcagcccagttataa

SEQ ID NO: 447184 - DNA, 855 bp, Serratia marcescens
atgaaaacggataataacaaagtcattgtaattggacaggtggtgagcacaaatctttatgggttaggtaaaggcgtggtgtacgcgatcagtggtgagcaatcgtctttcgggcaaggtaaagagctagacggcgttatctatcgtaccgcaagtaatgcaaaatttgatattgcatttttcaatggtgaggttagcaacaatctaccggaaagcattttgcgaggggtgcaatggactgttcatgatgaggtcgcgacactcgaagcagtaaagatggcttgcgaatattcaaaattggttgcagataagaaggttgaggatgagcgtaaagaaaaagaacactttgcccaggaaaaggaaagaataaaaaacctgccggaatatcaatccctgcaaagcgaaaacctgggaggaaagggggtagcaatcaacataagaagagagcttaaagccgcatacccaaaaacgaaattttcagttcgtacccgtgattatgattttgtaaacataagctggacagatgggcctacagaaaaccaagttaaacaaataaccaacaaatacaagaatggttcttttgatgcaatgcaagacatgtatgaatacagcagctcaccatttaatgatgtcttcggcggcgcaaagtatcttttcaccgagcgaaccatgtcggatctgttgatagcaaaagcattagaagttgctttagaaaaatatggaagtgaattgatcacagatgaatgcactgttacttcatacagagagggtcgtttgaatagctttagaggcgactttttcgagcgtgggctttcttatgaaataaatttgatcgcgaaaaaaattgcgctataa

SEQ ID NO: 447185 - DNA, 837 bp, Serratia marcescens
atggacgtgaggtttattttggttgggatagcaaacaacaagatttcctacaagataagagatggaggggcagtattttccgataacgtagactctatcctacataaaaatctagtagacttcttcagtgaagaagacaagagcaaaatactagcgtcatatgggatatcagatgctccagtattccttactaaaggagagtctatatttactatactattaacactattcataacttgcttatttgtagcgatccctctatctcaaacaaaagtagcaatattatcatacatccaaccaggcggaataataatcttccctattacatttgtttttcttgattcaattaatgagatatttggaagaaaaaagggaaaattggctattatcacggcctctgtatcgctagccattgcatcgatttttatatttttcagtttaaaattaaaaggagttgaaacagtaagtcacgccaattttatcgcagtgtatactaatctaccaaggttacttttgataaactcaatatgtgtgctgttagcagacaacttcaacaacattatttataacaacctaaaagctcatttaagagggagctacttattatttagatgttttatatcaacaattataggtcagctagtttattctattgtatggatcttggctttttaccatgataagctagaatggaacgaaaaaattacatacattttaaataactatgaattcaaggttattttcagtttgatcatttgcgccccactcactttatttacagtttggttagccaaaacatatatatatggagctaaaagaaagctcgtggtacattga

SEQ ID NO: 447186 - DNA, 585 bp, Serratia marcescens
atggctaattccatacaagacagattaaacgaagcgctggtagcaagggggatgactccggctgagctggctcgtgctgtcggagtaagcaatggttacatatcaaaactgctatctggttatatttcgcaacccaaaaagaacctatcagctatatgtactgctctgagaattaacgaaagatggcttttaaccggaaaaggggaggtagaagtcgatggtaatgacatcgtcacttatccccttttacctgtttacgaaacttttaactcagagaaaaaagatgagttatatagcattccatgcttaatcgaaaataaaaagaataatttaaaagcatacagagttaggaaaacagacattttcaacgcagaactaaatgttgtcgttgacaagaatggagatggttcaggattgtttttaattacacatgaaggaaaggctttaatatctacacgatttgattacgtagctaagtctgagtggattcataacactaacaaagaaataaataattgcaacttcactgtgctagggaaagtcgttcaattaacatcaatagacgaggatgacatatggacgtga

SEQ ID NO: 447187 - DNA, 528 bp, Serratia marcescens
atgaatcatgaaactataaaaaaagaagcggcacaactgaaggacattgttctaaatggtgaattgactatcccatcgttttgggactgtgtatggccagggttggctatgatggcttggatcattatttgtccctttgtgacatttcaactttatatcgatatatctagagatgaactcgaagctgtgggcgcagggctttttgttgggttaatatttacctttggggtgttcaatgtgaggtctatatatctggcagttccccgaaatttcagagaaaaatcgattttctttcggatgattagtaaaaagctgattacctattatgtcatttatctgtgcgtggtggctttcgcctcttatttggctacttatacaaattggaaaattatcttttatgtaccgccactcttaatcgctaacgttttcattatggttattgctgcaacagatttaggacgttaccgcatgtccgcgttttcctctgtgctggagcttatcaaatcccgcaaacagggaggtgagtaa

SEQ ID NO: 447188 - DNA, 291 bp, Serratia marcescens
atggtgcgctattatggttttttggccaaccgcaagcgcggttcgctactgccgaaggtctacgaagcgctggagatgacggtacgggaaaaaccaaaacgtcccgggttcgcggtgctgatgaagggcttcctgggtactgatccgtaccagtgcatcctgtgcaagggccggttgcgctttaccggtgccgtggcgggcgagcacgccaccaaactgctctcggacaggctgcagcagatggcgaaaaaacgatggcttcagacccccgctctggatcaatgcgtctga

SEQ ID NO: 447189 - DNA, 936 bp, Serratia marcescens
atggagtacgagttagatattaaagagaacgccatggacagtttgaacgaggcgttagcaaagtacgagcttggcgaacaaggtgaactccgtcagtataaattcgcaatattgcatttttcccatttcttagaactcattctgaagctttacatctcatcagttgacgaagcgctactgtttagcaagtgctttcggtatgtcgaaaagcgtgtaaaacaggaccgttcgaacctgcttcaggcctatgaagccttatgcgacgaaggggaagagttaagcgaactgttaaaggatgtcccttatccgcatacaatcaccctcgatcaggccctggaatttgcaaagtgtgaaaaatgcagcatcacaggggtagatttcgttgatattgatttttgtaaggatatcgaatggataaaagggttaaggaacaacattgagcactaccagttcaggctatcgccaaaggaagcaaggctttgcattgggcggttagtacgaagtgttatcgagtttcttgatgtttttgatttgtttgatcttgaagatgaggtagggaaagggaattataaaacattccatatccttgcggatgagtatactcatatgcttaaagaggcagaaatggacgtcgcggaaagaaaagccaccgtgttcagaggtgttcgtccaaaacattatgcattgattgaatggaatgtctatgagtgtccagaatgctcaaatgatacgctgatacctgctgacgattcacctacgggctatagatgtacattttgctcaaatgaagacagtgatgagctggatgtatattgtgactgttgtggagtgccagctcctgctgaggatatggctgtctggcctatggatgatggttcacttgagtatcgatgttattattgttcggggcgacatgcagctgataaagatgattaa

SEQ ID NO: 447190 - DNA, 786 bp, Serratia marcescens
gtggctgaggataaaaatgaaaccactcaagcattaggtgtaattcctttgctggatagattgtggcgatttaacaaagtaatgacgctgggttattgtttcttattccttgatgcttttttatcatatggtaagggatatggtgtatttgctttgtcatcatcaaagttatcagattttaatcttggtgatgtttgtttgtttttgcttttatttggtttgatatcctctctgggattggttttcctcgagggggtcgtatttgctattttgactgagttgagggtctatcgcttatttccttatgatggaagtgataaaaggaaaagctccggttatgtctacattggtgatttacgagaatatgccatgcgagaacaatctgagttggcgtataaggagtataaagaggtcttcggtaagtggtatgatgagttggtaaatttacacgaagcaaggcgtgtctcttttggttgtttgtttctatttgtctttgggtggatattgtcggcatttaacggttcaaaaggagtgtttttggatggggtttactcctttcttgatttaagcgtatctcattttcttctagggtgtattgttttcttggttttgcttgtggtttatcttgttttttacgggagggaggttaatagttccctttgggtctattacccacctttatatgatctgaaggtaaaagaagaggaggaaagacgagaaagagaacggaaaattgaaagagaaaatgaaatgaataaaagaaagctaaaggataaacagggctga

SEQ ID NO: 447191 - DNA, 963 bp, Serratia marcescens
atgcgccttgtcgaattcgtcgagcagcacgatggaataaggtttgcggcgcaccgcctccgtcaacttgccgcccttgccgtagccgacatagcccggcggcgcccccttcagcgtggagacggtgtgcgactcttgaaactcactcatattgaagacgatcaggttatgcgcgccgccgtacatcgcctccgccagggcgaacgcggtctccgttttgccgacgccgctcgggccggacagcatgaaaacgcccaacggccgatcgtgcgcctggatgccggcgcgggagatcctcaccgcctgcgcgatttcgtcgatcgccgtctgctggccgaaaatctggcgactcagcagttggttgaggttgagcgcattgtccagatcgctttgcagcatgcggccggtggggatgccggtccaatccgacagcacctccgccacgacgcgatcgtccacccacggatacaccagcggcaggccgccgtcttgcagctcgcccaactcggtggccagctgcggcaaacgatccggcgactgctgctctgcatcgagcaaggtggtgaccgcctgctgctcctgcgcctgccgctgacgcagcgcatccagctctccttccatctcgctgagcgtctgctgcaattcgctgatgcgggtgagcgccagatcgtcgaatttgctttcttcctgcaggccgtgcatttcggtacgcttcaccgccagcccggcctcgagcgactcgattttttcaggctgcgcatgctggctcagcgccacccgcgcgcaggcggtgtccagcaggctgatggctttgtccggcagctgccgcgacggcagatggcgcagcgacaaatgcaccgacgcctgcagcgccgactcgcggatcttgacgctgtggtgctgcgcaaaatgcggagcgatggcgcgcatcatgttcaccgcattctcttcgtccggctctga

SEQ ID NO: 447192 - DNA, 918 bp, Serratia marcescens
atgcgcaatggcgtcgatcagcgctttcaggcgcgattcgaactcccctctcatgctcgctccggcctgcatgcggcccagatccaaagacagcagccgtgccccctgcagcagcggcggcacctgtccttgcgctatcttgcaggccagcgcttccgccaccgccgttttaccaaccccggcttcgcccaccaaaatcgggttgttctgccgacggcgcagcaaaatgtcgatcacctgacgcagctccgcttcgcggccaatcaccgggtcgatttcaccgtcgcgcgcctgacgagtcaggtcggcgcaccatttatcgagtatctcgaccgtctcggacgcatccggcgcctcgccgtgggcgttgtagacttcctcttcctcttcctcctgttcaacagactccgccagaatcgccgggtaatcgtcgaacagctgcgggatcggcagctttttgaactcgtcgctcagccggtacaggctgcgctgcagcgtgggatcctgcaaaatgccgaccagaatatggatggtgcgcacgccgccggacggcgtttcggcgagctgactcatcagcagccccctttccaccaccgtttccagctgcgtcgacagatccaccaccgcattcgtccggtttggcaaggtatgcagaatgcgatccaacgcatcgctgatgcgctgaatattgatcgcgtagtgcgccaggatcagcggcaagtcaccgcgttctttgtccaccagaactttcagccagtgttcaagctccacgtattcgtgcctgaaggtccggcacagcttggttgcttcaacgaaggactgataagcaaagtggcccaatcgcgaaaaaagacgttctcgttgatacaccttaaatttccttatattaagttgttgattgataaaccagctgcctaa

SEQ ID NO: 447193 - DNA, 1908 bp, Serratia marcescens
gtgggaaaagttcgcctgcatgcccgccgtcaggctctcgacgcggcagcgttcgaagcgcacgccgcgccagttgccgccaaggaacgagtttttggtgagcgtcatctccagcgcaaccgcctcttcggcgaggcagcggttaaacacgcacgcgtccagctcgccttgcagaaactgcgcgcggatcagcgtcgcgccattaaacatgccgttgccgatcgccgcgtgttcaaagcggctcgcggtgaaatcgccccgttcgaaaacgcagttatccagcttcacgtggtcggcgcgcagcccttgcccctgaggctccgccagcgtcacccgttcgaagaccgcctcttgccacacgctttccgccagcaacggcttttgcagcgtgcacgagatcatgcggatctggcgcagcgccgcctgcgtcaaattgaccgcatcaaaaacgcagttttcgaaggtgcagccgtcgagggaagcctgcgagaaatcgcagcgctcaaagcggcactgcagaaaatgccggcccgacagcgcctcgcagcgcaaaccggtgaaagtcttcccttccacggtcgcgctatcggggaaaaacgcgtcattgccgtcttcagcgggaagatccggcaaatcgggcaacgtcacggaagcgggctccgccgccgcttgttgctggtgcaaggcgatcgcctcgcggatgcgttgatagaacacggcggaatcgcccagagaggtgggcgacggatcgtaacgcaaatcgctggggtgatccgacaccgcctggatgacgttcaatcccatctccgccggcatcagatccggatcgaacagaaactcaaagggcgaggcgtcatcgtcgctgcgcttgcggaagacctgttggaaatagtcgaacgagcgcggcgcatcgcagcgatccaacgccagcatgacggactcgatggactcgtccagcagatgcgtcaacggcgcattgccggtgaagataagcaaagcgatgtcgctgtcgggcaggaaccacagcgttttgcgctgcagctcgatttcctcgaggctgtcgctatcgtgacggcggatgaacgcccgtccgcgcaccgccggcagctcgccgcgaatcgcctcgctttgcgcgccgacgccctgcagctcgaagggcacccgatccggccacgccgcttccggcaaccactgcgccggcggcgccatctggaaataacgccgatcgatattggccggcagcccggggaatgccgtctcgagataggctttgccggcgatctggcccgccaccttatcgatgtgcgccttgcgcagcgcaaactcgtgcggcaccggcgccggcgccgccagcggagagcgctcctgcgcggtcccctcggcggacagcgtcatcagcagcggccgcagcccgtcattgcagccgcggccaaacgggttctccttgttgtctttgccgccccaggcggaggtgtgatccagcggcacgctgaggaagggttccacctccatcgcgccgcgccgtccctcgccctcgacccgccaacggcgcttcagcccgccgatgtcggcgctgacattcagcgttttcaccggctgaccgatgccggcatggccggcgatcaggtattcggcgaacggcttcggctcggcaacatccaatatcggcaggctgagcggcacgcgcttccacgcctcccagatttcggcttcgttcacgaagtgctcaggccgggacaggtagcatccggccacgacgctgatgccgagccggctgtctgtcccgatctggtaacttcctttaatcgccaccaattgctgtggccgtatgattctcattgccgcgcctcgttagtttttgctttgcatcccgacttttttcaaatcgacgccggtctcggacagtga

SEQ ID NO: 447194 - DNA, 1386 bp, Serratia marcescens
atgcttgtccgacagcgcagggctgcgcaatccggtgaaggttttcccctccacggtcgcgctagcgggaaaaaacgcgtcattgccgtcttcggcgggcagatccggcaaatcgggcagcgtcacggtagcgggctccgccgtcgtctgttgctggtgcaaggcaatcgcctcgcgaatgcgttgatagaacacggcggagtcgcccaaagacgtgggcgacgggtcgtagcgcaaatcgctggggtgatccgacaccgcctggatgacgttcagccccatctccgccggcatcagatccggatcgaacaaaaactcaaagggggaagcgccgtcgtcgctgcgtttatggtgcacctgccggaaataatcgaacgggcgcggcgcgtcgcaacgatccaacgccagcatcagggactcgatggactcgtccagaagatgcgtcagcggcgcattgccggtgaaaataatcagcgccatgtcgctgtcgggcaggaaccacagcgtttttcgctgcagttcgatttcctcgaggccttcgctatcgtggcggcgtatgaatgcccgcccgcgcaccgccggcagctcgccgcgaatcgcctggctctgtgcgccaacgccctgcagttcgaagggcaccctatccggccacgccgcttccggcagccactgcgccggcggcgccatctggtaatagcgccgatcgatatcggccggcagcccgggaaacgccttctccaggtaggctttgccggcgatctggcccgccaccttatcgatatgcgccttgcgcagcgaaaactcgtgcggcaccggcgccggcgccgccaacggggaacgctcctgtgcggaaccctcggcggacaaggtcatcagcagcggccgcagcccatcattgcaaccgcgccccaccgggttctccttgctgtctttaccgccccaggccgaggtgtggtccagcggcacgctgaggaacggttccgcccccatcgcgccgcgtcgtccctcgccctccacccgccaacggcgcttaagcccgccgatgtcggcgctgacgtccagcgtttttaccggctgcccgacgccggcatggccggcgatcaggtattcggcgaacggcttcggctcggccacatccagcaccggcaggctgagcggcgcgcgtttccacgcctcccagatttcggcttcgttcacgaagtgttccggtcgggacaggtagcatccggccacggcgctaatgccgagccggctgtctgtaccgatctggtaacttcctttaatcgccaccaattgctgtggccgtatgattctcattgccgcgcctcgttagtttttgctttgcatcccgacttttttcaaatcgacgccggtctgggacagtga

SEQ ID NO: 447195 - DNA, 843 bp, Serratia marcescens
atggtgtcgcgttcgctgcgttcaggtaagccgcagcatgccagccagctgaccttcgatgacaaccgcaacaacgaacgcgtcatgctgcacgccgaacgcgatctgcaaaccacggtggagcgtaataaggcctcaaaggtaggaggagataagtttgatgtggtggataacacagccacagattggtttagtaagcatgtgtcctataaggattttaattttagcataacaggtttttcagcttcagttactggaataagttcttctcagacagggataagcattagttcaactggtacgagcacctcttgtactggtatgagcacttcgtttactggtttgtcttcatcttttacagggattagctcttcatttacaggattgagtaactcgtttacggggatgagttcgagctgtgttggtatttctaattcaatgactgggttaagcaattcatttacgagtaacagcaatagcatgactgggattagcaatagcttcactggagtcagcaccagccggacaggtagcagcaccagctttaccggcgtcagcgtcagcactactggatcgtcgaccagcactactggttcttctatgagtactactggctcctcaatgagtaccactggctcctcaatgagtacaactggttcttctatgagtaccactggctcctcaatgagtaccactggttcttcgatcggcactaccggcagcagcgtcagcaataccggcagcagcaccagtacgacaggggtgtcgatcagctacaccggcgcgtcactgtcccagaccggcgtcgatttgaaaaaagtcgggatgcaaagcaaaaactaa

SEQ ID NO: 447196 - DNA, 447 bp, Serratia marcescens
atgaaagcgtcattgcccatgctattcgataagctcagcgtgagacatcaaagcgccagcgccgataattggcggcgtgttttggtgcgtgatatcgaatttttactgaatgacgcatcgcgcagcgctgatttgaaacttcatgattatgcgcacagcgaaagttcggtattgaattatggcctgccgtcgctgagccaacgcataccgattaataccgatccgttaacgctggcgagacatatacaaagaatcattacttcgtttgagccgcgtctggatccgaaaacgattcgtgtggtgcctgtagtgaatgaacgccaatcgtatgtgctggcgattttattcgatatttatggcacctgctcattaccgggtgacgaaatgctggttaatttgcgcatagctcttgattattcctgtggcgccgtacacgtatttgattaa

SEQ ID NO: 447197 - DNA, 525 bp, Serratia marcescens
atgagcacgaaagctttagtagactattttttgaaaattgagggtgttgatggtgaatcacccgaccaaacctaccctggctggattcagctgcaagcctggcaatgggcggaagaaaacgccggccgttgggggttcgggagcggcggtggttcaggcaaagtcgagatgaaagactttgagtttcgcatggtgagcaataaggcttcgccgaaactgttcctgatgtgcgccaccggcgagcatattcctcaggcaaaacttgtttgccgtaaatcaggccagggtcagcaagacttcattgccgtgaccttcagcaactgcctggtttcctcattcaagaccgtgggtaatatgccgctgaattccaccatcggtactgaaatcgataccgtgctgccaaccgacgttatcaagctgaatttcgcacgtatcgaagttgagtacaaagagcaaaacaatgatggctccatgggtgcggtaattaagacggggtatgacctcaagcttaatgcccgtatctga

SEQ ID NO: 447198 - DNA, 777 bp, Serratia marcescens
atgccgcgtttcctgtcgcgtttgccttatggggcgaaaaccaacccgatcgaagagttcgctttcgaggagtctgtcaggccagatgtggatgatgatttttcctgggccaactcggcgtatgcaatgggcgtcaacatcaaccgcgcgttccatgagtacggctggtgttcgaagattcgcggcatcgaatccggcggctcggtggaagaactgcccgcctacgcgtttccatccgatgagggcggatatgaactgacgtgcccgacggaagtggccatttccgatcggcgcgagcaagagctttccgacgccgggttcttgcccctggtctatcgcaagcattccgatttcgccgcttttatcggttcttgcaccatgcacgcgccggcgaaatacgaggatcccgacgcgacggccaacgccaagctgtcttcgcgcttgccttatattttcgccacgtgccgattcgcgcactatttgaaatgcatcgtgcgcgacaaaatcggttcttttcggtccagggacgatatgcagctgtggctgaatgactggctgatgaactacgtcgatggcgatccttccgtctcgaccgaggcgaccaaggcgcgtcgtccattagccgccgccgaggtgcgcgttgaggatgtggaagacgatccgggttattaccgcgcgcatttctatttgcgcccgcattaccagttggaaggcatgaccgtgtccttgcgacttgtatcaaaacttccgtcagccaaaaaagatgggagcagataa

SEQ ID NO: 447199 - DNA, 843 bp, Serratia marcescens
atggcgctgataggtcttttgcgccgcgctgttgatcagcttgtgttcgaaataaggattcggcaccggcgaaacctcgccgcccagctgcgcgttcatgtatcccagctgttcgtacgcggaaatgacgtcgtcgctgacgcggttcgtgaccggtatttcgcgcacgatgcgcttcgtttcgtcaaagcgcgccgcaatgtaagagatgtaatcgctctcccacaggtaacgcatcgccagcaggttaaaagagaccgccagcagaatgagcaccagcacataacggcccagggagctcatgcgggtgccgagcggcctggcgtgagaggactgctgcagcaccccgcgctcctgcctggcgtaattcagctccgggtgataaatgcgcccggtggggcgagcttcgtagatatccgccgcttccgcgttgtaaatcgcgccctgcggcggcaaggcggtggtgctgcccagccatacctgctgcaaatggcaggcatagcccaccggcgtttgcgggaaaatctgctccagcagcgaatacagcgggttgcccagcgatcccagcgactcggtgaagaacagcagctgttggcggttttggccgtccggcgcatcgtgcagcagttcgagcacgtgatggctgacgcgcgccaccatctcccggtagagggcctcatactgctcgaacggagtttctccctgttcggcccggttcaggctgaaccccatccctttttgcaacaggtcgtcgcccagcatggacaggaaggtctcgccgccgaccagctgatcgaggtggctgatggtgagatagaccggcagctcgcagcggaaccatga

SEQ ID NO: 447200 - DNA, 207 bp, Serratia marcescens
atgccggtattgttgggcgcggtattcgggcccggcgccgggatcatcggatcacagccggcaaagctgatcccggccatgttgttattggctgcggtcatggtggtttaccccatatgtatctggccgccgtcgatcttcagcaccgccgaagacttcagggaaccaatttcactgttgatgacgagggattgccgcgcatcctga

SEQ ID NO: 447201 - DNA, 576 bp, Serratia marcescens
atgtttggccaaagcggcgcgatgcagcagttcttcgatgagaacctggccccttatgtggacgtcaacgcgcagaaatggaatgccaaaccgggttcagaggggatcgtcaatgccagcacgctgggcgcgtttgaaaatgcccgcttgattcgcgacaccttcttcaccgccggcgacaaactgtccttctccatgttcatcaggccgttgtccctgacgccgaccattacggaagcgaccctggatatcgatgggcaggtgattaactacagccatggcttcagccagcctacccgtatcgattggccgggcccgaaaggcggcagctatgttcgactcaccttccgcaccggcaccggccagatccaggtcgccagtttcgacgggccctgggccttgttccggatgttcgacgccagcaatcccgtgccgctcgccagcgacaggcgagagctgacgatgtcgatgtcgtcggtggtgggcgtgctcaaactggaattgcgctcgacgatgaaagatttcccactttggtcacgggcgttgcgaggattctcgtgcccgaaagcgatgtaa

SEQ ID NO: 447202 - DNA, 498 bp, Serratia marcescens
atggaggacggcgagggccgcatgatcagcttccgccagtgctttattttgatgaccagcaacatcggcgccggtgaaatagaagcgacgctggcggaaacgccggagctgaaaaccgaggcgctgcgcccgatgctgcacgacgtcttggcgcgctttttcccggcggcgctgttggcgcgcatgaacgtcattccttacgtgccgctttccaccgaagcgataacccatatcgccaccaaacagatttcacgtttacagcagcgtttgcacaaagaagtgggcgtgtcgctggtgctggagggcgacatcccaggctggatcgccaaacgcatcagcgcccatccatcgcgcggaagagcggtcgagtcgctgctgcagcaggcgatcttgccgccgatcagcaatgaagtgctgcagcgcaaacggacgggacaggaactgcaaaatatccaactcatggtcgagaacgatagcttaagtgtttatttcgactga

SEQ ID NO: 447203 - DNA, 156 bp, Serratia marcescens
gtgtggggcgtggtgaccggggtgatcatctttaccgtcatcaactacggcctgacctatatcggcatcaacccgtactggcagtacatcatcaagggcagcatcatcatcttcgctgtggcgctggactcgttgaaatacgccaagaagaagtag

SEQ ID NO: 447204 - DNA, 156 bp, Serratia marcescens; identical to SEQ ID NO: 447203

SEQ ID NO: 447205 - DNA, 339 bp, Serratia marcescens
atgcgcgccatcaagcctcgtctgcaattttacgtagagaacaccctgagcgaagacgatgcgttgctggacgtggaattggagtttgaatcgatggatgacttcacgcctggcgccatcgccaaacgggttccgcagatgcaacgcctgcttgaagcccgggaacatctcacggagctgatcacctatatggatggtaaatccagcgcggaagaagtggtgaagaatctgctggagaaacccgattttctgcatcgtttggtgacggatgcgcgtaaaacggtcgcggatgcggaacaggatgtgcaggattccggcaataaaggagatgaggaatga

SEQ ID NO: 447206 - DNA, 423 bp, Serratia marcescens; identical to SEQ ID NO: 432410

SEQ ID NO: 447207 - DNA, 1209 bp, Serratia marcescens
  misc_feature (1138)..(1147): n is a, c, g, or t
atgacatggaatggaactcgtattgacctgtttatttcagcttatgatccaggctcaccagcagtaccaggcgtaggtggtaacgcggcaagcatcactgcatctgcatcaccaacaacatacgacttcagcgctaatccactttcatttacattgacatgggctggtgtgaactatgtcatttctttgacagctaactacgtaactatgtcgggtctcactgatgagatggatgatcaattatcaggttcaggactggaagttgtagcgatagatacgaaggtagtgatcagggaaaaggaaagcccattcagtggaaacagtattggtttcagcgtactgccttcagttttgtttggtaccgatcctgttattgtggccggtacggcatcaacaggtggaacccccgctgttatggagcacattgctttatcatggggaagcgtgactggagatccattcattggacttccaaacggatcccaacgtatagcctttggcctacggggatatcgctatcgtataactaacattgatgggcaaaccatcagcgttgagagactaattgaaaattcagatggctcaacaacggtagatccctcttggcctgggtttaccgggcgcacgttgttggattttacagtcactggattgagtgattcctatgactggatggggcctttcctttgctgtccagaaaatgaaacaacgactcaaatagagctaaatttcgtctatccacaggggttgtgcgatgtgggaagtaaagacggagccattcattggcatgacgtagcgatgaccgttcaatatcgtttgtcaggttctgatgactggaccagcgtacaaataaagcatggaaataacacggttaatgaggttggttacaccgaggctatcacttttcctgctcccggaaattatgaagtacggattaagcgagatacgccagtatggggtggtactactcgagactccctccagtggcaagcaatgcgcgctaaactttctgctcgcaagaccagttaccccaatgtgacgacgatcgcgctaacaattcgaaccggaaaccgtttggccgctcagtcagaccgccgcgttaatcttgttgcaaccaggctctatgacgggcatgcgnnnnnnnnnngcgtcgagaagcatcagcggtgcgttctaccacgtattgaaagaccttggctatgccgatag

SEQ ID NO: 447208 - DNA, 420 bp, Serratia marcescens
atgttcgccacgctgcccgtcaacgcattacgcacctttgaatctgccgctcgcctgcgcagcttcaagctggcggcggccgagctggcggtgacgccgacggcgatttcgcaccagatcaaagcgctggaacagcagttggggtttgcgctgttcgagcgggtgccgcgcggcgtgcggctgacgccgaaaggcgaaacgctgtttgccggggtgcacggcgcgctgctggacgttgccgccacgctcgagggcctgcggccgcagcccagcaccggatcgctgtgcgtctcggtcacgcactctttcgcggcgctgtggctggtgccgcgcctggggcgtttctatcaggcctatccgcactatctggtgcgcctggaggcctgcgccgaggtgatcgatctgcagcaggatgattag

SEQ ID NO: 447209 - DNA, 1116 bp, Serratia marcescens
  misc_feature (1038)..(1047): n is a, c, g, or t
atgattaagtggtataggtttaaaaacttctactccttcaaagacgagactgttgtagatctgactttaaaatcaaactcttcagagtcaagttttgatgtagatgttaataattcgagggtaagcaaaatcttagctgttctgggttctaatggttcaggtaagtctaatcttttgaaaccgctagcctttttgagctggttttgtgagcattcgtttaaagatcttgaatccaaggaactgcttcccttttacccacattttagtactaaagaagattgctttgagattgaggtatgctttacagatctgcagttaagacatgaagataacgcatatgaatacaaataccatcttaaactgactcgtagtaaggttatgcttgaggagctgaaattaaaaaccaataggcaattctactcacttttctcaagaaaatatgatgaaaaagaaagtgtatataaagttaaagtaaattcagccttttctaaacctcaaggttttccaaaggatgagcttttgcgtatacctgataatgcttcagctatttcctattttaatcggaaggaaagtgccgtggctaaagttgttttgaataacttttcatcaatcgataacaatttgaatgcacatggtaaatataacttcagctacaaagatgtcatgcgtgcaactaaaatatatgcagaagatgaagagttgtttaataaagccgttaagattttgaagcgaatggatttcggtctctcggatattaaaattaaaaaagaagaagttatagatgaaaagacgggagaggcgaagagtaaatatttgccatatggtgttcatgagcatgatggaaatgtgtacgaagttcctttctatatggagtcaagcggcacacaagcttgttactcctttattcaatcattactctactcgttagagtatggcggcatcgccattattgatgaacttgatagtgatttacaccctataatggttgttgagttattaagtatgtttgaaaatgaagatataaacaaaaataatgcnnnnnnnnnnagccaggataatttgtatagcaaatatatcaccggtgctttaggtggtgttcctgatatttgcctttaa

SEQ ID NO: 447210 - DNA, 1233 bp, Serratia marcescens
atgacctttacgcccgagctcgcccgacgccagttcagcgccctgtctcagcaaatcgacggcaaaccggcgatctttttcgacggccccggtggagcgcaggtttcacggggcgtgctggaaaaaatgacggactacctggggaaatacaacgccaacctgggcggccactacttctccagccgggtcaccggcgaggtgatgggccaggcgcgagaatcggtgcgcgccttgttaaatgcgccgtcgcccgacaacattgtcttcggcatgaacatgaccacgctgactttccatctcagccgcatcatcagccgcgactggcaggccggcgatgaggtcatcgtcaccgcgctcgatcactacgccaacgtctccagctggcagcaggctgccgccgacaaaggagccgtggtgcatcagataccgctggagagcgcagactgttctctcgacgccgcaaaggtgtgtgaacgcatcaacgccaacactcgcctggtggcggtcagctacgcctccaacgtcaccggcagcatcgtcgatatcaaaaccatcatcgaagccgcgcatcgggtcggcgcgcaggtgtatatcgacgccgtgcactatgcgccgcacaacctgatcgacgtgcaggcgctgggctgtgatttcctggtatgctccgcctacaagttctttggcccgcacgtcggcatggcctaccttgcgccgcagtggctgcaacgcctgcggccatataaagtcgagccggccaccgacgtcggccccggccgtttcgagaccggcacgcaaagcttcgaggcgctggccggcgtcgcggcggcgatcgactatctggcgcagtggggcacgcccggcgcgccgttaaggctgcgcttgcaggagagtttcgccgcctaccaccagcatgaagaggcgctgtgccgccactttttgcaacggctgcagcaactcgacggcgtgcggctctacggccattcacaggcggacagcgcgcgccgcacgccaaccttcgccctgaccttcagcggccagacgcctgacgcaatcgcccgtcatctcgggcagcacaacatctgcgccggcagcgggcatttctatgcgctgggcctgatccagcagttggggttacaggacggcggcgtgctgcgcatcggcatgatgcactacaacacccagggcgaaatagacacgctgtttaaggtgatcgccgaagatatcctcagttaa

SEQ ID NO: 447211 - DNA, 216 bp, Serratia marcescens
atggctaagcgtaagagcaacaggcaggccagagccttgctttgtgtatcggctccaggcccagaagactgtttccgcattagtaaccggcgctggcaggtttacggctccaactatccgcacgcatggcaacacgccaagacatcccgcagccagcgccgtgctgcaaaagtcattcaggcattgtgggctgaagcccaggagaaagcattatga

SEQ ID NO: 447212 - DNA, 678 bp, Serratia marcescens
atgaaagagcgcccagtgattttcaacggcgagatggttcgagccattctcgacggccgcaagacccagacgcggcgggttgtgaaggttcaacctgaatcaccagggtttggcctgcgctatatcaccgaatcacttaacaaccgtgataccgggaaatacttctggtcgcaatcggacgcctgcggcatcaacaaaccccggtcaaaaccatttgcatgcccattcggccaggtaggcgatcggctctgggtcagagaggcatatcaaggcccattgttcaacttcgaccagatggagacttatctcgaagacacctccaaatttgaacgcccggaattctgcgagtaccgcgctgatggtggtaagacgccggaatattacgacgcagatgacaacctgcgctatggatggaaaccatcgatccacatgccgcgctgggccagcagaataacgctggaaatcaccgccgtgcgcgttgagcgcctgaacgatatcagccacgaagatgcaaaagctgaaggttgttgctacggccgtggtggcggagttcctgacttcgctgttactccagcagaccacttcccgacgctatgggcatccatctacggcgaagaaagctggaacgccaacccctgggtgtgggttatcgagtttcgtcgtgtgggaggtgcgtga

SEQ ID NO: 447213 - DNA, 579 bp, Serratia marcescens
atgacaaccatcaagcgctttacccctgactacaaaatgcacgcagttcgctttgaggctttcgcacgtgaagctgagcatggcgagttagttcagtttgatgaccaccagcaagtagtgagcaccctggaggctgagcgcgatgcgctggaaatccgcctgagaaatgctcttaccagtgagcaagaagccatccagcgcgctcacgcagccaatcaaaccgctgatgcgctggctttggaaaatgtggcgctgaagtcggcgcacccgcagccattcggtcgcgagatgatgaaggcactggatgcctatgagaagcatcaagacgaggttcctgagactgggatgcttgatgcatttttcattcttcgagacagcatcagggtagaaaccccagccactgacgcagcacttgcagctatcgaagcgcagggagttgagaagttcatcaagctgaagatggaacagcttgccaacatgcatccagacacccacgcatttggcgctacagccgagtctctgcgcgctcagattaacgaactgcaagcattcgccgccaaaattcgggaggccaaatga

SEQ ID NO: 447214 - DNA, 627 bp, Serratia marcescens
ttgacgtacgattacttagggaatatttttcaggtcatgaaaacattatgtgaacgacttcaagttgctatgcaaaaggctgggatcacttctcagaacgagcttgcacggctttctggcgtaagccagtcaatcatttcaaaaatccttagcgggaagaatgaaacatccaagtactctggaagattggcagcagcacttggaattagtgccgattggctcattaatggcgccggaagcattgagggggatgaacaatctttcgaaaaggtagatgcctcacgccttgtttcagtttgggatgctactggcatgactaacgacgtcatttcatggcatgagcgtgttcctgatcattatcgtgcatatgtaatgcataaaaacactgggattgataaggttccagtcggagcaataaccttagttgatacagctattacccctggaaacggtgatcttgtggtgacctgcattcgtggagagatttctacattccgttttttagacggcggtgctagtcatgggttcctagccgtagatgataacaggataccactttttgaggttactgatccgtcttgcattctaggtgtagttgagcaaattctcataagaaaattgcgatag

SEQ ID NO: 447215 - DNA, 195 bp, Serratia marcescens
atgaacagattagcagatagtcggctgcgtgggcaatttcggtgtgtggcttcaagctgttcaaagccgctcatgccgttgcgttatgtgatgagaataccgggcggctggatgcctgtcacccacagcgcgttgcaggaagttgtggatcgcttcaagtatttggcactgccggcgccagaggggcgtttatga

SEQ ID NO: 447216 - DNA, 210 bp, Serratia marcescens
atgtacacactgaaaattgtaactgcgaacctgaacgaagtgatcttccctgttgatgctatcgagtggaagcgggcagagaaagccatctatgcaaatgcaagtacaggcggtcaaaacaagatatctcttcttcccggtgacactgcatatctggtaaaccgcgataaccgcacggtggcaacttacaccaatcctgctgagcagtaa

SEQ ID NO: 447217 - DNA, 1356 bp, Serratia marcescens
atgttcggtttccgcaaaaaacgtaaggaagaaaaggcgctgcaggctgctaaaagcggctggtggaacagaatttttgagtcgtttaccggtgcgtggcagagaaatatcgaagttgatgccactaccgttcttgcttatcacgccgtattttcatgcatatcacttatctctgccgatatcgctaagatgcctctgcagctaaagaagaagctgaacaatggaatatgggccgatcatagtgatgcaaagatttctccattgctgagaaagccaaacagtttccagacgcgcatgcagtttttcgaaagttggatgaactcaaagctttctgatgggaacacctacgttctgaaactgcgagatgagcacggggctgttaagcagcttagggtgctggattacaataaagtgacaccatacattactgaagatggtgaaattttctatcaggtccgtcctgataatgttcacggccttgaacagcaggtcatggttccagcgcgtgaaattattcatgaccggtttaactgttttttccatcctttgtgcgggctttccccgatatatgcttgtggacttacagcaatgcagggtgacgccatccttactaattctgctaaccattttaaaaatggtggaaaaccaggaggggtcattaccgttccaggagcagttgatcaggataaagcgcgggaaataaaacagagctgggatgaaggttattctggcgctaatgcaggtaaaacagccctgcttgcggatggtgcaaattttacaaccatcgcgatgacagctgtggatgcgcagatggtagagcaactgaagcttaccgctgagattatctgtgccacattccatgtgccaatttacaaggttaactcagctgccaccccgtcctataacaacatcgaagcgctggatcaaggatattactcccagtgcctccagacgcatattgaagccatcgaattgctgcttgatgagtcctttgaactcgatgagaaaaccggcattgagatggacttaaatactctgatccgcatggataccgaggggcgctataaaacctatagcgaggcgattggtgctggatggcttgcgccgaatcaggcgcgaaggaatgaaaatatgctaccagttgaaggtggagatactccttaccttcagcagcaaaactttgctcttgccgccctggctaaaagggatggtagcgaaaacccgtttggaaattcatctcagacggcccccccgcccgagccaatacaaccccttgatgacaacagcaaggcgctgtctgatcatgaacagttcatggttaaggcaatgctgaaaggactgctaaccgatgaatga

SEQ ID NO: 447218 - DNA, 330 bp, Serratia marcescens
atgcttgaatttgtaacgcttaaagaagctaaggaccatctaagagttgatacagatgccggtgatgaagacctgcaactaaaaatctactccgccagcgcgtctgtgtacgactacattcagggaagtcgtgacaaggtcatcgacagtgacggaaaagttattaaagacactcctgaattgcagagggtgaagcaagccacgctgattcttgttggtattcttgatcgcgctcgcggtggtgaagaagagccgcaatatcagcagggtcaattacctttttctgtaaccagcctaatttattcacttcgtaaaccaactgtatgctga

SEQ ID NO: 447219 - DNA, 264 bp, Serratia marcescens
atgaacgggataggtggccctacgattgcagaagcaaaagagaggataagtatcaacgagttctatacttggcttcgctataggcaaaagtatggtagccttaatgtgatgatgcgtaccgagtggggctctgcgctggtggcaagtgtgattgcaaatgcaaacaagatgccggatgctacgccattccgtattgctgatttttccccacacatggaagaaatgccgatagatttggaagatgcgaaaaagttatgggattaa

SEQ ID NO: 447220 - DNA, 618 bp, Serratia marcescens
atgagtatcattcctgcagaagcattttttgctaacgttgtctttttggttgaaggtccttctgaagttttgttttatgaacagctggctaatacacttaaaattgatttggatttctataatatcagtattatatctgttgatggtgtccagtttgatgtttataaaaaaatactcgatgcttttaatattagctgggtagcaagaacagataatgatggttctaaagttcctaaaaaacaggagtggcaatatgctggaataaatagagctttgaaattgtgtaatttggcaagtaaagataatcaacaatcagaaataactttgccagagttgattacagcttggggagattattctccaatagtaaatagacatggggtttatttatcgtttagtgatcttgaaggtgatttaagcaatgagtttactctcgaggttatggattatagtggaaaggatgatatcgattctgcagctaactacttgagatcaaaaaaagcaataaggatgcgtgagttacttaaactctacaaacaaaacctgattaaactggaaagtggcgatcttgcgaggccactctatcattgcgagagattagctagaggtgaggaatga

SEQ ID NO: 447221 - DNA, 123 bp, Serratia marcescens; identical to SEQ ID NO: 208796

SEQ ID NO: 447222 - DNA, 186 bp, Serratia marcescens; identical to SEQ ID NO: 10399

SEQ ID NO: 447223 - DNA, 531 bp, Serratia marcescens
atgaaactaccactctgtggtaaggagttatcgataacatcaccaacagaaaagcggccgttctttggtggtcctggcagtaataagcgtcttatcgaagggataattacgcgtgactctacgccaagaacggtaaatctaccgacgacattattgtttagccacatcccattttttgaaccaaattggacatcacctgcaaccatgcaatcatcaattagcacgttcggtacttttgggtcaataaaaacatctccgtcgataatagaagaaataactcttatcctcaatttctttgaaccagacctggcaaaaaatgactttttgattcggcagttttcaaaaataacgtcaccatcaaggttcgaccagtcaattgaattaaagatgcagtctttaaaaattttaaatcctgaggtggatattgcatcaactgtatcaatagttacatctttgaaagtgaacttgctgttcgtccctgtttttatctttatatttttcgcggggctgcaccggtgcgaatcaatataa

SEQ ID NO: 447224 - DNA, 885 bp, Serratia marcescens
atggtgatgagcgcgcgcctgctggatcgcgtgggcaaaggcatccgcggggcgccgcgcgatgccctggtggccgacgtgacgccgccggagattcgcggtgcggccttcgggctgcgccagtcgctggataccgtcggtgcctttttagggccgctgctggccgtcggcctgatgctgctgtggcacaacgattttcgcgccatcttttgggtggcggcgatcccggcggcgctggcgattgcgctgctgttttttggcctgaaagagccggccgccgcgataacccacaagcgcaccaacccgatcacccgcgccaatctgcggctgctggggcgcggctattggtgggtagtgggtatcggtgccgtcttcacgctggcgcgcttcagcgaagcgttcctggtgctgaaggcgcagcagggcggcacgccgctggcgttgatcccgctggtgatggtcgccatgaatctggtctacgcctgctcggcctatccgttcggtaaactgtccgatcgcatgagccatgaaggattgctgaaagccgggctgctggtgctgatcgccgccgatgtggtgttggcgctgagcgatcattggggcggggtgctgtttggcgtggcgctgtggggcgtgcacatgggcatgacgcagggactgttggcggcgatggtggcgcataccgcgccggcgcacctgcgcggcaccgcgttcggcatgttcaatctgatcagcggcgtggcgctgctgctggcgagtctcggggccggaaccctgtgggagctgttcggttccgcctccaccttctacgccggggcgctcatctgcgtggtgacgctggttggcatgcagctggcgccgttcggcgaacggcggggcgcttaa

SEQ ID NO: 447225 - DNA, 534 bp, Serratia marcescens
atgtgtataagagacagccttgtaatcagcacggcgcagcgcgtaatacgcctccatgcgcacccgataatccccgacgttttgcgaggtgccgttgtcgttatccgtctcgccatgctccagcgacaccacatcaacgcttgcgggtttacccaacgcctgggcaattttcacataccgctccaccatcgccaggccgttgctgtaaggcacggtgcctttccagatttgcgcaaaggacttgccgccgctgttggcgaccgcgctaaacatgataggcagattcaagccggcgttttcatgcgaatacagcagcgcatagacaaacggcagctgttgcccctggcggtaaagcgggtaaaccagattggccagcaaatccagcatggcttcggtgatcggcgtgtcttggctgccctcgggtttgcccccggcgatggccagcgcataggcgcgccatttcgggtcgtagttaaccttgttccaggtattcggattcggccggttaccggcgtcactcggcacacccagtga

SEQ ID NO: 447226 - DNA, 555 bp, Serratia marcescens
atggacactgatttaatttcttatgagtcgatgttggcggcaagagactctgcagactgggcattttggggcatgattgccgcaatagtcagtgcattggcgatgcttgtcacattgttctttgcctataaagcattgagcacctggcgagagcaggagaaagcgaaagtaaaattagattttcgaatagcaattaggcatttaagatcaagtttactatttatgcccctcaccattgaccctgcggagatagaagaagagagagaacaggttattgccaaatggatatttaaggacgttgacctcatagctcagcagatcgagattggggagcagaatgtgcagcggtttgatgagctcataaatacgttcgataactgctattcagcctggctagctacagagcatttatttgataatacggacctggctagaaactggatgatatgtgaagatgattttaagaaatatataagcggagaaagtagcaaaactcccttgcttcagacaattaataaaatcactgagacaagatttgtgttcgagtccaagtag

SEQ ID NO: 447227 - DNA, 915 bp, Serratia marcescens
atgccaaattggaatgaagtactggccgagatgtctgttctcggccagcgcacaagcccgcttgatgtagtgagaaaaaaatatatcactaagatgtcaaagcatactgggcgcaatgttattgcttattactctggttttttgcagaagaacacacagtcaatcagtcacctattatccatgacggatgatgataagaacggatttatgtctgctataaacggcatggatcctgacaaggggttggatctattgatccatacgccaggaggtgatatagcagcattggaatcacttggtcagtatttaagggccaagtttggaacaaacatccgtgcttttgttcctatgattgctatgtcagctggtactatgttggcctgttgtgctaaagaaatcgtaatgggtaaacagtcgaatattggaccgttcgatcctcagatgggtggtattccagcacatgggatccttgaggaggtcgacaaagccaagaaagacattctggatgaccatcgtttgcttgcattttggcagttcaatctgcaaaaactgcatccaacctttattggcgagtgcgaaaaggcaattaaatgggcttctgaaatcgtatctgagtggttagtatctggaatgtttgctggggatgctgatgcgcagcagaaggccgagcatatatgttcaaaactaaatgatcactcgacaacttatgcacatgctcggcacattcacatggataaggctagggatataggtcttaaaattgttgcattagaagacgatcagaagttgcaagatcttgttttgacgatacatcatagttacatgcacacttttggtagcagttccgcagtaaaaatcattgaaaaccataacgggagtacaatgatgtggcatgctcctcaagttcaagtttaa

SEQ ID NO: 447228 - DNA, 546 bp, Serratia marcescens
atgtacggcccgaaatatccgctgaattggttgtattcggacggctcgctgagtcacctggacaactgggggaaagtcctgcagggcgaatatcaagagcaggccatcttctggcacttatatgaccccgcgcgtaaaggcacctggacggggctaaaaattaaaagcgtcacgctgacggataatatcgctgatttactgtgtgacgtgccgtttgcgccgattgttatcgacgctgactttattgccgactgcctgaataaagggattagcctcgaaaataactcagccaccgtgcaaagcatcactatcgtcgatggcaatatcattcgtgtcgtatttgaccaggcaccggcggcaacggatgcactgctgatggggttcaccaacaccgcagaacattcaccagaaaacgactctgtttatccgttgacctgtttccgtgactcatcgccgcgcgtgtcgcggtgggtgacgcgcaacggttcaccattcccactctataactggatgtgcctcgaccgcatcccgctaacccaggagtaa

SEQ ID NO: 447229 - DNA, 909 bp, Serratia marcescens
atggctatcgctctcaacaccggtaaagtttatgcaggctttcgggagcctctcgatttgtcggcggacattcttgatgccaccgcgttatttaatgcctacaaagcccgcgtgcaggccgatggtggcattattccgaatgcggcgggctgcaaggaacgctttgagtttttggtcaataacggcatgtatgagaatgccgtgatgtgtgccgctcccgcctttggcgtcaaactgggcggcacagacggcaacgatgttctgactgtttacagcctgctgggcgaaagcaccgacctgattccggcaacccagggaaccggtgatgccgttcggtatgactcaacgaataagacggccacggtacggatcacctccagcggcggcacctatctgcgcacacgcgagaatgtccgtgttcagattggccgcagctatatgattgccggtcggctcagtgacgcgagcaatgccgatgtgctcgggatgactatcggcatctcgttatcaaacctgccgatggcgtacatgcgcacgatgataacgaaccagcaggccatcacggaggcctggcgttttggcacccgtgacagtgcctggacggggcctgttgccggtggggctgtgggtgctgcggcaacgacgtatgcggattatgtgcctgctgctggcctgttcaaagtggatgagggggttgtttacgggtatacacgcgggaagctggacaagacggctacggccaccacgggcaagttggcagacctggtgaactttaccgcgccgatcgttgttggtggtggcatggcatcaggctcagtatctccctgctacggctcactgcttgatatgttgttcctgcatacggcatcggaaccggatgccgtgctggcatcacgctttggtatgtag

SEQ ID NO: 447230 - DNA, 579 bp, Serratia marcescens
atggacaataagctgagcgaactgaaagacgccttggagtttctggaaacaaccgaattcgacggtgaatgggacagcgcgctggttggcggagaaaacggcaaaaattatcacgccgttatcaacgccaatgatgtagttgttcgcgcggatgatgatagccgtcatacctcgtggttatgcgactaccttgaggccgtgtctccagtaaacatacgcgccctgcaggcagagctggaagcgaaggataagcgcatagccgaactggaagtcatcagaacagacgcctcccaggtgttcaaagaaatcggcaacgagctgggctgcaatcccgacaacgagtcgatcatgatggctatcgatgagctgaaaaatgaagctctggttcatcgccaccgagcatatgccgctgagaataaactgacagaattgcgtgccaagctggcgacgccggtgcggttgccgaacaagaatgatgacgagttttggttcgatggcgtgttccaggtggcgaagttcgaccgtgcagttgaacgggctatccgcgccgctggcttcaccgtagagggggatgagtag

SEQ ID NO: 447231 - DNA, 207 bp, Serratia marcescens
atgagcaacgaagaactgatcgctgcggcactagaactggctggtaagttttatgcagcgcagggatacatccatcgcccaggcttcaaatattacgcatcactacacccatctgagcggttgatgtgggaaatggcgtgtgatgcgtttgaatttatccgtggcagcgatgtgcgcgatgcgttggcagatgtggaggattgttag

SEQ ID NO: 447232 - DNA, 711 bp, Serratia marcescens
atgaaagagcgcccagtgattttcaacggcgagatggttcgcgccattctcgacggccgcaagacccagacgcggcgggttatgaaacctcaacctgagccatgctatcgcggcggccattggtggccaagcaacgcgtttaaaacgatgctgcacatcgaggagcagatgcagaacggtcagggcggatggaaagggctggcaggatatgcctgcccatttggccgggtaggcgatcggctgtgggtgcgcgagacgttcatggacttaaccggcaccggcattgaagccactaccggaaagtttgagggattagcatatcgcgctgacaccccggcgggaagttatggcgatgaagtccgaaaagactatgggctgaaatggacgccttcgcttcacatgccacgtaaagcatgccgcatcctgctggaaatcaccgccgtgcgcgttgagcgcctgaacgatatcagcgaagaggatgctaaggccgagggcgttcgagcactcgaaaacaacttcggcaatggccccgcctactgtgattatttgctgcctaatttggatgacactgctgagtggtacaaccgcgcaagcgacagcttcaaaagcctgtggaagaccatctacggcgaagaaagctggggcgctaacccctgggtgtgggtaatcgagttcaagcaggtcagcgctagggaggtggagcgtgattga

SEQ ID NO: 447233 - DNA, 870 bp, Serratia marcescens
atgagccaatatctctctgaacacgaaccgcaaagcgagccggccgtcggttaccgccgtggccggcgcctgaccacgctgacgctgggcacggcgctggtggcgattctgatcgtcaccgcgctgctggccccgtggctggcgcctttcgatcccaatctgcagcatatcgagctgcggttactgccgccttccgccgcacattggctgggcaccgacggctttggccgcgacttgctctcccgcgtgatttacggcgcgcggccgacgctgattctggtgtcgctgattctggtgttgaccattcccatcggcctgctggtcggcattggcgccggttatctcggcggctgggtagagcgcattttgatgcgcctgaccgacatttttctgtcgctgccgagcttggtgatcgcgctggcgttcgtggcggtcatggggccggggctgatgaacggcgcgctggcgctggcattgaccagctggccggcctttgcccgccaggcgcgggccgaaaccctggcgctgcgccgcagcgattacctggcggcggcgcgcatgcagggcatcaacgggctgcggctgatggtcggccatattttgcctttatgcctgccgagcgcggtggtgcgcgcagcgctcagcctgggcggcatcatcctgtccgccgccggtctggggttcctcggcatgggcgtcgcgccgccgaccgccgaatggggctcgatggtggccgaaggcagtaaagtgattttcgaccaatggtgggtcgccgccgcgccgggcggggcgatcctgttcgccagcctggcgtttaacctgctgggcgatggcctgcgcgacaaaatggatcctcgtcatggacactga

SEQ ID NO: 447234 - DNA, 150 bp, Serratia marcescens
ttggaagaatggtccggcgcggccattgccggctgcagccagaaggtccttgtgctgagcaatatgattccggcgcaggttgaatcatcagataccgatgagcagctcctcccagagacagagaaagaccttaccccggaaaagccctag

SEQ ID NO: 447235 - DNA, 243 bp, Serratia marcescens
atggacagcgtcacgctatcccggctcggtaaacctgtcaccctggctgacgcgccacatgttgcggtggaagcccatttcatccctgagctgcaggcaatgagcggagacggtatttcgttggtgattttcaccccaggatatcgtcctcgcagaaacgatgcggtgatttttgacggcagaaattacatcgtgacgcgttaccagctctttaacggtaagccgcatatctggattgaatag

SEQ ID NO: 447236 - DNA, 618 bp, Serratia marcescens
atgaaaaagggaaataaactagtagccgggattggcacgaatgacctgaaagatattgaaaaacaatttgaaatgggactgacaccagtacttcaaggaaagtgctacaaggcgtggaagaatcgtctagaagcggagacagttggaaaaagggcaactgtctgcattgagtggcagacctacagtaacttcgcccggtggtggctagagactcacattgagggctggtacatcgacaaagattggatcgttgcaggcaataaagaataccaccctgataaatgcgtttggattccgaacaaaataaacacgctaatgaacgataggagtactaactgcttgccgaaaggcgttagcatacaacagcaaaaatataaagatgctgtctataagtactatcaagcaacgtgcagggttaatggtgttcgaaaaggtactacattaagtactgcaatagatgcacacaggcagtggcaactttggaaaatccaagaaatcaataatgtcctacgtgagtttgcatttgatcaacgtcttgatgggcgagtaattcaacgtcttattgaagttagggataatatccaatctgattacgacaacaatattgaaacgaaataa

SEQ ID NO: 447237 - DNA, 150 bp, Serratia marcescens
atgctgactccaagggcgtttcccagttattctcaattaagtctctacgatcacttaggtgaagtgacaccgctgcaaattgctcacatgactcttgcgatgggggaagtggataaaatgctattcttcgttggttcccgttatctctga

SEQ ID NO: 447238 - DNA, 1194 bp, Serratia marcescens
atgtccacttctctagtgttttttttcgcttttttattagcgatagtattaagttacattactgtatcaattagcaaattcaccccgttaaacatcagactccccgaagggcgtcggtctggctgcattgatggcctgcgcggctatctggcgttaatggtggccgcacatcattattttatattttatggctggctgcaaactgggcagtggttgccaccaaaaattaattttataaataacttcggcaaggttgctgtttgtttattcttcatgattactggttatctttttattgggaaagtctacaaagataaacaggcgtcaattaaaatctcttgggctaaaatctatatatctcgggtatttagaattttcccactgtaccttgtggctgttgccgtgacgatactttatacgttcatcgtgcatgggtatcagttgaatgtaacgttgccccagcttgcaaaagaaattgtcagttggttgctatatatcggtgactcggttaatggcgatcctgatgcaaaaagaatcactgccggcgtgacctggaccttaaagtatgaatggcttttctatctttcgttaccattgcttgccgtttttttcagtaagaaaaccaccactgcgttgcttgtagtgctggcaatagctatttatttcagtggattacatgttaaagggattgattgcaaatatattattttctttgttctcggtggtttagcctttgcgatagagcaacgttatggtgaagtgctgcgttccgtcataaataattcagcgatatcaatgataagtgtttttgctatatcttttgcggtgttttttgttaaggatccgctcgggttgttgggtgtgatgagtatgtttttattttttgttcctgttgtaatggggaactctgctttcggttctttgtccggggttggagcagtcaagttaggtgagattagttttagtctctatctgctgcatggcattttaatgtatacaatcttggttttctctatcgacagcagccaattaggtagtatgaacggctatcttatttttatgccgttagttatgagtgcgttagtcattctttcattgattacgtacaaaatgatagaaaaaccgtttattaattttggcagagcattggttaacgggaacagtttaaaaaaaaatctgtcgaaggtccgctga

SEQ ID NO: 447239 - DNA, 750 bp, Serratia marcescens
atgaaattattaatgccatgcatggcatgtttccaagagcttggccatcctacaaatgaattaactacgtttgaatttcgcgatgacgggcgatacgaaacatgttgtacacgtggacataagtcggtaaccgtattgcaacagcagaaattcgaaatcctttttgatatcggtgcaaacgcaattttggatggctattaccgagaagctgtatcgtcgtttacgtcaagcttggagcgcttttatgagttttgtataaaagttctctgtaaaaagagaaacattgaaaacgatgttttctcaattgtatggaaacaggtttctaaccaatccgaacggcaactcggtgcttttctgtttctttgggcgagcgagtttggtgagttgccgcaactcttatccagtaaggatacaggttttaggaatagcgttattcataaaggaaaaatccccacaaaggaagaggcgattgaatatggcgggaccgtactggctatcatccgtccaaagatcgctcaacttaaattacagtgtgaggaagaaatagaaagagtcacatttgaatatatccagagctgctcaaagttagtggaaggacaagtgcaaggaggaacaatgtgcgcaaataccattgttagcctcacagcaggcgaagaaaaacacaatactcagacgttggaagatgctttggctggaattttggtatggcgacaaatggtggcatcaactaaaggcataacaaaaatgtaa

SEQ ID NO: 447240 - DNA, 276 bp, Serratia marcescens
atgctcgaaccctgcttccccgaaaacgaagccgaacgcctgtcggtattgcattcgctgaacgtgctggattcaaactcggtggaaaaactggatcgccaatggtttttatcgcgttacggtctggatgcccgggaaacgccgcgcaatatctcgttttgcggccatgctatcttgcaacgcgaagcgctgctggtgcccgataccgccaaagacccgcgatttttcgataatccgccagcatcggcgcggccatttccccacgcggcgatgtga

SEQ ID NO: 447241 - DNA, 1179 bp, Serratia marcescens
atgcgtatcggaattgcgagcaatggataccctgaaaagcggtgcattactgggaataaaagcaacgacttcctcaacttcgataaaaagaatctattcaaatacattaatttcctgaacggtaaactgttaaaaaaagcgccgtcattcctttttaaaccgcttgcagaaaagtcctctgataatgttgatgtatttcactttttcaatcatgtcgggctaataaataaaaagtgggttgcaacctttgaaacggctatcccaagagttccgggaatcatggacacccatagaaaaccggatggggaaaatggctatgttcagaacaaaaagatcgcaacgttgctgtcagccatcgctgacaataattgcctcggtattttagcattatcgcaatccgcttataatattcaaatggctgtgcttgaagcataccccgcccttgccgattcagttaaaagcaagatgcgcatcgttcatccgcctcagcaactgctggtatcatcgatagccgacaagccggccggctcagacaaggtcaagctcatctttgtcggccgggacttctaccgtaaaggcggcgctgaaatcgtccttgccgtcagcgagctgattgagagcggagatattttggctgacgacattgatgtgaccttgatcggcgatctgagcaaaagagacaattatgttcatggagaattcaaggatgacctgccattctatgagcgcattgagtcactcgtaaaagatttatcctgcatttcccattttgcatcagttcctaatgagcaagtgatgcaaaaattcattaccagccagattgggttgttgccaacatggggtgacacttatggttattctgtattggaaatgcaggcctgcggatgcccggtgatgacaaccagcgttcgtgcgctgacagaaataaaccccgcggaatcaggctggatgatcgacgtgccatgcaataaattcaaagagattgtcatcagtagtttcaatgacaaagagaaagttcgcagtgccattgtggccgggctgaagaaaaatatatccagcgccgttgccgataaagcagaaattatcgtcaaagcgcaagcatcaatcgagagaataaaaagcgcgcatgctcccgacgcttatttcaagttgatcgacgctatctacaaaagtaaatag

SEQ ID NO: 447242 - DNA, 183 bp, Serratia marcescens
atgaagaaaacctcttggataaaagcttggttctctggggctacggtttacacatgcctcgatctcagtaagcatataggagacgacttcctttgtggcgaaatttggccgcagttggtaggcattgtattcatatttatcatttgcttcggcgcgcgtgccaaaatgaatgaattaagttag

SEQ ID NO: 447243 - DNA, 126 bp, Serratia marcescens
atggccacaggatcccttgccctcctggccgtcttggccggcattgcgggcattgcgggcttcgccctctacaagcatttaaaatctcagaaaaaaagcacactcgtccacccgcacgatcggtaa

SEQ ID NO: 447244 - DNA, 1146 bp, Serratia marcescens
atggtaagcgcttacatccatgatactgcaaacgatgatgattcgtttagcctagatggttacgatgggcttgaacttacctctcatccctacaggatgggatctgatacagaaatccgcatagcaaaggaacagtccagtgtctttgagctactccgacgtgagaaccgggggagtttgatacttgctcctgactttcaaaggaaagatgtttgggatagaaaaaaacaatcggaactaattgaatctattctaatggggatacctattcctttgatttatcttttcgaagatgaaaatggtgtcagacaaataattgatgggaagcaacgtgtgtctgcactgaaaaaatatttatcagatgagtttgaacttactgatttaactatgtttcctcacctaaaagggttgtattttagtgaaatcccaaaattattacaagcaaaattagaagattatcaattacattcttatgttattcagccacctactcctgaatatgttaaattcaatatatttgaacgagttaaccgtgcagggatgaatttaaataagcaagagatgaggcatgctctttatcaaggtaaggcgacaaaattaattcaagatttggctgaaagttctgagtttttagactcgactggaaggggggttcgccctgatcgtatgcgagatcgatatcttgtattacgatttgtagctttttatctttttatgaataaaaaaatgccgatgattgagtatcggtcagatattgatatgttcttggcgtcaacgatgcgcttcattaatatcaaagcgtctgaagaactcattgaaagtacagctgaagcttgtatcaacggaatgagaaatgcatatattattggcggggatagcatctatcgccttgaacctaagagtggtgataaaagaagaccagtaaatatggggctttttgagataatggtatatgcgctgagttatattgatattgaaaggcttgatcctgaaataaattattcgcttttgattggtgagtataaaaataacttagaagcggttggtgtgtttagtagttcaatagacaccattaattatgttaatattcgttttgaatttgctttagaaattacgagggctcttaaaaatgcttacatatattaa

SEQ ID NO: 447245 - DNA, 1047 bp, Serratia marcescens
atgcttacatatattaatattaatgacttcaaaagtattcatgaggagaagcttaagcttaggccgctaactattctaacaggagcaaattcctcgggtaagtcaagtgttattcaggcgattatgcttgtgataaaatatagtaacattgcaaatcgttacagtatggaagaagtaactaggtatttaaatgatttttcagtaataagaaataaaaaaaataatgcaaaagtcatagatttagaattgggtcttgatgggcgctcatgtaaaatacaaatgactccgggggtaatacatgctccttcagggatagattactcatatgaaccgatcggggatatagatagtcctgagattttatatcttaacgctaatagaatgggggcgcaggatcaagttgtattcagtgagcggcgtgttggtaatagcggtgagtttttgttttcaacttatgaaaaaataaaaacaaatgctgtatctagcgatatgattaaatatcctagttcgtcaacaatttcatatcaattggccgagtggttaagctatattacccaaacggaatctgaacttgttactgagttaaacggtgataaagttaaggtttcatataaaataaaggacttggagggagaggtgtcacctttcaatcttggtgctggtatgagctatattagcaaagttcttattatttgtttgttggcaaaaaaaggtgatgttgtattaatagaaaatcctgaagtacaattgcacccgaaatcacaagctctgctgggtgattttttaactcatattgcaggttgcggtgttcaattgattgttgagacacactgtgagcatttaattaataaaatagcgtaccaagtttatgatgaatgtttttcatcagatagtctagttatacattacaagccgagtgttgacaatgaattcatttcgttgtctgtggatgaaactgggcagtttataaatttggacggagaaataactaatttcccatcaggtttctttgatgcaactttggacgagttgagaggaatgcgctaa

SEQ ID NO: 447246 - DNA, 756 bp, Serratia marcescens
atgtcacttggtacaattgttttggatgataatttattatatcattatttaaaaggagataaaacaaaaagatataataaactgatgaggaagtatattcatccacatgttaccaatttcaatcaactatccagagttataaatgctcatattgacttaccgaaagaaaataatctgttagctcagatggctaatgaacctcacagtcgtgatgatcttgaggcattagctttgaagactacttttaaaataatactcacagatgatgaaaataaaaacttcccgttcgttcattttgataatgcagtggttaataataggttaacgtttcatttatcgccaagccaaagtcgggatgtgcttacgcaacacttgcagagattgtgccagaatgcgaaaaaaataattatctgcgataattattttgctaaaaattgggagcatactcaatcactttttgtttcaattcttcctaggaagtcattaattatcgaatacgcagataccatgccgcaaacagccacgattcttaatagtagttgcataactagtgattatataactcaaagttggcatgaatggactgtaggggtaactgccaatcctaaatatcttaattgtcatgatcgatatttattaattgaatctccatcaacagttgttgaagttatgttatcaagtggtttttcccatatatggcagccaaaccctaaagaaatcacatgcgtttttagtgagataaaaaaatcctcctga

SEQ ID NO: 447247 - DNA, 615 bp, Serratia marcescens
atgccttttcatgacgttacggcggcggccgtgctttatggcgttttttccaccagcgcccgcgcggcgagggttctcgtcaacgggcgccgttacgctgagccagcccggcgcctacgtaaatcggcgcgtgctcacgcccttgccgcccgttgtcccgccgctggcagaggcgagcagacatcaccactgcggcaatgtccccccaatcggcatgctcaatcacccgtgtgttgcaagtcgccgccacgttttcaacccatgcggcgtcagcgcgtgcgctgtttaaagaagcctggctccacggcgcccaagccagcaatagcgcgcaccctacccatgcgctgccgttcatgcgcacagcttccgccacagggcgctcaggcgcgcccgccacgacggcgtcgcctggtgctgacaaagctgatgcagcgcggtgagttgctcactgtccaccggatgcagcgaagaatcgaacaccgtctcgcccacatgtttaggctgcgccggttgctcgccaggctggtgatgcaacggataaagccgggttatcgctctcatgatcctgccctctttcgccctgtgtatggccccagcgtatgcaaatgccggtaa

SEQ ID NO: 447248 - DNA, 732 bp, Serratia marcescens
atgcgcgtccacgccagtattgagcctttagcgtgggaaagcgagtttttcgcgctcaacagcgcgaagctcagtttctcgccctcggctccggcgcttgccaaggccgatgtggcggcttacgccctggtgcaggccaagatccccgcgcagcacgttgcgttggcggatggtttggccgatttgggattccgattggttgagggcgaagtcgattttgttttggacctcgatgtcgggcgagcggatgagccgagtcacggcacacaagcgattcgtcaggcgaccgcggccgatattccggcattgcgcgccgcagcggcgcaagttttcagcgccagccgatttcgcgcgccctggtatcaacctgacgacagcggccggttttatgccctgtggatcgaaaaagccgtcttaggcactttcgaccgccagtgtctattagcgctggatagtcagggacgccctgaaggcttcgtcagcttgcgcgacattggcgagagcgaagcgcgcatcggcctgttggcggcgtttcccggcgagatgggcaagggcacaggttcgcgcttgatgaacgccgccaaagaggcctgccggcaccagggtgtgcagcgcctgcgggtcgcgacccagacaggcaatatcgccgcattacgactctatcaacgacagggtgccgtgattgaaagcaccgcgtactggctatacagaggtagacatgattccatttaa

SEQ ID NO: 447249 - DNA, 720 bp, Serratia marcescens
atgaaatacattataaataacgccatcatttatgatgcgcataaagggacattatcactcaacaagaacaacgatgataaagacgtggttttattaaaaccttcacagcgactgttgtcgttgtttattgagtgcaataatgaaattgtagagagggagcgtttgctggatgaggtatggaataatcatggcctgacggcatcgaacaataacctgagcaattatatttcagggttgcgcaagacgctggctcagttaggccaggatgacattctggttacttacccaaggcaagggttcaagttcgtcgccgagtcgataacccttttaggggaggaaaaggatgaaaataatggcgaaacgtcgaaagcgcatccgttaacggaaaagaaaaccaggcgtataaaaccgctcattctgcttctcctgcctttggccgccggccttgtcgccatcggcgtcgcgttgcattattacactgccaataacgatctgagctttattggtaaatatcgcagctgcaacgtgttcgccatcgacagtgcgcaggatatttcttcggccaggcggctgctgagcgagtttgattatgattgcaacagcagcgccagcgtatatttatacaatcaggttgccgatgacgacagcacagcggccgtgatgacctactgccccagacagggcctgtctgcgtgcaaaacggtaaagctgcaacagtag

SEQ ID NO: 447250 - DNA, 549 bp, Serratia marcescens
atgaaactgaacaacatcatgatggcggcagtggttgcttttggcatgtcttctagcgcattcgcggccgaccagggtcacggtaaagtgactttcaccggttctattattgatgcgccatgttctattaaccctgattctatcgatcagaccgtggaactgggccagatctctaaagtggcgttgttaaatggcggtcagtctacgccgcgcaacttttccatcgatctggagaactgcacgttcgcaactaacgcacagggcgctttagagaaaaacaaagtggcgctgaccttcaccggtatggagtcccaggccaataacggcctgctgggtattaccggcaccgccaagggtgccagcgtcgctatcaccgacggctccggtgcggtgattaagctgggcaaagccaccaaagcgcaggaactgcagaacggcaacaacactctgagcttctctgcttatctgcagggtgacagcgcgtctaacgccgtgatcaccgaaggtgacttccaggcggtggccgactttaccctggcgtataactaa

SEQ ID NO: 447251 - DNA, 543 bp, Serratia marcescens
atgtggattaaaaccaggctatttccgctggcggcttgcctatttaccttcacggttgttaccgcgcaggcggctggcgccgttcagggctggggcagggtaaatatgcaaggcgccattattgataccgcctgtgccattgccgtcgagagtcgcgaccagaccattgatatggaggtggtgccactggcggatattattcgtgatggccagggccgaacaaaacccttcgccatcgagctggttaattgcacgcttgaacgggctaataaaaattcacctgactggaaacagtttcaggtgacctttgacggcgatgccgaaggggatttatttggcgtgcgcggcgaggccgccggcattgcgctgcaaatcaccgatgccgccggcaatatcgccacgccgggccacccgatgccgcgcggcgacattattcccggcgatatgcggctggattatcggctgaagctggtggccaatagccacgcattaaaagctggcgattatttctcggccatccgtttcaagctggactatttctga

SEQ ID NO: 447252 - DNA, 2544 bp, Serratia marcescens
atgatgatatcgccagcaggaaaaacggcgcgtattaatacgctggggttgtgcatcgcgctggcgctcggcgcgttgcaggcgctggcgtatgccgccgacgagatccagttcaacaccgacgtgctggacgtgcatgaccgcaagaacatcgatctgagccagttttcacgtggcggttacatcatgccgggcacctacggcatggtggtgcacatcaacaaaaacgacttgccggagcagcaaatcccgttctacccgccgcaggacgatccgaacggcagccgcgcctgcatcagccaggcgctggtggaacagctgggccttaaagaaggcgtgatgaaggatttgcgctggtggcaccaggacgagtgcctggacgagagcagcgtggcgggcatggagatgcgcggcgacctggctacctcgtcactgtacctgaacattccgcaggcgtttctcgagtacaccgccgagaactgggacccgccgtcgcgctgggacgagggcattcctggcctgttgttcgactacaacgtcaacgcccagagccagcaccagcagcgcagcggcagccgcggttacagcctgagcggcaacggcacggcgggggcaaatatgggcgcctggcgcctgcgggccgactggcagggcagcctcagccaccagaccggcagcgggcagccgaccgacacgcggctggactggagccgctattacgcctaccgcgcgctgccggcgctgcgctcgaagctgacgctgggcgagggctacctggactccggcatgttcgacagcttccgctttaccggcgccagcctggtgtcggacgacaacatgctgccgcccaacctgcgcggctatgcgccggaggtggtgggcgtggcgaagaccaacgccaaggtagtcatcagccagcaggggcgggtgctgtacgaaaccacggtggcggccgggccgttccgcattcaggacatcaacgacgcggtgagcggcgagctcaacgtgcgggtggaggagcaggacggcagcgtgcaggagttcgtgatgaacaccgccagcatcccgtacctgacgcgccccggctcagtgcgtttcaagctggcggcgggcaagccgtcggactgggaacatcgctcgcaggggccgctgttcggcaccggcgagttctcctggggggtgagcaacggctggtcactgtacggcggtgcgctggcgggcggtgactataacgcgctgtcgctggggctgggccgcgacctgatggcgctgggcgcattgtcgttcgacgctacccagtcgcgggcgcggctgccgcaggaagacggtacgctgagcggcggctcgtaccggcttagctattcgaagagcttcgacgagtacgacagccaggtgaccttcgccggctaccgcttctcggagcaggatttcatgagcatgagtgagtacctggacgcgcgctactacggcaaccgcaacggcagcggcaaggagatgtacaccatcaccttcaacaagcacttccgtgactgggggctgagcagctacctcaactacagtcatgagacctactgggacaggccggccaacgatcgctacaacctgacgctgtcgcgctatttcgatatcggccggttccgcaatctgagcctgtcgctgtcggcctaccgcaaccagtacaacggaatgaaggacgacggggcctacttgtcgctgtcgatgccgtggggcgagcgctcgacggtgagctacaacaccacggtgaaccgccacgataccacgaaccgggtgagctactacgaccggcttgacgagcgcagcaactaccagctgagtgccggcacatcgcgcagcggcgccaacgccagcggctattacagccgcgaaggggatatcgcgcgactgagcgccaacgccagctaccaggaagggcgttacagcgcggtggggctgagcgcccagggcgggatgacgctgacggcggagggcggcgcgctgcaccgcagcggcatggcgggcggcacgcggatgttgatcgacacccagggggtggcgggggtgccggtgcgcggctacgggcgcaccagccgcaccaacgtctggggcaaggcggtgatcggcgacgtgaacagctattaccgcaacaaggccagcatcgatctgaaccagctgggcgacaatgctgaggcgaccacatcggtggtgcaggcgacgctgaccgagggggccatcggttaccggcagtttgacgtgatagcgggcgccaaggcgatggcggtgatcaagctggcggacggcagcgaaccgccgttcggcgccacggtgctgaacggccgcaagcaggagaccggtatcgtcaacgacggcggcagcgtctatctcagcggtattcaaccgggtgaggcgatgacggtgcgctggaacggggcggcgcagtgtgaagtgcgcatgccgagcccgctgccggcggagatgttgatgaataccttgttgttgccatgccattcgttgccggcaacaacggaaaacaccgaattacagtaa

SEQ ID NO: 447253 - DNA, 747 bp, Serratia marcescens
atgtaccaacaacttaaattttcattcggcacggcggctctgttgggggccctgacggcctcgcaggcccaggcggcaatcgccctggatcgtacgcgggtgattttcgatggcagccagaactcggtgagcctgagcgtcagcaaccagaacaagcagttgccgtatctggcgcagggctggattgaagacgagcagggtaacaagatccagagcccgctgacggtgctgccgccggtgcagcgcatcgagccgggtaagcccagccaggtgaagatccaggcgctgccggcggccaaacagctgccgcaggaccgcgaaacggtctactacttcaacctgcgcgagatcccaccgaaaagcagcaaaccgaataccctgcagatcgcgctgcagacgcgcatcaagctgttctaccgcccggcggggctgggtatcgacaccaatgcgccgccgccgcaggagcagctgacgctgactcgccagggcgacaaatacgtggtgaacaacccgacgccgtactacgtcaccctggtggatgcgggcagcagcaagagcgtgccggtgaaagcgttcgaaccgatgatggtgccgccgaagggcagcctgccgctgacggtgagtgcggcgagcgtgggcaacagcccggtgctgacctacgtcaacgactacggcggtcgcccacagctgagcttcagctgcagcggcactatctgcaaagtggtgccggagaagaaaggcgcctga

SEQ ID NO: 447254 - DNA, 651 bp, Serratia marcescens
atggcaaaggagctgatggcggaacgcgcttactggataagcgagctgcgatattacgccgtgttggcggcgttggccttgatggcgccgcttaccttgaccgcgctgctgtggctgctgccaccggcgcaggcggcggataactggcaagtagagggcgccaacggcgtgctgtatgtgcagggcgcgctgaccgaaagcgcctgtcggctggagatggacagcgggcgccaggacatcgcattgggtgaggtcggcaccgggcgattgacgcagacaggcgatcgcggcacgccggtgcgctttgaactgcggctggcggactgcctgcgcagcccggcgggcagccgcgatctgcgcactggcgggttggtctgggccaatgaccagccggcggtgacagtcagttttcgggcggttcgcgatgcggacaacccgcaactgataaaggcgcagggggtctcgggtctggggctgcgcatggaaaccgcgcggggtgaagatgtgcggctgggcgacagaggtgcgccgctgctgttaacgccggggcagaacagcctgagctacaccatcgtgccggagcgcacggcggccaacctggcggcaggcagctaccgggcggtggtggactttcatctgagctatgactga

SEQ ID NO: 447255 - DNA, 456 bp, Serratia marcescens
gtgagtgttctgttgagctctatacctctgttggctcatacggccaccacggtgacggtcaaagtcactgtggtggcgccgccgccgtgcgtgattaatggtaatcgaacaatcgaggtggattttgatgaggtcatgattgcccagatagatggcaagaattacagaatgccggtgaattattccctttcctgctcggggcagagcaagaacgcgatgaagctgcaggtacagggcaccggcgcggctttcgacaccacggcgttgaagaccaataaaaccgggctgggcattcagctgcagcaggggagcagcaagctggcgctcaatagctggctgaattttacctacccgaatacgccggaattatgggctgtgccggtgaagcagagtggtgtgaccctgagcgtcggtgagtttacggcgggggccacgatgaaactggattaccagtaa

SEQ ID NO: 447256 - DNA, 492 bp, Serratia marcescens
gtgaaaaatgaaatgcaagtcctactgctgattgccggactgctgggatcatacggcgccgcacaagcggcggacaatatggcgtttcgtggcaccttgctggcggcgccgccatgcaccatcaatgatggtaatcgcatcgacgtggactttggcgatcagctcggcatcagtaaggtggacggagtgaactatcgccaggcggtgaactatcaaatcacttgtgacggcacgagcggcggtagttgggggttaacgctgagcctgagtggaaccgccagcgggtttgataaacaggcgttggcgaccaacaaaagcgatttagggatccgcgtatatcgcgatgatcaaccgtttacgccgggcagttcgttgaaggtcacgctggacaatccgccccggctggaggcggtgccggttaaaaaagaaggtgcaaccctgagtgagggggctttcgaggcttgggcgacgctgcaagcggcttatcaataa

SEQ ID NO: 447257 - DNA, 543 bp, Serratia marcescens
gtgaaaaaggcgatcggcaaatacctgacggcggccgtgctgctgttggctcagatgacggccggacacccggtgcaggcggcggacaatgtacgtctgcatggcgcgctggtggcggaaccctgtgtgatcccgccgggggatgaggagatcgaactggattttggcaccatcaccgacaagtacctgtacctcaatacccgcacgttggggcagacgtttgaaatacgcctggccgagtgcgatatcagtctgggaaaatcagtatcggtgacgctgtcaggaacagaaagtctggtattgcccggtttattggccgtcagcgcaggtagccaggccacgggaatagcgatagggctggaaacccctgcggggaaagcggttccaattaataaaaccggcgacaaatacagcttgcaaaaaggcggaaatattatcacgttgcgggcctatgtacgcggtgagcctcaggctatcgaaaggaaaacgatcgggtacggagtatttggtgcagtggtcacgtttagtctggagtatgattag

SEQ ID NO: 447258 - DNA, 855 bp, Serratia marcescens
atgagtattttaaatggttttttggtgatgatgaagtatcttgtggttatacttttatgtattaataccgcttttgctgcagatgcagaatacgaaattaccgaaccttccggtggggggctctattggactgtcaaaattaaaataaaatctctcgaaatgtcagatcttggtttttctgttcaggattacaatcacccctgcaaagcgacctctttggtatattgcgatttgaatacctttttgaatggttctgctcctggagttaacggagtcatgattagtgagcaacaatcacctaaaaatgcaaaggctgctgcgggtttaaagtctattctggctagtaaaaatgaatatattgcatatatccataaaaatattatgaatccaattttggcgtctcctcccgtatgtttacgtatgtcgtattatgtaagttattggccagcggttatgggaaccatatcatcttgcgacggaggactgccccctcttccgtttcctgaaccaatatcatgcactatgaatgatgttgtgcttgaacatggcgtaattaatcttgctgaactcgatggccatcagacatcgaaatcctcatttgtcagttgcaatggcaagggaaccggccgtgtaacggtgaatatcagcgtattgaataatggatcgatcacgctggatagcacagggaatcttaaatcacaaatctatgttaatggtgttgcaggagggcagagtatgacaatacccgacaatggggcgttgataagtatcatatctaagttaaccgctgctaaaggagcgatgttaaatggcagtttccagaaaagctcaaccatagtgctaagcatattgtaa

SEQ ID NO: 447259 - DNA, 573 bp, Serratia marcescens
atggtttatatcgccctattgggtaaagattcttttatttcacatgggttggttttatttctgagtgattattttagcatgaaaaaaaggagggtggagtttgtcaatcagactcgtttggatatagccgatattatattttatgacacaagccgttcaatggcttgtttgattggcgatgcgttgcgatctggcatgaaagactgtgttattttctctttgtatgatggcaagccaagtctggctacgtggcgacttgggcgattgcaaaaatcgttatctaagcgaggtgatctgcagcagttgcgtttttatttagatgcattatggcatgagcgtaaaatacctgctgctagcagatgtgaggcagaagaaaaagaaatgctaacaactcgacaacggcaaatcatgcgcctgttggcaaaaggcgtcacgcccgcggatatttcagtgcgtctgaatatcagcattaaaaccgtcagttcccaccgtggggccgtgatgaaaaaattcggttttaaccgaaaaattgagctctataactggctgattttgcgtggcaatgagctgtaa

SEQ ID NO: 447260 - DNA, 1476 bp, Serratia marcescens
atggataagttcaaacatccgctggcgcggggcgccagttacctgctgatttacaccacggcggtgacgccactgcacccggcgtttgctgccggcatcaacgccgccaacggcaatacgcaggtacagcagggcaatgtgtcggtagtcaatatcgccacgcccaacgcggcgggcatttcgcataacagctataaagattttaacgtggcagcccccggggccgtattgaacaacgccaccgccgccggtcagtcgcagttggccgggcagttgaatgccaacggcaatctcaaaggcaaggccgcggagctgatcatcaacgaagtcaccggcggcagccgttccgagctgcagggcaagctcgaggtgtttggcaacaaggccaacgtgatgatagccaaccccaacggcatcagctgcgacggctgtggatttatcaatgcgccgggcgtaacgttaaccaccggcagaccgcagttcgacaagcagggcgcgctggaggcgctggaggtcaaaaaaggcaccgtcaccattggcggcaaggggctggacggcaacacgcaggattatgtcgatatcatcagccgcgccaccgagctgaacgggcaaatcaaagcgaaaaacctgtcgctgacccagggcgccaaccgcaccagctttaaggacggcacggtcactccgatagccgacgaaggcgcaaaaccggtgctggcggtggacaccaaggcgctgggcggcatgtatgccaacaaaatccgcctggtggccagtgaggatggcgtgggggtgaacctgaaagacctcaccaccaaccagcgtgacatcacgctgaacgtgaacggcaaaatcaccctggctggcgccacccgcagcaaaaccgaccttaacgtcagcgccagagatacgctcgtcgcaccgggcgccaccgtccaggccgatcaggacgccacactggcaagccagatgctgactaacgcagggcaaattaccgccagccgcgatattcgcgtattcagcgatacggtgcgtaacgtgggttcagacaccaaaatccacgccaataacaatctgtggatccagaaggatgcgcaaggcaacagggccaatctggttgaaaaccgctctgcgaagataatgactaacagcggtgatttgataatacgcacagaaaaactgaataatgtcactgatatattgcagacgtcatggagtgactttcttggatacaactcaaatttccctgggttatatatattaggagagggagaccaaagtattgatgaacctgggtattttatatatccaatatacagggtgaaaaaaccggcagatgtatcctcttggattggctcttttgattttatttctggaagatatgttaatctggaaagaaaagagtttcgaaaactgaatgttagtaatgccgctaccattggttcagggggggtgcttacatatattctggggggataa

SEQ ID NO: 447261 - DNA, 354 bp, Serratia marcescens
atgttgtatagcgatgacttataccaactgtttagcaaggaattagaaggttcatccataggaacagtatggtcggcaatgagagcagataacttcgacaaagaggaaatttcgtatgatgagaagaaaaattattttttggaactgctccaaaggcttatggatgatgggaaaatcaagttggcttcccatggtgttttcctcacagggaatgtagatgaacaaataaaaaaatttagagatgcattaccctcatgtgaggaaggcctttatcacgatttatggttcactcttgaggagtgccccggtggcatcgtctggatccatgacagcggctatgaagattggacctga

SEQ ID NO: 447262 - DNA, 1920 bp, Serratia marcescens
atggcactaaaccctgtcaaaatgagagatgacataacagctcttagagcgatagccgttatttctgttttaggttttcacttcggaatcccaggatttagtggcggatttataggcgttgatatcttttttgttatcagtggttatttgataagtggcattttaattagagacatagaaaagaataaacttagtctttttgactttttggtaaaaagagcatttagattactacctgcacttctggcaatagttatactgacctttattgcagggtattttattcttcagcctatagagtttaagaataacgccagagcatccatatcatcgttatttttcatatccaacctatatttttatttaactggcggctattttgatgcatttccaattaccaagccgttattgcacacatggtctttatctgtagaaagtcagttttattttatatggccattggtacttatggtaaccatgtccagaaaaatcccggctaaaattaccataactttatttaccattattttcttcttgtcttccctgtatgcagtaaacaggaacctaaccgcagcatacctgttgactccatttcgtctttgggagttatcaattggcggcttattttatgtaattaaactaaaaaaaataaaagatagcaaggcattaagcaacattatttacgcattgagcttagccgccatcatctttttcatagtacatttggatgagaaaatagtattccctggttattatgcattaataccaacggtgtgtaccggtttaatgctaatttttggtgaaaactctaatatagcaacatggttagagcgaaagccgatcatccatataggtgagataagctattctttatatttaactcactggccaactattgttatggtgacctttgttttaggagaaaaaaacttaattggtgggttaatatccattcctattagctatttcatcgctctgcttatgtattactacgtagagcagcgctatcgaaccgcatggaaaaatgaaagcaagaacaagctagtcgtaaaatatgtatttactcttgcattaacggttgttatctccgctaccgcggttttcagcgggtggatatggcgattacctgcggatttgcaaaagacaaactatgcatttgataaaaaagcatcagatagatatgtgtgggctaacagcaatggttttcaaaggaaagatataacccattctgaaaagataaaaatagtcgtaataggtgactcacaggcagctgatgttatcaatacgcttatggagtctaagtataataataagcttgatatagcgtctatacaagtagacgtcaaatgtggcattccttatattaacccgacagaaatagagaactatcttaaaactgttaaccttgcggttatatcatcaaacggtcttcaggagatgtgtaaacgaaacattctcgatacatttaatgaattcaaccaaagaaacatgaaagccgctgatttcatcttgattgccatgaactggaaggatttcaacgttaaatacatcaatgagacgttggataaaataaaagagacacaatctaacgctcaggttgttgttattggaagaaagagcttgaaggcaaatgggatttttatcttcaataagagcaaccagagtgaagatgtagattcctttgctgcaaaatatatcagcgatgatatattgaaaataaatgagagtatcgcatcatccttgcctaaacgtgttgaatttttagatctaatgaatgtcgtttgcccggggaaaaaactctgtcgaatagtcgatgataagaatcatataacatatggtgacgaaacgcactttacgaaaagtggagcagttctcttctcaaatgaaatagtatcgaaactgggaatacttaagtcctaa

SEQ ID NO: 447263 - DNA, 294 bp, Serratia marcescens; identical to SEQ ID NO: 446624

SEQ ID NO: 447264 - DNA, 225 bp, Serratia marcescens
atgttgattaagccagtggccaaacagcatggtttttcccctaacctctggtgccaaacgcccaacggcatcaatgtgctgcttttccatcacaagaatcagatcgtattctcgacacatggttgccgtcagttgctgagctttgtgtccgtccaaggaaagaccgtgcgcccgagcagtatcgctggcatgaacatcggcgggcttgcccaccaaagcgcctaa

SEQ ID NO: 447265 - DNA, 942 bp, Serratia marcescens
atgaaattaaactatttcacttacagaataaccgacaatcgaaatcagcaaatttattttgataatatctcagagataataaaaaatttctgcctgcatagaaagaaaccactttttgaaaaaaacagaggtttaaagagactttatttagcaatgccttcatcattcgatggaatatattacctgaccactccagcaattaccacagcatttaaggcagttgatcgagctaccggtgtagtaaatgatttgtcatcagtgcttggtaaagatagtctcgagaaagtaacttacttttttattgaccctaaactctctttaatcggagtaaccgaaggtaagggtaatgctgatattgatgacttacaattttttattaacgaaataataaaccaagattttaaatcacagatatttacatttgagctttgtacattaaaaatagaaataaaatccagatcagcctcaaagttcaaacttataactgaagctagagtgaagttgaataatgactcagttgcagatgtaatcaatggcttatttgggaaagagccatcaagtaatatggaagtgcaaatcatcgttaaaaggaaggacaggaaggagaatgtgaaagattatattcagccgctactgacaagcttatctacctctgatgataaagactatgcggaaatttatttcagagctaaagcagatgaattccagtcgaacgtgaaagagtttattttagaccaaaaccaaaatatctttgatataataaaccctcatcttaaagcaaagattgaagagcaaatattagagaaaagatataaaaatcaagttgttataagtgagtgtgacgcttatgcacaaaaatttattgggcgcatacattcaactattactgactcactctggaacgagataaaaacagaaaatcaccataaaacaagaggttga

SEQ ID NO: 447266 - DNA, 474 bp, Serratia marcescens
atgaccaccgcgctgttgattatcgatgtgcaggaagggttgtttacgccgccgccggcggatgccgcgggcaccgttgcgcgcatcaatcagctgagcgagcgcgcccgccgggccggtgcgccggttgtcgtcattcagcaccatacgccggacgatgagttgccgcacggcagcgccgcctggcaagtgctcgcggcgctgacggtggcgccgggcgaccatcgggtggagaaaaccacgccggactccttcctgcgcacctcgctcggcgcgttactgatcgccaacggcgtatcgcagctggtggtgtgcggctatccggtgacgctggcggcggatgcgcatacctgccacgacaaatcctatgccgatggcctgctgatccgcacccaccataacgagacgctgtcgaacatcgacagcttcggcgtgccgatccgcgcggtgcccgcggcggacatcgtgttctga

SEQ ID NO: 447267 - DNA, 669 bp, Serratia marcescens
atgattgaatccctgttcccccacctgcgtctggaccaactgtgggacgccacctgggaaacgctgtacatgaccggcatcgccggtttggccacgctggtgctgggcatcgtgctcggcgtgctgctgtttttaacctcgaagggccagctgttgcagaaccgggcggtctactcgctgatctccgtgttggtcaacgtcttccgctccattccgttcatcattctgatcgtgctgctgatcccgttcaccaagtcgcttatcggcaccattctcggcgcagatgcggccctgccggcgctgatcgtcggcgcggcgccgttctatgcccggctggtggagatcgcgctgcgcgaggtcgacaaaggagtgatcgaagcggcgcgctcgatgggcgccaaaaaccgcaccctgattttccgcgtattgctgccggaaagctcgccggcgctggtttccggcatcaccgtcaccctgatcgcgctggtgagctacaccgcgatggccggggtgatcggcgccggcggactgggcaacctggcctatctggaaggcttccaacgcaaccacagtgacgtgacgctggtggcgacgctgacgatcctgctgatcgttttcgtcattcagttcattggcgacaccctgacaagaacgctcgataaacgttaa

SEQ ID NO: 447268 - DNA, 1263 bp, Serratia marcescens
atggcaaaaatgacagacatacaaatcaaggcatggatcagagctgacgaacgcttcgaagcaaggtcagatggcaatggtttatctctctgttttccaaagaaatatgcagctccattctggcgttttcgctatcgtttctctggaaaacagcgggtaatgggtatcggttcctatgctgaactctcactagcaaaagcgcgagagaccgccaaagaactctctgcacgtgtagcattgggttatgacgttgccggagagaagcaagaacggaaagctgacgccctcaaaaaaatagagtctgaaaaacatgcacttcgggtatcccaattagccagcgaatattttgaacgccagatacttaaacgctggaagcaccccgacatactgcgccgccgaatcgaaaaagatataaatccaaacataggcaacctgcgaatagaggacgttcgcccctatcatattgatgatatgttgcaaaagatccttaaacgaggtgcgcctaccgttgccaatgacgtcctcagatggactcgacggatctttgattatggaatcaagcggcacatgctggctgctaatccagcaagtgcatttgacatctctgatgccggaggacaagaacaaagccgtgaacgctggttaagtcgagaagagctggtacagctttttcaggtaatgcctttgaccaaagggttttcccgtcaaaatgaactaactatgaagctcattttagccctatgctgccgtaagatggaattgtgtggtgccagatggtcagaatttgatctggatgaaggcgtctggcatttacctgctgagcgcgttaaaaacggcgatggtattgatatcccgctggcggtacccgttgttggctggattaaagaattaaaaatcatgtccggcaacagtgaatgggttctcccagcaagaaaaatgcaacatcgcatgattcctcatattcaggaaagtacattaccagtagcgttggctaaaataagatcaaatatgccagatgtgccaaatttcacgattcatgattttcggcgaacagcccgctcccatttagctgcgctgggggtagatccggtgatagcagaacgctgcttaaatcataaaatcaaaggcgttgaaggtatatataatcgctatcaatactttgaagaacgtaagcaagctttgactgtatgggctgagctacttacaacattggaaaagggtaataattacaacgtagaaccaataagaaaagaaatagcgtaa

SEQ ID NO: 447269 - DNA, 867 bp, Serratia marcescens
atgaagaaaataaaattagcatttattcttgcctttttttcaataagcagtacaagtgccgaagttatcaatccaatatacggcgctacacttaaagactatatggaattcaagccgaagaacatagcaactcagaggtactattatggtgccgataaagaaaataatttttttgatttctacgtccctaaaggattagataaaaaaaagccagccatagccgtgatacatggaggttgctgggactcgaaattcgagggttttcaacaggcaggagaagttgtggacttcttcttgaagaatgggtacgccgttttcaatgtggagtataccaaagcagatacgagcggaggatatccgacaacgtatagtgatatttcaaatgccttgattaagataactgaggttttgaacgacaagcagataactgagtccggaatcacgttaattggccattccgctggtgggcatttagccagctgggccgcatccggcggagaggaaactcattcgaaaaactacttgagtaaggtaaaaataaatcaggcaattggtctgggtgcaattgttgatcttaaagttgcagaaacagcctgcccaaatatcattcgatttggtggcatcgataagatatcaggcaaaaaaatggagtcaacctcgccgatactaatgagaaataatttcaggattaccttgataaatggaggggaggataatatagctccgggtaaatatgcagaagactatgcaaaaacacacaaagataatgtcattatcagcatgattcctgaagcgacacattatgatttgatgtcgtcaaaatcaggggttttaaatgtcgtgttgaatgttttgaacgaggattaa

SEQ ID NO: 447270 - DNA, 1470 bp, Serratia marcescens
atgaacatctcactcagaaaacaatacaatccttacataaatggcgaatttattccatactccggaataaccttccaggccgtcaatccggcaaccggggaagtgttgacgaagatcgcccgttgtggacaatctgaagttgaatccgcagttatcgcggcccgaaacgcttttcttacctggaaagaaacgtcttatgaggagcgtgcaagattattaaaccgcttggcagacgaactcgaaaaaaacctgcaacgattagcgttgattgatgccactgatgtcggacgacgtctggcagaagttcgtctagattatgagaaagcgatcgctcaatatagatatttcgcggcagccatttcaacctacgaaggctacggaaaacccattcccgatggttatatggtcgctaaacgcgaacccataggtgttattggacagatcattccctggaatgtccctgcgctgatggtcgcgcttaaggtagcgccggctattgcagctgggaataccgtgattctcaagccagatgagaatgcatcaatttccacattagagtttgctgctgtggcaggcgaaattttaccaccgggtgtcattaacgtcgtgcccggctttggcgatgaagtcggtaatgcaattacgacccatcctttagtgtcgaagttagcatttaccggcagccctgaggtcggacgccttatcggccatgccgctgcagagcgtttgatcccggcctcgttagaactcggaggaaagagccccaacattgtattccccgatatcgaagacattgatgccgttgtcgacaatgcattgttcgccgcgatgtactgcaacggtcaatcttgccttgcaggcactcggctattcatacatgactcaatttatgagccgttcgtcaaaaaactgatagggaaagcatcaagtttaaagattggagacccacgcgacgattctgtccaattaagctgcctggtatcagccaagcaagggaagcgagtgcttgaatatatcagcattggaaaagctgaaggtgcaaaagtcctgtatggcggagatcgtgttcaggttgaggggtgtgagcccgggtattttatacagccaactattcttgaagttaagaataaaatgcgtgttgctcaagaggagatcttcggtcctgtactaagcctcatccgctggaacgattatgatacaatgctgcatgaagcgaacgatgtgccttatggcctcgcagcaggcgtttataccactagccttgaaaaagcgatgcgtacggcagatgcacttgatgtgggctctgtttggataaatgaatacttcaaccttgccagcggcgttcctttcggtggagtcaaagagagcgggatagggatagaacattgtcaagaaacgcttgatctctattcaaacattaagtcgattaccattaggaatcgagtagccaaaccctggtacgcggaataa

SEQ ID NO: 447271 - DNA, 1026 bp, Serratia marcescens
atgagtaagtcgttagcatcattctcaaggttagatatcgcactgcgaaatacacagtgcagcgataatattatgcctgcagaagccttgctgttcgatacccaagacctggattatgctcaagagaaagtgagtgaggtttattgcccatatcgtttcagtcttggtgaaaaaaatgaaggaaacgcaggtatgtttagcctgccgggagagaatatcgtgctgtcctggtttgcttatgggactgatattctaattgaaccggaaaactttagtgattttatattgacgttaacgacactgtctggtgaatctgtgattcatagcaccaatatagtaaaacccggccatgaaaattctacagttgtcattgccgcagacgactcgccacgttttctatatagctcagataacgtgcagttgggggtccgtattgacgctcgctatatggatgcactatggttacgtttctcagagggagaaggcgagttttgctctttcgttttgctcgggggagaatggaataagcgctggttggcctctgtagaaatgcttagacaactgctgcttccaacaatacctgccgctacaagaaatatgctgttgcctcgggcagaggaattattggtactacagcttcttgctgaacgatgggccggttttacggataaacattcacgcggaacttccaaacaaaacctgcctgcttacttacggcgatctgttgaatatattaatgaaaatattgatagccctttgaccttatcggagattgcgagtgctgctcaatgcagcatccgtactttgcaacgggtttttcatagttggcgtcaaataggtataatgcaatatgttaaggaagtccgcttgcggaaagtgcgtgaggatttactgcagtcagagataagctcagtgacagaagtggctactcgatgggtttttttccatttaagccagtttgctgcagattaccgtaaacaatacggtgaacttccttcggaaactcgacgcaggcggcagctttaa

SEQ ID NO: 447272 - DNA, 765 bp, Serratia marcescens
atggcttatgtgataaacaacagaattatttaccgggatgatatctctgagctctgcgttattgatgatgaacaatctaaagtctcgttaacggcgacggttaatagattgttgttattgtttgtacggaacgataacaaagtattaagccgtgaatttttgctgagccaggtttggggcagctatggccaaatagagtcgggcaataatctgaataatgcgctttctcagttgcgcaaggcgtttaccgaactgggagaaggtgaagtgttgatcaccttgccaaagcagggggttttgcttcaggcgggggttgcccgcacggatgagacaggaaaccaagaaaagcctgaattgagtaaaatacttattgggaaagagaattcccggcggatggagtatttatggctctgcgtggcaatggctgtttttatcggcggcctggtgatgttggctgtggggatgcgccaggtttatattccgacggcgaagtttatacccgctcagcgtattgagaattgtgaaatcgaaataattaacagtcaccacaagctggtgcgcacgaatatttcggtgcaggatgtaaggaacaccatcgcggaaggcggctttgactgcaataaaccagcaacggtttattattataacggcggtgcgttggttcttagcgccttgcactcgatggcgacctttttcgcctattgcccagaaaatgaaaaaaacattaacgcggcctgtgagaatgtctatgttttcaaaaaataa

SEQ ID NO: 447273 - DNA, 1017 bp, Serratia marcescens
atgaataaaaaggttattcatatgttaattggcgtgtttattggcgcagtcgtcagcaccctctattttaagcaattcgctaaccagaaccggcaaaatgtgaatgaattgtcactgagtatggcgatagaacgcgcgctcccatccgttgtatatatatattctaaagattgtaatgatgttgtttatggttgcccgttgggcaccggcgttattatggacaatcgtgggcatgtggtgacgaattatcatgtggtcaatggcgtcaagaacatggtggcgttgctcagcgacgcgacggtaagagaagcgatcgtcgtgggctacgacaaactgaccgatttagccgtgatgaaactggatcctgcggcgaccacgcccattcgtatcgatgaagaaaagaaaatcaaagtcggtgattttgttttggccatcggtaatccttacaatctggttggctccgtttcacacggtatcgttagcgctattggccgcagcggcttcggcgtcattggcagacagacgtttattcaaaccgatgcgccgatcaataaaggtaactccggcgggccactggttaatgcatctggagaaatgatcggcatgaatacgtcggttttctcggtagatcaggatctgaatagcgtaaaaggcatcagttttgctttgccggtgcgcctggtgaataaggtaatgaaaaaaatcgtggcggatgggcgagtcattcgcggctgcatcggcgtggaagccgctaatgtctccgctatccatggaaaactgggggggcgatataatgtgctggtgacaggtgtaaaacactcgggggctgcgagcgacgccggcttacaggaaggcgatatcattaataaagttgcagggaaagtgattgataatgcccaggaagctttgaatatctttgcagagacgccgccgggccaacatgttgaggttacggtggaaagaaaaggtaaaaacagggtttcatcgctgaaggttgaggattgtgataacgaataa

SEQ ID NO: 447274 - DNA, 333 bp, Serratia marcescens
atgaacgccgcttgtccgcagcgcgatcctggcctgcagccggaaagaacggcgttggcgtggcagagaaccgcattctctctattgctgctggcgcttatcaccgcgcgtaccggcctttaccgcgaagaatatgtgctcgccgcactgggctgcgcttcttttttcgtggcgatgctgttggtatttggctcttttgttcggcaaaaatcgctgatgggtgcgatggcgctcccgcttgtctggtcggcgtggtttaaaagattgctcagcctcgccctcttgttcaatgcgctgggtctcgcgctgcacagtgcgctcatgctgttatag

SEQ ID NO: 447275 - DNA, 2340 bp, Serratia marcescens
ttgctgtttttgttggtctggccgatgacgaaaaccgctgccgccggatttgatgtcaaaaccctggcgcagctggggtacaacgcggatatcgccgaatttttcaataccgcccggtttttgccgggcgtgcaccgggtgacgctggaggtcaatgcagcgcagcgttaccaggaagaggtgcgtttcgattcgcagggggcgctgtgtctggatgaacggctggcgcagacgctgcgtttgcgggtcacgccgccgccgggggcctgcgaacgtttcgattcgcactggccgcaggcggtggtgcaggtgtttcccggcgcctttcgggtggaaatcaccctgccggaggcggcgttcgatgcggacaaactgcgcagcgagcagtcgggcggccatgcggtgctgctgaactacgacctgtacgccaaccggcgtcaggggcgctacggcaatcagcagacgctgcaggcgatgctggagccgggcgtcaacctgcgcaactgggtgctgcgcaatcgctcaagctacaacaacgacgagagcggcagccggctcgaggtatacgagacctcggcgagcaaagactttcccgcctggggggcggtggttcagctcggtgagttcagcgccggcggcgcgctgagcggcaacgtgccgctcagcggcgggcagctgctttccctggcggccggcgcacctgatgcggcgctgacggtgccgctgcagggcagcgtggcgagcccggcgacgctggaggtcaaacagcgcgggcaggtgatgtaccgcaccctgctgccggccgggccgttttcgctgagcgagctggggccggtgatggccggggtggaggccgaggtcacgttgacggaaaccgacgggcggcggcaacgctttacggtcacccccgacgccggcgacccggcgggccggacgggggggtatcggctggcggcggggcgctaccggccgtacggcgccgggcgtgagggcgcctcgccgccggcgctgctgctgggtgagcaggcattccgtctcggccgggggcagataacggcgggcgggctgctggcgcgcacctaccagcggctgggctggcagggcagtgtgagtgacgatgccggcaactggctgtcgggcggcgcgaccttcacccgtggccggcagtccggcgtgcagctggaggctcaggggcaggtggcgctggggccccatctggcgctgtcgctgtcgtcgcagtaccgcaccgaaggctttcgggacgcggacgaagggctgaatccgcccgcagaggcggaaggggcggcccggcagcgctacaacggcggggcggcgctctcctggcgcaccctgagcgccggggcgctgacctactcgctgtcgcacgaacgctattaccgcgacagccggcgcagctggacccatgcgctggcgtacggcgtcagcctgggaagggcgacgctgagcgtcaacctgcagtcttccgcttacgaccgtgcggcggtctacgccgggctgagcctgccctggggggcgggcagcgtcagcagccggctgcagtcgcggcgcaacaatcagctgacgctgggcggcagctggcaggggccggtgagcgagcggctgaacggctatctggacgtgacgcgggacgcggacggcgagtaccagggcgccggcaacctgagcggcgagacggcgtatacccggctgtcgctgggggtctcgcacagcgggcagggcagttcctcgctgtcgcttgcatcgtctggcgggctgggggtggccaacggcacctgggtgacgtcaccgcagcgcattggcgacaccttcgcggtgatgagggtggcgggacagtcgggggtcagggtgtcgggcggcggcagcggcatgacggattttgccggcgacgcgctgctgccgatgctgatgccttatatgccgttgcgcgcgcaggtcgatacgctgtcgctgccgctgaacctgcggctggacagcaccgaagcggcgttcgagctggcgcgcggcacggtggcggagcggcgttttcgggtgaccgaagtgcgccagctgctgctgaccctgcgggatgagagcggcgcgctgctgccgaccggggcgtcggtgcacgacgagcgggggcagctgctgggtacgctgataggcgagggcaacctgatgctggtgaatgacgatatcggcaaggcgctgcgggtgcggcgtctgaacatgaacgaatgcgtggtgagttacgcggtgccggcggcgttcgacccgtcggtgttgtacgaagagggcgatggcgtctgccgtgcggcgggcggctcgtccgataatggatga

SEQ ID NO: 447276 - DNA, 636 bp, Serratia marcescens
atgaataaaattgcattgcgcgtgatggtagcgtccacgctgctggtcgccgggggcagtctggccgccggcccgagcgcggaaatcaaagtggtgggggagctggtggcgccgacctgtgaggtgtcactcccgaacgacggggtgtttgattacggcagcatcagccatacgaaaatcagcagggacaaagcggtcagcctggggataaatggtaacggcaccatggaggtgaaatgcgatgccgaaacgccgatgaccttcaacgttatcgacaaccgtctgggcaccgccagcgaggcgggaaaaaccttcggtctcggtagcatcaataataccggcaagctgggattctatgcggtaacagcttaccacccgcagattgatggcaaactcggtcgactgttcgtgacccaggacagcacgatcacctccccaacgggtagcgtacaactcgaacacggcaagcgcgtgggctgggcttcaaatgccaatacgctggccatcggcaagaccttcaccgcaatactgagtgtggaggccttcctggccaaaagcggcgatatgcacggcggtatcggcgaaggcaccagtctggacggctccaccacgctggacttcgcgttcggactgtaa

SEQ ID NO: 447277 - DNA, 642 bp, Serratia marcescens
atgatgaaaaaaacagtaatctctgcaagcatcgccgcaatcctgatgatggcgaatcaggtctctgcggcctctatgtcgccggaattgaaagtgaaagggcaaatggcggtgccatcctgtgaggtgtccatcaccaacgacggtgttttcgaactgggtaagttgtccaatgggttaatcaactcagcggcggccacggcgttagccaagtcgcaaaagcagctggtcgtaaactgcgaggccgaaaccttcctgaatttcaccgtggtcgataaccgtgaggggaccgccagtgcaaccggcagcgctcactttggcctggggaacgtcaatggcgacggcaagctcggttattataaagtcaacgtcctcagcgctggggttaatgccattccttcggcgctgttcagcgtgaagaaaggcaccacggcgttcaccaccgtcagttccgcctatatcgataaaaacaacatcaccggctgggcaaagtcgggcaacgtacaaaacagcggcaagctgtttaccgccatgctggaggttgagccttatctggcctcggccaaagacatgaagggcccaattaccgacaacgtcaaactggatggatcttccacgctcagtttcgcgtacggcatttga

SEQ ID NO: 447278 - DNA, 612 bp, Serratia marcescens
atgaaaaagagactgttgcaaacaagcctgatcgctttatgggttcttttttccggtcaacttatcgctgcgccttcggctgagttgaaagtatccgggaaaataaaacattcaggatgcaccgttatcgccggtaatgacggcgtttatgattatggcgccatgcggggaggcgctcggggtgaggcgcagagattaccgaccttgaaacagacctggcaggtacgctgtgaaggcgatgcctatctggccatcattccgacggataaccgcgcggccagccgcaatgagccggatctgcgccgtttcgggttgggcaatgcgccggatgggcaacccgttggctattttctgttggggttgtctcactctgccgtaaacggcttcccggctacgttgcgttcacgcaatgtgtcagtgccgccgaacacggaagccgcgctgatttccggtgagcgtaccgattggttgctggcggatgcgacgcgcgccgccggccagacctacaccatggatatttcagtgacgccggttctggacgccaatattctcgccgtcgataaagtggaactggatggctctgtcacgttgaatttcgtttttgggctctga

SEQ ID NO: 447279 - DNA, 1401 bp, Serratia marcescens
atgaaggtactgagtaacataagacctacccctgaacaactttcattggttggacagaatagagagggggtagaagttatttgtggagccgcaggtagtgggaaaaccacaactgccttattgaggctaaaatccttatgctacatgtttaatgtcaggcatcagagagaagggaataccgatcctgtaaaaatactagtattaactttcaataaaacactagctggatatataaaagagcttgttcatagtcaactacctaataccattaatgttgaattggaaataagcacctttagtaagtgggcatatcaaaatgttagaccaaaggaaaaaatagtaagttattcaagtggtcttctatattcttacgcccgggctatcgattccctatctcatgattatgttgtgaatgaagttgagtatcttcttggaagatttaaaccagagaatttatctgattatattacagccgagagaactgggagaggtattagcccgagagtagaaagaacagttcgacagagaattttagatgaggtagtgaccccatataaattaaagctacaacaaaacaatgccgttgactggaatgacgttgctatagcaatgagagaggaagtggattccttgggttatgaaatcgtagttgttgatgaatgtcaggattttacagcgaatcaactacgagctattaaacatcatttaggtgaacatcatacggctacctttgtaactgatacagttcaacgaatttatgcaagagggtatacatggtcagaagctggttatgacgtaaggcctgaacggtctcatattctcagagcgaactatagaaacacaagagaaatagctgcgttcgcagcatcggttatctcaggaattaatgttgaggctgatggagcattaccaaatttaaatgaagcaaattcatccggaaacctacctaaagtgattgttggattttataacaatcaagtccaatatgctttggattacataaataaaactgtggatctgacatccgaaacagtagcttttttacatcctaaaggttggtttggctatctaaagccaaatttgatgaaaagtggaattccctttgttgatattacaagggctgattattggcctgatgatgaagaggttaacgttgctatttcaacattccattcagctaaagggcttgaatttgattatgtctttattcttggattaagtgacgagagcacggcgtatcctgaagagttgatcgatgatcaattacttgttttaaggcgattacttgctgtagctattgcgagagctaagaaagatgtaattataggttataaatcaggagaggaatcagatttaattagatttttttccccggggacattcactgaggtgatcttataa

SEQ ID NO: 447280 - DNA, 894 bp, Serratia marcescens
atgagtgttgcgatggaaaaagctcgcattttagtgattctttatggtaaggagctggctagttcaacgacgttatcttcgttattaaagtttgattgctctttatttgatttggtcgtaataaataatgggccagcggttctgagtgatagtggcgatttttatcaccagctcgaagtgggtttccacactttcgagttgatgaacaaaaccgagaatatgccgcttagcattgcatataacggctttattgatgcgcatccgaatgcgcaaaaatatgtgtttctcgacgatgacactgaagtgacagaaagttttatatcccgtcttgttgacgatgatgtgtcatacgacgttgaagtgcctaagattgtggcaacggatggctctctggaatcgggggttgttcagtatccggtcgaagacgacgttcctgtcctggaaatgagaattgttgatgttggcaccgtttcctctatcggttcaggcttgatcttgactcgccaatttattgataaattccgaactgcccacatgcctatttttgataatcactatgcgttgtatggcgtggactatagcttgttcagaaatatgcgaaagcttttagctaaaggcgttccttttacctttacaagtttttcttctataaaccactctttgtcccgtttgcagaaagggacgctgagcgagcatacgaaaagggagcgcctgtatgacattatactgtctgcgcggcactatcccgataagtcctatattaaaggccttgtaaagtcactcgttcgtgcggtgcttagccttgatttttatttggtttttcatattatctctacttttttcaaaggctatcatccaaggtgcaagcaatacatcaccactgggaaaaagtaa

SEQ ID NO: 447281 - DNA, 2376 bp, Serratia marcescens
atggaacgtcgttctctacttaaaaatagtatgctgggacttcttgctttgtttatccccgcccgaaaaagcgcggcagaaaataccgttatcagcaatgcaatcggtcaaaaagataaaatatcgattaccaatgttctgattgaaaacataaagcaaagatcacgggaggagagctatctcttggttgggaatatcggctcggaccctaaaaccacacggaacaggatccctgttttcattcagcggcaagacggcacattaacccccattcctcaacctattcagctcggtagcgacggattgccggtacttaacggaaagccgatcgagatattcgcaaacaaacagttctcgctggcgacttacgataaggcccagaatcaacaacgctactacgcatccatcaccggcgaaaagttcgcgcgcttaacctccgaagcaaaagcttacaccattggcgatacgacgttagaccaattattggccattgacgtccaaatgttcggcgcgcatccgatcacagaaccgggctatgaaaacttcgacagcgctcccgcttttagagccgccattgctcacgcggcggcggccggtggagggacaatacactttacgggaaagtacaaatgcttatcggccggcggcgagtacgttttgccctacgatgacggcagcatatcaccaaaattttctcgtcttgcactcgatagcgatatgcaagcagaggaaaaaatcaccatgccggtatgcctggatatcccctcaaacgtgcaactgcgggccgataatacgaaaaatagccacattgactttggctggaacagggagtcgggcgatatatcgacaaaacaaatgatcggtattgttttccgcgtttacgggtacccgcaaaaaacacggatgaatacttatgtcagcaacgtttcgattgacaattttagaatattgaatgcttttattggatggatatccgacggtgtgatgtttgcggagtcacgtatcggcaatatattttattacaactgcgggattcccgcgatcgctcaaggggtagactcctgtagctggggaactcagacaattgccggcaactatgcaggtattgtcgttggtggcatgtggctgcaaagaaataacgttcaactcggcggtgaatgggtcccaccatatcgtaacaatgatatttacgccctaggctggtgcgacatgctcaccatcgatagaatcgccgtcggtaataatttatcttggtcagatcgacaccgcgccatcgataagtttttcgacgattattttttcaagtctaaaaactcagccacgacatcggaaggtgggcggctctccaacgtcggtatggatcttaagaccaagtcatcctatgccgaaaataaataccgcggcatcgccggccgtgcatttattaacttcagccgctacaatcgtggaaacaataacttaatcatcaacgacctgaaagtttacttcctgcaaagaacgcctattttatcgagctatgggcaaggctcgatatattacggagaggttaagaactcttttatcgaaagagtcgggttttctgaccacgccaaacctaacactgaagataaccgcttttacgagtcgggtgtcgacgagttgaataaagatatgaaaacgctccctgcactggtttgtgaaggtagcctctcagcaatccgtgcttcaatagcaagttcggtttttgcaccaatcagcacagtatcattgccaatcaataatgtgatttctactctgctttacacccacaatatcagtacggcgctatccttacccaaagtgtcaaacaacgcattgcgctacctgagtttatgggatggaaaaaccggtgcggttatcgagcgtgtttggccggggagatttgagtcgcaacctatcgccttcgacgccgaagacaaaaaccctgaccatcagtttaagcatcgggtgaagaaatttacgccggagctatacaacggcagttccggcgataagctatctcttgcacaggccaaaggttcctgcgtcttcatggcggggatcaccaaagtctttatagaaatcacattaccgccccagaccgacgggctgcaaaacgccttgaccctcggcgctttacctaaaaataccgattctcactatgaattcggttcaaccatgccgattttgcatgtgataaatgcggcgctaaaaaacgaaagcgcacagattatgacggcggctctcaacgcggatcgcctgaccctgagctatacgcaaaacgcgcaaagcgataagaaagtgaatatccatgatctgatggggggaagcgtattgtccctgtgccttgaatacaataccagctggcacatgcagtaa

SEQ ID NO: 447282 - DNA, 861 bp, Serratia marcescens
atgaaaatactgttgaccggctcgaaagggcaactgggcagctgtttccgcgatcggctgccggccgggtgggaggggctggcgacggacagcgacagcctggatataaccgatctggccagggtgaagcaggttgtggcggattaccggccggatgctatcgtgaacgcggcggcgtatacggcggtggacaaggcagaaagcgacagcgaactggcggcgcggatcaacgagcagggccccaaaaacctggcgcaggcggcggcggagagcggttgccggttgatccacgtctcaaccgactatgttttcgacggacaggcgcaggcgccgtaccgcgaggcggatgtgaccaacccgctgggcggttacggcaggaccaagcttgacggggaaattgcggtggccggcgcgcatcctgaggcgatcgtcatccgcacggcatgggtcttcagcgaatacggcaataacttcgtcaagacgatgttgcggctggcgaaagagcgcgatgtgctggggatagtcagcgatcagcgcggttgcccgacgtacgcgggcgatatcgcgcaggcgataatcgggttgctgcagtgccgggcagagggcggggtttaccattactgcggcgacagggaagtgagctggagcgaatttgccgaagcgattttcagcgaggggatggcgcagggcgtgctggagaaatcaccgcgggtaaacggcatcacgaccgaacagtacccgacgccggctaaacggcctgcctactcgagcctgaactgcgggaaaatcgaaagcttaggtatctcacgttcagactggatgaatgcattgaaaagtacgataaaagcaaaaactgcataa

SEQ ID NO: 447283 - DNA, 1458 bp, Serratia marcescens
atgggactagtctctaatgcgaagtgggttgctttttcgcagctgtttaaaattggtgtccaggttcttaatattgttgtcttagcgcgactcatgccgcccagcgaatatggcttgatgtcgatggcgctggtagtgacaaactttgcgttattagtcagggatcttggaaccgcagcagcgatcatccaaaggaaagatcttcagaatgagacgatcaatgcgatattctggttaaacatattgatgggtttgaccattgccggcattattgtcatattttcgccggttatagcgtatgtattccatgaaccgaggctgattgcagtgctctgccttttggcaataagcttcccattggcaagcagtgcctctgcgcacatggccttattggaacgcgactctaaattcaaaaaagtggcctctattgagatcagctcatcagtggttgccgtcattgtcgccattattatggcctatcagggattcggtgtttatagtctggtagcgcaaatattggttctgtcgctgatgtcgtcggtacagctttggcttgcgtcaaaatggcgtccttcattcaataacatgataaataccaaggaaataaaagggctgattggttttagcggaaacttgacactgtttaattttatcaattacttctcaagaaacgctgatagcatgatgatcgggcattacatgtcagcagcaatattgggggcctattcactggcatacagaattatgttgttcccgttgcaaagtatgaccactgtcgcttcacgggcgctgttccctatattgagtcagcatcaggataatagcgacaaggtacgggctacctatttgaatgtcgtttacgtgatactgctagttgtctttccgctgatgaccggattagccgtgctgcgcgagccgtttgtgcagttggtattcggggctcaatggtcaatgaccgccgcaatactattatggcttgctccgactggaattattcaggctgtattaagcacgacgggatccgtttttatggccaaaggacgaaccgatatcctcatgcgccttggtgttttgggggcgatcttgcaggtcggcgcatttattattggggtcaggtttgatattgacacgtttgttaaactgtattttatcgctaatgtcattaatttcttcccggtaatggtgatcttgatgtggttgatcggcggtgctttaaaagatgtactctttaaagtttaccgcattcctctttccaccataattatggctggggggattatgctgctttgtaagaatattaagcaatataatcatatagataactttgtcgatcttatcgtcgtggccgtatttggcgccgtgctgtacgcggtgtcgctgtttttgattgactccacgtttaggaaagcgttgatagcaaccacggttaaggtttcaaaaaaaatcggtatcgcttaa

SEQ ID NO: 447284 - DNA, 1065 bp, Serratia marcescens
atgaaaattatcgttaccggtggtgcaggcttcattgggtcggcggttgcccggcatatcattaatgataccaatgaccacattctggtgctggatagcctgacctacgcaggtaatctggagtcgttggcgacgatcgccgacagcgaccgctacgcgtttgagcaggtggacatttgcgaccgcgcggcgttggatcgcgtgttcgccaccttcaggccggacgccgtgatgcacctggcggcggagagccacgtcgaccgttccattgacggccctgcggcctttatcgagaccaacatcgtcggcacctatacgttgctggaagcggcgcgccaatattggctgaccctggacgaagcgccaaaacaggcgttccgtttccaccatatttccaccgatgaagtgtacggcgatctgcacggcaccgacgatctgttcaccgaaacgaccccttacgcgccaagcagcccgtattccgcctccaaggcctccagcgatcacctggtgcgcgcctggctgcgcacctatggtttcccgaccatagtgaccaactgttccaataactacggcccttatcacttcccggagaagctgatcccgctgaccatactgaacgcgctggacggcaaggcgttgccggtatacggcaacggcgcgcaggtgcgcgactggctgtatgtcgaagatcacgcccgcgcgctgtacaaagtggtgaccgaaggcaaagtgggggagacctacaatatcggcggccacaacgaacgcaagaacatcgacgtggtgcagagcatttgccgcctgctggacgagctggtgccgaacaagccgggcaacctgagccggtatgaagagctgatcacgttcgtgaccgatcgcccgggacatgatatgcgctatgcgatcgacgcctcaaaaattgacgcggagctgggctggaagccgcaagaaacgttcgagagcggcattcgtaaaaccgtcgaatggtacctggccaacgaagcctggtggagtcgcgtgaaggacggctcctatgccggcgaacgcctgggtctgacacgttaa

SEQ ID NO: 447285 - DNA, 870 bp, Serratia marcescens
atgaaaggtattgttttagctggcggttcaggtacgcgcctgtatccgatcacccgcggtgtgtccaagcaactgttgccgatttacgataaaccgatggtgtactacccgctgtcggtgctgatgctggccggcatccgcgagattctgatcatcacgaccccggaagatatgccggcgttccagcgcctgctgggggacggcagccgtttcggcgtgtcgttgagctacgcggtacagccgagcccggacggcctggcgcaggcgttcattatcggcgaagagtttatcaacggcgacagctgcgcgctggtgctgggggacaatatctatttcggccagagctttggcaaaaagctggagtccgtggtggagcgtaatcagggcgcgacggtcttcggttatcaggtcatggacccggagcgtttcggggtggtggaatttgacgacaacttccgcgcgctgtcgctggaagagaagccggcgacgccgaaatcgaactgggcggtgaccggtctgtacttctacgaccgcgacgtggtcgagatggcgaaacaggtgaaaccgtcggcgcgcggcgagctggagatcaccacgctgaaccagatgtatctggacaagggcgcgctcaacgttgaactgctggggcgtggcttcgcctggctggataccggcacgcacgacagcctgattgaagcgtcgcagtttatccataccatcgaaaagcgtcagggattcaaggtggcttgcctggaggaaatcgcctaccgcaagggatggttgagccgtgagcaggtggcggaagaggcccggctgctcggcaagacgctgtatggccagtatctgtctcagctgattgtggagaaataa

SEQ ID NO: 447286 - DNA, 537 bp, Serratia marcescens
atgcaggtcacggataccaaaattgcgggcgtgaagattattcagccgaaggtgtttggcgatgcccgcggtttcttcctggagacgtttgaaaaaaagcgttaccaggacatgctgggcattgatttggacttcgttcaggacaaccactcgcgttcatcgcgcggcgtgctgcgcggtttgcacttccagaaggttaatccgcagggcaagctggtgcgggtggtgcgcggcgaagttttcgatgtcgccgtcgacattcggccggagtcgccgacctacggcgcctgggaaggggtgatcctgtcggaagaaaacaaaacgcagttctgggtgccgccgggcctggcccatggctttgtggtgctgtcggacgtcgccgattttgaatacaagtgcacggattattacaacccggcgcacgaagggtgcttgctgtggaacgatccgcaggtcggcatcgagtggccggtcacccagccgctgctgtcggagaaggacaaggtgggcaaactgctcggggaactggcgcaatga

SEQ ID NO: 447287 - DNA, 858 bp, Serratia marcescens
atgaaaatactgttgaccggctcgaaagggcaactgggcagctgtttccgcgatcggctgccggccgggtgggaggtgctggcgacggacagcgacagcctggatataaccgatctggccagggtgaagcaggtggtggcggattaccggccggatgctatcgtgaacgcggcggcgtatacggcggtggacaaggcggaaagcgacagcgaactggcggcgcggatcaacgagcagggtccgaaaaacctggcgcaggcggcggcggagagcggttgccggttgatccacgtctcaaccgactatgttttcgacggacaggcgcaggcgccgtaccgcgaggcggatgtgaccaacccgctgggcgtttacggcaggaccaagcttgacggggaaattgcggtggccggcgcgcatcctgaggcgatcgtcatccgcacggcatgggtcttcagcgaatacggcaataacttcgtcaagacgatgttgcggctggcgaaagagcgcgatgtgctggggatagtcagcgatcagcgcggttgcccgacgtacgcgggcgatatcgcgcaggcgataatcgggttgctgcagtgccgggcagagggcggggtttaccattactgcggcgacagggaagtgagctggagcgaatttgccgaagcgattttcagcgaggggatggcgcagggcgtgctggagaaatcaccgcgggtaaacggcatcacgaccgaacagtacccgacgccggctaaacggcccgcctactcgagcctgaactgcgggaaaatcgaaagcttaggtatctcacgttcagactggatgaatgcattgaaatacattatgccggcgctgggctaa

SEQ ID NO: 447288 - DNA, 1257 bp, Serratia marcescens
atgattaagcatctgaaccaacctttagttaaaaactatgtttctttgctgctggtgcagggggggaatttcatattccctctgttggtctttcctcttgtgggcaggaacatcggtgtcagtgagttcggcaacattctgttttgctatatggtcgccttctatttttccatttttgtcgattacggatttaacttttcggcggtccgaaaggtttcaaaaatggaagaccatcgcgacatcggcaaaagcttctatagcattacattcgctaaaatcatcctggccctctgctcgctggcggcgatgacgctgatgaccctaagctgggagaaactggcccagctcagcgtttatatgcttctgtcttcactgttaatcgtagcgtccatgctatccccttattggctattacaaggtgtagggaaaacggccgcgggcgccttgatcaccttgttcgccagaatcgtgacgctggcggtcttcctttgtttcccgatcacaccctacagcgccgtgctgttgctggtgctgcccaactttcttgccgcgctcatcatgctgttttgggtattttcgcggtatcacatcggctggcctcgtttttctttgccagagattgcggcaaatttaaaggagggttggccggtatttgtcgccaactcgatcacgatggtttacgccgccagcaacacgattcttttaggcatcatttccggccccctggcggcaggtttatacggtgcggcggaaaggttggttcgctccggtttggcggttatggcgccactctgccaggcggcttacccgatcatttgcagctgccgtacggagcaaaccaccaagcgaaataagctcattaaactggttttaagcgtcagcttcgtgttcggaatttgcgcattcctggtactgaatttgttctctgcaccgataattaccttactgtttggtgaaaatttcgttgccgcggcccccattctggccgtgttgtccatcatgctgctgatcattccaccggccatcgtgttggcgcagctttacctattggcgaacagtcacgataaagtactgcagagaatttacatcttctgttccgcgactcactgcctgcatatttatttcacaacaaagctttttggcgcactaggcgcttcttactcattagtcttcaccgaactattggccactctcttgattatttatatgagcatgagaatgttcaaaagagaaaagctgattagctgtgcttcttga

SEQ ID NO: 447289 - DNA, 1467 bp, Serratia marcescens
atgggtaataacgggttcttgagccgattaacgctcgccggtttcggcattgtttgcttggcatgcattctcttgctccccgtgaatggggttagcaaaagcttcgccatcgccgccgtggcaaacttcgtattctttacctattttttcaaaaacatctacaatcccgcttcgatcttcatgagcatgttcctgttcatgattgggtgcagtcaggcgaaattgacgcttattgaacaagacgacttcagtcactcgacctggatggcgttgtttgcagtgatagcctgtttctatatcgtcgtggccgcctttatcctacggcgcggccgcatcacgctcaatcgtgaagcaaacgtgcgctcagggatttctgcccgcaccctcttctggtccaatgtcatctgcgtcgtggtcgaagcgtttctgtattggtatgccatccataaaattggcagcattcctctatttgacgacaatgcgcgcgcaaacatcatgcccaaagtgatcagcaattacttgatgacgctgatggttattcctacgttctttattatcttcaacaccatttacgtgactgagtcaagaaagtatggatatcttcttttcagcgccgcatatttgagcctgctgatgttgttaggcggaagaataaatattttcgtccccgtcatcaccagcttattctatgtactcattcaatattatgtcgctaaagaaaataaatctgcactgctgattaccggtgtaatcaccttgttctccgttgttctgttgatgataagcatgccgttgattcgaacccaaatttacgttcaaaaccaacaaccggcaacagaagaaaaggtgcaaaccggcacgcaatattatgaagtcatttataacagtccaaacacggcatctcagggagataaagaggcaaaagaatttaaacctacgatggaattgcctccgcagatgatgtctatctggattaacctgagtaccgagatgcacgccttcaacaaaatggttgtctatctggataaaactcatgatttcagagatgggcgcatgttgatgaccggaactttccgctttgcaaccaaacatttcatgccggaagaaacgctggatttggtcaaaatgggagggtatgactggatcaatatcatgacatttatgcagaaaccttatatggactttggcgtctatggtgttggcggcttcatgctggtattcacttgtgtcggcatggcgctctatcagcgggttcagcagcgaaaaaccctcattaataccctgctctacagctatttctgtatggcgatgttattcatgatttttgataatcatttctattactcaaccgtcatcgtcaacgttattctgctcttgttattcaaagcatttatgagccgggactggttggtgaggctcaagctggccaaaccatcgagcgagctaaaggccgcggttcatgattaa

SEQ ID NO: 447290 - DNA, 1158 bp, Serratia marcescens
atgttttgcagtgaattaagtataggggttgtttctgattggctagtaactaaaggcggtgccgaaagtgttctcaaggaaattttaaatctttatccatgtgccgacttatacgccgtcatcgactttttgtccgaaacggataggcgcgatttttcagggaaaaaggctaagaccactttcatacagcagctgccattggcgaaaaaatactatcagctgtatctcccattgatgccatatgccgtcgagcaacttgatttaaaagagcatgatattgttatttcaagcagtcatgcggtatctaagggcgttctcaccggacccgatcagttgcatattagctatattcattctccaatgcgctatatttgggacctgcagcatcactatctcaaagcgtccggtctagatagcggcgttaaaggaatgtttgccaagtggtttttacacaaaatgcgcctttgggattaccgaactgcaaatggtgttgaccatatgattgcgaactccaaatttattgctagacgtatcaaaaaagcttatgggcgtgatgcggatgttatctatccgcctgtagatgtggagagattcactgttcatgagctcaaggaggacttttacctgacggcatccaggatggtgccttacaagcgtattgatcttatcgttgaagccttttcggccatgccggataaacgcttggttgttatcggcgacggttctgaaatggggaaaataaagaataaggcgaaaagtaatattgagattttgggttaccaagataatgacgtgctcgatgattatatgaagcgtgcgaaggcttttgtattcgccgccgaagaagacttcggcataaccccggttgaggcgcaggcatgcggcactccagttattgcatacggacggggaggtgtcttggaaaccgtgcggccgtatggtgtggataacccgacgggcattttctttgagtcacagtcggtttctgccgtagtggatgcggtcgcgcgctttgaagaggttttcgataaatttgttgcccaggattgccgtaataatgcatctcgtttttcggttgagcgatttcagggggaaataagcgcttatgtgcatgaaaaatggagcttgttcaataatgataaaagaatcatctactaa

SEQ ID NO: 447291 - DNA, 1065 bp, Serratia marcescens
atgctatatgtaaacgcgagatttttttcccaagaggtgactggcgttcagcgttttgctatcgaacttagccaaaaattatgtgagcagagggatgatgttgtttttttggccccagcgaaaattaaacataatgaagttacaaagcaccttaatgtcaaagtaataggaaaaaatagcgggcatttttgggagcaatatgatctcccttcatacttgcgagatatcgataaccctctgttggttaacttttgtaatactgccccgctattttataagaacaaagtaattacgctgcatgatgtcgcttataaacgtttcccccaaagttatagcttcaaattcaggggggcgtataactttattataccgagattgattgccagcagtagggctgtattaacggttagtcagtttgccaaaagtgagctagaacatttctttaacttaccgaaagagcattgctatgtcgtttacaatgcggccagtgacctttttcacccgcagatgcaggctaaagagaatcatgcaccagaaaaatatttcttggccgttgcttcgcagcaataccacaagaatttcgaaggattgatcgcggccttcgcttgtttacctgagtgtttgggcttcaagctcaaaatagtcggggcccaacacaaaaactatcaaggtgtggaaagcattcttgcatcatccacgtcgatcaatcacgttgagtttttagggcgggtcgatgatgacaccttatctgaactatatcgtcgcgcatttgcgtttgtctttccttccttttacgaaggttttggcataccgccgctcgaagcgcaggcatcggggtgccctgtgattgcctcatcagcggcggcgatgcctgaggttctgcaagacagcgtcatttattttgatccgtatgacagaaattctttggttaatgcgctaaaatcctccattgaaaatcaatcgggacgtcatcggtttgtggaggctggttataaaaatgctgcgcgtttttcttgggagagctctgcatcatgcttaaacagcataataaacgcgctttcttga

SEQ ID NO: 447292 - DNA, 198 bp, Serratia marcescens
atgtccatcggcggcaaatggggcggcgccggcggctggggcttcggcgcgctgtcgcagctggtcggcatcatcgttccgaccgctatgggcgctgtagccggcggcgtgaccggtttgctgaccgaccgcgaaaccactgcagatctgatgcagaactaccgcgaaaccttcgggccaggttcaacgacccactaa

SEQ ID NO: 447293 - DNA, 144 bp, Serratia marcescens
atgtttgaccatgtgaaatttggcgtcagcgactttgcccttagcaaagcgtttttcctcaatgcgctggcgccgctgggcgtaaagatcgttgccgaaggcgcgcccggctatggcgtcgaactttgccccgatcgggggtaa

SEQ ID NO: 447294 - DNA, 621 bp, Serratia marcescens
atgaaaataatcggtcttcggggcgtactccgcggcaaagtcatcaagaccacagtcggtcgcaaaacagcgaccgctgcggacctggtaaaccgtcagttcgtggcagaacgtcctaatcagctttggtgtgcaggttttacgtatgtcagcacctggcagggcttcgcgtatgttgcgttcatcatcgatgtgttcgccggcgttatcgttggctggcgggtgtcgtcatcgatggaaaccaggttcgtgctggatgcgctggaacaggctctgtggtctcgtcgccccacaggtacaatccatcactcggacaagggctcccaatacgtgtcactggcatacactcagcggttgcaggaggcggagctgttggcgtcgacaggcagcacaggggactcctatgataacgcaatggcagaaagcatcaacggtctgtacaaagcggaagtgatacactgtaagagctggaaaaaccgcgcagaagtggagcttgcgacactggcatgggtagactggttcaacaatcgaaggttgcttgagcggctaggacacataccgccggtagaagccgaaaaagcttattatgcttccagtgcaaataatgatctggcagcctga

SEQ ID NO: 447295 - DNA, 2244 bp, Serratia marcescens
  misc_feature (2088)..(2097): n is a, c, g, or t
atggcgaaaaaatggggaataaaagttcagccaccaggtgcgccgattgatccgaactggttgaatgaaaaggttctatttcgtatgttagccattcatgcagacgggaatatcgactttattcacaccctgagagaatactcggatttgggctatgaagaacagctggaacacatattgagtgccaaagatgatttaaaggatattcttcaaaatccggacatctctgctctgttgagttgcgcatttcatgttgatggggccataaaacttagcgaggcagaagttgttaagttgtatatgttgaattatggggcgaatatttcgtcacaagttgctcggcaagagattgaccgtattttgtcagtgtttgcataccctatttctcgcgcgcatgtgtttagaggtcctggctattactttatgttcgacggtgtaagtgtggatatgaagtcgaggttttcctcggtcaatgactatgacgttgttggtttggagtatccgcgttttgcaagagacatgcttaggcattataacaatattaatgattctatttttttcgttacgcggcatttgatgcatgctatcacgactgaaatcccaataaccaaagatcagttgtgtaaggaattgcttaacaagctggcgcctaaaaaattaaagacattacacaagaaggctacaggtggtgatcactacgttggtcatgacaacacggatattttttttgaggaccagtgggttcgggttcttgaggtgctcgatagcctacggcagcttgttgacagttatcgtaaaaagggcacatgcgctgaactggatgatgtcattaccttcatgacctaccacagttctgaaatacgccatgccaaagtgatatttggtgttgatatcgatggcattttcaataaacatatcaagctgaaccccagcaggccttatagaaaattactgctggggctgttggatgcaaagattaatgtgctggcatttcatcaaaacgtttcgcaaattctatatgattctgattttttgaatcccgagttttctggtagccttgtctttaagcaagacgttgtaaagaacgtaagcaaagagtgtcagaaagaatttcgagagttcaaagaggcacagagattcattcgggagcgagggcgaaacttaagtttgcttgcggagcttgaggagtttactgctctatacatggatgtgatgatgaatgataatggcgctagctaccacagattggcaggttcccacgcctccgttgaactgtccctgactactggtaaatatggccctagccctattgagttggaggattcggtcacgctaatggggcatttctttaccttgctaagttcatatcatgcggtttttgaaacaaaacagcttaaaagacaggcaaagaatctggctcgtaataaacctttcacaagatctgatattcatgacgtagcgagaaaagatgcgtgggccaaacttatccgtttatatcgtgaagaaaatgacccgttagtaatggtgttcacggctcagaaagccatgagtctcataaagcgaaatggatatgttcccaaacgtgatgtgctgcacagtatgagtgtcaattacggcggagccttggttggactgtacgctaaacatacgttttccaggatgattccaggagggcaggtgctggcaaatactggtgcattggtatactcgatttatgacgtgaagaatgcgaactcgttttccaatctttcagattatccttattcttcaatttttactgacgagaccctcgaccatgatatcaagcaaaaattgaagtcagagaactggcttctgatttttgatgacaataccaatagcggtgagactgttgataatataagatcattagctgtggattcgggtgtatacgcgcgaattaatacatttacttgtcgggccaacccagatattagaaattacaagtccacgctgaccaccgagcaacggattgatattgtcggagtggctggattgaaagcaagaaaagcgaaagtcaaaacagtagacgaacgctataaggagatcattgggacgatagtgggatannnnnnnnnntggttctgtggtgataaagctagtgactcctcgaatgatgcatggtttgcctcatttgagctaagtactaactttgaggttaatactaaattggggttagccgtaacgtacttgaataactggattgccacagacaccatttggtaa

SEQ ID NO: 447296 - DNA, 555 bp, Serratia marcescens
gtgcttgattacgagggtaagggcatgaacatctatactattagtagcttctcattgggaaatggagttattgacttctcagacccaaagtcaagattatcaagctttttcatttggaatgaaggggatggtaagtttctctcatattcactaccaaaaggtaaagtacaaagtactatgcagagtgataaactgatggtttcagattattttcctgccaatatcggagtcccaattttttcacagagagcggtatctatatttgaacgtagaattgcatctgaaatgtccttctataagtgtactgtggaaaatgttagtgaaacgctgtctttatgtaaggtgaataattaccttccaattattgacgaggaaagaacaacgtttagggaacttattgatggcactaaactaatcgatattcctgcctataaatgtgataaagatttctttatagcgagagatagtgtcttttgtgagcgaatgattgtctctcaactatttgtcgatttatgtaatgaggaaggggtgaatattgagttttcacaatgttaa

SEQ ID NO: 447297 - DNA, 534 bp, Serratia marcescens
atgctgataatgaggatgagttacaacgatctttcaaagggtggcggcgaagcaaagctacacgtctatgggcttggtactttccccgtgttctctggtaaagccccaatcatcaacaatcccaactgtacatatgtggaaagcagtggggcaatcccagtaggacgttattgggtggtagatcggccaaagggtagtttagttaaccaagcccgctcggcgtttctcgatcggttaaatggttctgatcatgcagactggctagcactgttcagttctcaaacaatgaatgacacaacgtttgtgaatggcgttagccgtggtggcttccgacttcacccactacgtaaggatggtagcggctatagtgaaggatgcataacgtttgtaaatcgtcctgagttctatcaagtgcgtaatttcattttgcgtcataagctggcgaaagtccccggttcacgcagtggcttactaacttatggctttgtagatgtacagggagaaagtaaatttgaaaactgtcaagtacgttaa

SEQ ID NO: 447298 - DNA, 387 bp, Serratia marcescens
  misc_feature (373)..(382): n is a, c, g, or t
atgaaccagttagtaaatcaaccaataaatgacaataagaaccatctgccacaaaatgaatacgtggatgcattttatagaatatacaaaaaaatcaataaaacactaaaagaaacatcaaaaacatatgaaaacgatcttcttttagagcttggtgacataagagagattcatttaaaaatatctcaaactataaaaacattcaaagcgagcggaaccacattaaaaataaacctagagcaatccgaaggtgaggattatatattcgacgactttgattcattttatcaccataatacaaccagcccgtatccaactcaggcagttttctttgaatataagtttttaatttacgacaaggaagataataagnnnnnnnnnngataa

SEQ ID NO: 447299 - DNA, 1629 bp, Serratia marcescens
ttgacttttaacttcactgttcctcttaaagactctcaaatggagttttctcttgagaatgggggggctattatttttgttggtgctaatggcggtgggaaaaccagattagcggttgaattagaagtggctctggaactgagagctcatcgaatatcagcgcatcgtgcgttaaacttaaatccggaagtagcgaagatcagcgagcgtcaggcccttttgggacttcgtacaggctatgctaatgagtcatcaagtgtccatcatcgagagcataaccgttggggaagtaagcgagctgtcggtcttttaaatgatttcgattacctaatacaggcgctttttgcggagcaatccaatacatctctaaatgcctataaccgttataagccaggagcgccagcctcaacggatgaattcaaactaaccaagttcgataaacttaatgaaatatggagtcgcttacttccgcatcgtgttcttcatatatcaggtgataatatacttgtatccgtaccaggttctgatacgacttataaatcttcagagatgagtgatggcgaacgggctattttctatatgattggtcaggttctagttgccgatgaacatcaggtattgatcatagatgagccggagttgcacgtccaccgttcaattatgtcaaaattgtgggatgagcttgaagctgcgcggtctgattgtgcgtttgtatttattacacacgagttagagtttgctgcggctcgaacagctcagaagtatattatccgtgattacaatccaacccctttttggtctatagagccagttcctgaagacacgggtttcagtgaagagttaactacactaattttaggaagtaggaaaccaattctttttgttgagggtacaggtagtagtctcgacttggctatatatcgttgttgttatcccgattggactgtcataccaagatcgtcttgcagcgaggttatccattcagttgttacattacgtcagcatgctatgctaacccgcgtgatatgttccgggattgtggacgctgatgattatgatgaagaggacaaatcttatcttggtcagttaggaatagccactctgccggtttctgagattgaaaatttaattttactacctgatgtaagcaaagctatcgctatcagtgaaggatatgcaggtgaggaactattaactcgactttcagctttgtctgataaaatttttgagtctgtaaactccgaggaaaaaatagagaaagttgtagtattatattgcaagcgacggattgatcgtgttctgaaaaaaattgatctaagtaatgcaaagactatttctgcagttgaagctgagtatgtgaataagaccagttctttgaatattcaagaaatagccgggtatttgactgaaaaaatacaaagtgccattgcatccagggatttacctgagttattggcccgttatgataataaaggacttgtatcacatgcggcggctcatcttaaatcatgtcaacagaaaaactttgaggcttggttaacccgtgttctccgaaataaatcagatgctggtattatcacggcaatatcgaatcatttgccagagattacagttgttgggcgtttatga

SEQ ID NO: 447300 - DNA, 738 bp, Serratia marcescens
ttgttaactccaaaggttatcataatggaaatatcctctagggtttataaaatgaaatggataaaacaatatagtaaagagtttgaaagggatgctttaaggaaattaatttcaaaagtcaattggaaacacttcaaaccatctatcaaagctagccttataggtatagctgaagaattgaataaaaatggtatagaggtaagtgtttatgaccagcaagatgaaccagatggatttggctttgattcgttgagtttgcagtttaattctaaatttactggaaatatgcggcaggtcatagaaacagataaaataacttttaatcaccatatgcaatctggaggggtgttatccattacatatagtgctgttggtcatattcatattcttgttgaacctcctaaaactgaagactctgtcgcagtgcatagttatcttatcctttaccaaacttatgatgcaaaaaatatcacaagtaaacgtattgagaaaagtgttaaaaacttcatccattaccaaaggtactcaggtgttctttatagaaagacatttaaagatagatgggtagtcagatggcttaaaacaaagatgtactttattcaatatctagaacccaaaaataaatttataagatattcagctttatatattccgcttattagtatgattgttgcaacaattgcggcagtcgcaagcctgatagcagtatatctgacctatttgagtttaaatcattaa

SEQ ID NO: 447301 - DNA, 741 bp, Serratia marcescens
  misc_feature (580)..(589): n is a, c, g, or t
atgattaaggtcgaccgtaatttcacacctgtcttttttcatcctaataaggttgctcaactaacccaattatataaatccaataaaactcatgtgtggcagaatcaggatgttaaagacgcatgtcttacgttagggaataataagtgtgtctattgcgaagtaattcttaatcagaaaagcacatatctagaaatagaccatttcaagcataaagatgattatccagatgatgtcatagagtggaataatctcttacctgcttgccgacactgcaatggtacaaaaagtgatcatgatgtcgttgccgagcctattatcaatcctgccgtcgataatccagcagattacatttatttaaaagcttatagattgaagggaagaaatccgacgggtgttatgaccgtagatgttcttaatttaaacgacagtgaacattatgttacggaacgctgtaaagttggcactcttattgaagaatggattgaaaaagcagaggaaagattaaaaaactatctggcttctccaattcctgcaaggaaaagagagttaaataaaattgttagggcccttttgaatnnnnnnnnnncacttttttcagcagtttcgtcaacaacacttcatgacagtgaagagtatgcgacgatccgaactactatggaggctctaaatatctggtcggagctgtttgaggaattacatcagaattctttggcgctcagacttcccacttcaaagtaa

SEQ ID NO: 447302 - DNA, 534 bp, Serratia marcescens
atggcaatcatcattggaattatcaaagagattgagcttcgctttatcaaagaagatatttatgcagctgatttcgatggcatcatcattattgatgaaattgagatgcatctccatcctgaatggcaagcacgcatcactgaagtgataacgagaatgttccctcaaacacagtttattgtgactacccatagcccacatgtagtacagaatggtaagcctgagcagatcattgcattggaacaggcagaaaatggtgagaccaaggtgcgcagtcatacggggcgtgagaatggctatacgggctggactattgatgaagtgctgcgcgatgtgatggggatggaaagtacattaagtaaagagcttgagcataagctccaagaattttatcgttacatcgatgcggaggatcatgaaaatgcccgcgtatcttatatgtatctggacactatcttgcatccgaagaacgtgctgcgaaaatctttaagtatgagcattgatatgttagaggacagcggggaagactcatga

SEQ ID NO: 447303 - DNA, 1020 bp, Serratia marcescens
atggtgaagaaaggcgaccctatttatcaaatagatatcagtaaaagcacgcataatggcgtggtcagcgataatcagagaaaagatattgagagccagattgctagaattgatcgcattatctctcggttagagtcaaacaaaacagtaacgctctccacgttaaaaaaccagcgattacagtatggtaaagccttcgagcgctcgactgaaatcctaaaacgagccgaggaagggataacaatcatgaaaaggaacatggataattaccgtagttaccaaacaaaaggactgattagcaacgatcaacttatcaatcaggtcgcacgttactatcaacagcagaataaccttctaagcttaagcgggcaaaatgagcaaaactcactgcaaatcactaacctggacaatcagattcagacccaggctgctgagtttgataaccgtatttatcaaatggaactccaacgatatgacctgaaaaaagagttgttaaataccgatctcagcggcgaagtcattattcgctcgttgtccgacgggaagattgactctctcagcgttaccgtcgggcagatggtgaatgtaggcgatagtttactccaggtgatacctcaatccatcaccaattactacttggtcatttgggtacctaacgaagctattccttatatcacgattggcgataggctcaatgtccgctatgaagctttccccgcagagaaattcggacaattcgccgccaccgtagaaattatctcaaaaacacccgcaagcaaacaagaaatgctcacttatcagggagcgccaagaaacacgcaatcctctgctattccgtattacaaagtcattgtaaaacctgaaaaacaggtcatagcctatcacaacaagaccatgtctcttgaaaacgggatgaaagcacaaagcactttgtttttggaagaacgaaaaatttatcaatggatgatttcccccttctacgacatgaaaaacagcgcattgggccccgtcaatgaataa

SEQ ID NO: 447304 - DNA, 1464 bp, Serratia marcescens
atgagtggggggaaattgccggaggggtgggtacaaagcgaactggataatatacttcttactattattggcgggggtactccaagcaaagcaatccctgagtattatcaaggtgacattccgtggatgagtgtcaaggatatgaataaacatatcctaacagatactgtcgaccatattaccaatgatgcggtagaaaatagtagtacaaatataattcctgctgggacaccgattattgcaactcgtatgagcttggggaaaattgttatagcatattttgattcagcaattaaccaggacttaaaagcattattcctatctagcggagttgatcgtaatttctttattcactggtatcgttcgcaggcgcagctaatcgaaagtttagggaccgggacaacagtaaagggaatacgtctggaggtattgaaggctctttcaattaatctccccccatttttcgaacaaaaaatcatcgccgaaaaactcgatacgctactggcgcaggtagacagcaccaaagcacgtcttgagcaaatcccacaaatcctgaaacgttttcgtcaggcggtgatgaaactcgcgataacaggtgagctaacatcagaataccgcaataattttcctactaatctagttcaagagatcgcgggtattgtcgaaaaagaacggatagaaaagaaaataaaaaacagtaaattatcgaaagaaccataccctgcaaagataccattttcgataccaaaaagttggcaatggtacagactgggtcatatcagtttaaaaataacagatggagctcataacactcctaaagtgttaagtgaaggctacccatacattatggctaaagacctaacaaaaggtaaactcgatttttctgaggaaagatttatttcagaaaaagatcataaggaactttattttaaatgtactccagaagtaggtgatcttcttgttgttaacatcggagctggaacagggaacaatgttttaatagacagcgacattgagttcagttttaaaaacatcgcgataataaaaaaatccaaactgataactccagcttatctaaagatcttctttgattctcaaaaaaatagaatattcgatgagcaaacaaagggaggtgcgcagccttttcttagtttatctgtattaaatgatataccttttgccctccctcctttactggaacaacaagaaatcgtccgccgtgtcgaacaacttttcgcctacgccgacaccatcgaaaagcaggtcaacaacgccttaacccgcgtcaacagcctcacccagtcgatcttggcgaaggccttccgcggcgagcttaccgcccagtggcgtgcggaaaacccggatctgatcagcggtgaaaacagcgccgccgccctgctggaaaaaattaaggctgaacgcgccgccagcggcggtaaaaaagcctcgcgtaaaaaagcataa

SEQ ID NO: 447305 - DNA, 1116 bp, Serratia marcescens
atgattgccattctcgccgatgatcttaccagcgcgctcgacggcgcggccccgttcgccgcacgcggactgaatgcctgcgtcatgctgcgcctgcccgatgccgcgttgcagggtgctgagatcgtcgctttcgatttagattcccgcttcgtttcgccggagcaggcggagcggcgttttcgccatgccgccgcctgcgtgaaaccggcgcgcctcatctacaaaacggtggattccacgctgcgcggcaatctggggccggaaacgcgcggggcgctgacgggcagcgggcgccgtctcgccatcgtcgcgccggccttcccggatgccggccgcaccacggtgggcggccggcaatacgtcgacggcgtcgctctggagcagaccgcctttgcgcgcgatccgaagaacccgatcgtcaccggctacgtcatggagcgcatggcggggctggagccggcgcgctttcaggtattcgacgccgcagacaacggcgagctggatgaggccgtgaggcggatcggcattgccgaaccggtggtgtgggtgggatcgccgggcctggcggcggcgctgtcgcgtgcgttgtcctcggaggagaacgcgccgcccgctcaaccgccgctgcgagcccgcaaggtgctggtggcgattggcagcctgcatccggctaatgacgcccagctggcaagcctgcggcaggcgggcgcggtgcttgtcacgctgcctgaagcggccgatcccgaggcggtagcgcaagaggtgcgagcggcgtttgcgcgtgccgatgtggtttgcctgatgtcgccccggtcgcgagcggccgcggcggatcatgccgctgcgctgggcgcggtcgtcagccgttgcacgcccgccttcgacgggctggtggcgaccggcggcgatactgcgcggcgtatcgtcgacgccatggcggccggctcattgacgctgttcggtgaggtggaacccggcgtgcctttcgggttgttaaatctgccgggccgcaggctgccgttcgccaccaaggcgggcggttttggccgggctgccacgttgttgaactgcgtaacccggttgcgcgctgaccgagaaggagaagaacgatga

SEQ ID NO: 447306 - DNA, 741 bp, Serratia marcescens
gtgcgtcaacgaagattgcctaacctggcggtattgcgggctttcgaagctacagtgcggtacggcagcgtgtcgaaagccgccaaatctctcaacgttaccgacggcgccgtcagccgtgcggtgcgcgaattcgagcagaccctgggattcgcgctgtttcaacgcaccagccgcatggtgcacccgacgccgcaggcgcaagagctggcgagcgagatcggccgggggctggacaacctgcagtcggcgatcgaccgcgcctgccggcatcatcagaatcgcccgttggtgatctcctgcgagccgacctttctgatccgctggctgatcccgcgtctggccggtttacagcaggcggtgggaaaagagcgcgatctgcagctggtctccgccggtggcgccgtcgccttctcacgggaaggcatcgatctggcgattcgccgcaacgatttcccgatcgccgatgacgtgatcgcccgcccgttcctcaaagagcgggtcggcccggtatgccgccgggagcatgccgcggcggggcgtgaactgcgtggcaccctgctccacaccgagacgcgcccgtacgcctggcgcgactggtgtgcccacagcggcatcgagatccggccgggcaacgagctgcgtttcgaacatttctatctcagcctgcaggcggcggtcgccggtgccggtcgccggtgccggtatcggcatcggcccgttggcgctggtggcggatga

SEQ ID NO: 447307 - DNA, 630 bp, Serratia marcescens
atggaaataggttcaatatctgactgggtaagctctctgagtacattcggcactcttgtgattgccggaatggcatatcgtaaagctcctgaatggatggctcagaagcattacgatgttgtctccaaggtaatcgaagaagctgtatacgaagatttaagaaaactttcttctttaagctatcaatataaaaatcaaataatgcatactggcctgatcttaaaaaattgcctgagtaaaaaacagagattgccatctaatatggaagagaactcagaaaaattagaaaaaatattgatagaattcttcaatctctcatactcgattcaaaacagattaaagtcaataccccgatataattatgtaattactccctataccttgaatattatagatacaattaaaaaaacagctgacaattacaataatctacaaattcaaattgagcaggtaacacctgaagtagatgcgttagtttatgctgatgatcaagcgatcaacttgactaaaaaggaagtcacagaggtacaacgtgaatcaattgatttaaacaaaagcctcgctgattacataaagtcagtttatgctgaaaataaatccattactgaattcattgtaataaagaagtag

SEQ ID NO: 447308 - DNA, 636 bp, Serratia marcescens
atggcatcaaattggaatggaataaaaaacatagcagatattactaaaataaccatttttgcgtactcgtgctatttcttctttaggatgggggaggccgttttttatggctacccatttagttacatcagtgtggattcatctagtttattttcagtgctgataaagtcattaatggccttgttagttgctttctccataataatgtatctaaaaaataaaaatttaaatgagctatctactgtttttgttttttatattataatttactattcattgttttccattgccgattcaataagagaaatcaataaagctgatgagggaagcgtgcaaggacaagggcttttaaaagctgtgttttattcgtgggttatatgtttcgcattaggaaattactattatggtttcgcccctaatgggttatatcaggataaggatggacgtgtaatcatagctcaatacaatgacaagtacataatgaaaaagtgtcaaagcaatgggattatggcaacatatatagttgatattccagatggtatgttaacgccagtaccggaaaattattttgttcgagacattttgaaagcgaaatgtaaagtacaatcaaccacgagcgatataaaagttgattaa

SEQ ID NO: 447309 - DNA, 888 bp, Serratia marcescens
atgtgcaaaataatatataatcaagatcttataagtgatctggctagacaaaaagttgtcctattcctaggagctggcgtctcatctagtgttagtatagatgaaaataacagatttaagacttggccagactttcttcaagcggctgcagagagcaaagaagaaccacttcatagtcaaataaaagagttgttagataagaaagattacttgctagcctgtgaattacttcaatcggattacggagagagttggggagaggttgtaacctccgaatatggacgggcagctaaaccctcaacacttcatcacgctttaatttcacttaaacaaagggtcgtgttaacaactaactttgacaaactaattgaaactgcctggggtatatcaatccccgacggtgaaaggcactataaattagttacaactgttgatagcaatatattcaggatactccgggatcatgaaaccccttatattataaaaatacacggaacaattgatgatacagataatattgtattttccagatcgcaatatattagattagcatttggaaatgaaaattatgcatctttcctagactctctactgctaaattataccttcttatttgttggattttccatggacgacccagcaataacgtctcttatggagctttatactctgcgttaccccggagctcgccctcactatataatagcaagcaatacacttccagataatataagaaatgttcatcgcagactgagaaaattgattgtcatcccctatgaccctaaagaaaatcattcagaactgccccttcttataaaagggatggctgaggaggcagaaaggaaaaggtcagagatcattgcacatactatgtcgcaaaagaattaa

SEQ ID NO: 447310 - DNA, 1110 bp, Serratia marcescens
atgcaaaacataaagaaatcaagaagacgtggcgcaaatataactccgttatcaaaaaaagatcaaaaactactagaaagcgtaaagaaaaagggaaccgtcactacttgcttctttaataacaaaggaggagtaggaaaaaccaccttggtagccaacctggcagctgaattatctttaagcttcggctctaaggttttggttgttgatgcagatcctcaatgcaatctaacccaatatgtattgactgaatcagacactgatgagttatattcacaagaaaacccaacaacaatttatagtgtcatccgtccattatctctaggtaaaggatatgaaagtgaactgccaattagaaaatccaataattttggatttgatataattgttggagaccccagattagcgctgcaagaagatttattagccggtgattggagagatgcaagaggaggtgggatgcgcggtatccgaactacttttgtatttgcagaattggtcgcaaaagccaaagaattaaattatgattttgttttcttcgatatgggaccatcattaggtgcaatcaacagagcagtgctacttgccattgaatactttgtggttccgatgtctattgatgttttttcattatgggcaataaaaaacattggcaatacagtttctatttggaagaaagagttagaaaccggtataaaactatctgaggaaccaggtgaacttttggagctttcgcctgttggtagattaaagtttctaggatatgtaactcagcaacataaggaaagatcgggatatgaccaaacattatctgcagaaactggtgaggaaataaccacaaagcgtaaagttcaggcttacgaggatataggagctgtcttgccagagaaagttaacgagcatcttaaggaactatttgcaagccccaagatgaatgcgcacttaggagatatcagacatttaggaagtcttgcgccaaaatctcaaacacagcatgttcccatgatttctgttatgggcacagggaactatacgagattgcgaaaaaatgcgcgcgaactttatagaggcatcgcacagagatacttagaaaacttgaaaatatcctaa

SEQ ID NO: 447311 - DNA, 660 bp, Serratia marcescens
atgaatattaaatctttggctatttatggaagcactgccagaggagaacaaactgacacgtctgatgtagacatgtttgctatatatgatggtttgcattacaaaatggttgttaagggaaaactaaatatagcaatgtaccctatggcattggcagagaaaataatggagggaggaagtttgtttgctttacatctgaaagaggagggagtgtcagtatttaatgaagagctttttgaaaaaataagctcatcattcagatataaagagaactattcaaaagatattgataccgcaacaaagttgttacaattcatatgtactgataacaaaaaaataaaaaacaagtttttaatgaataaaagggtgtcatggtgtgtaaggacaattcttatatctcttagtgcagaaatgcgaaacccccttttttcaaaggagagcttggcgatgaaattttcaactgaatcaatcacatatcaagatatatcgacacttattgctttgaagtcatcgcaggttgacattaaaaacactatctctatatgttataattttttatcaatatatggcatgagaatagatgatttgatgacggagccatttcttagaaaaagtataaaaaaccttactaatggaaatgacactttactaaattattaa

SEQ ID NO: 447312 - DNA, 126 bp, Serratia marcescens
atgatattgggttttagtgtcattgtgaaatattacgttttaggcttggaaggaacttttaatatatcccataacgatggggctttaatttatgaaaatagcaacctcaatttaataatgatctga

SEQ ID NO: 447313 - DNA, 264 bp, Serratia marcescens
atgcctatagttgaatttgatgaaaatatggtcgctaggattgccgaggaagacaggttgttagcggagcaagtgaaaattgttgacggagatatcgtttttaacgttgcaggtgaatacaaagttccaatgcatacatgtagaactcacgcggaggtgctcgattgggtggagcatctggcagataaaacatggatgaataacaaaattatgctgcgttttattatgtttgcgcgcggtgtaattgaggggaaggtagagtag

SEQ ID NO: 447314 - DNA, 477 bp, Serratia marcescens
atggtcaccggcggcaaattccgcatactggagcgccaccagtggaaaggcatggatttcgccacgcaggccgaatctatccgcaggctgaccgaaaaatacaacgtggaatacatcggtatcgacgccaccggcatcgggcaaggcgttttccaactggtgcgcgcgttctacccggccgcccgcgaaatccgctacagcgccgaggtgaagaccgccatggtactgaaggcgaaagacaccatcggcagcggcaggctcgaatacgacaccgcgtataccgacatcacaaaatcgtttatggccatccgcaaaaccatgaccgccagcggcaggggcatgacctacgaagcgagccgcagcgaagaagccagtcacgccgatgtcgcgtgggccaccatgcacgccctgttaaatgaaccgctgaccgccgccaacggccaaccgtctaaatccattctggacttcaaccgatga

SEQ ID NO: 447315 - DNA, 291 bp, Serratia marcescens
atgaaaatgaagcgctgcgccgctggtatcagtctgctttgcctgatgacgttatccggctgcatacccgccccgacttcgccacccccgacgattatttacgctggctgtccgaaagtcagcagttgcccgctgcccggcagcaacccgaagaccaacggtgaattaagcgccgatatcttcaatcttgagcgcgcgctggcaagctgtgcgcttcaggttgagaccgtgaaaaagtgtcaggaggaactcgatgttaaagccgaaaagtctgcgcaaagcgctttatga

SEQ ID NO: 447316 - DNA, 765 bp, Serratia marcescens
atgtataaagaacttatagagcagagcctgaatgaggcaaaagccgccagagctgcgctaagcaagattaacggcatagttgtcgggaatatacataatcatgatcgtgggctatatctcactaactatgccaatttactcctgaacaggcagatagacatctttgatgatgggcttctcctcctcgaaaacgaacgataccagtccgcttgtaccgttagccgtgggatgattgaaacacatgctttctcacggctcttaaacaagaaagttgagaagatcctgactaaccaaagtggccacgaaagtgtagataaagcactagatgtcgtcctgggctttacgaacagttcccgatttaaaaagtcagaacaagaaaagattcagaaaggagtatttgacccgaacgactacatgtttactggagaggctacacatcgttttaaaaacctacttgctgttagtcagcatgtgatgaacgctttacgcgacctctatgaagatgagatgaagcagaccaatcagagagaaagcaattttgagctaacgtatgacatacttagcgaatatgttcatccttcacaaacgagcatctaccaatattacacacctgaaacccacatagtccccacctcagttggaaatattcatgcttatgagtctgctcagctacaatgtgcgagagcgctacacttcatagtagatgcgaagaatcaacattattggtcttcacagttagcaagtgagctgactaaacgcagttaa

SEQ ID NO: 447317 - DNA, 564 bp, Serratia marcescens
atgaatttagagaaaggcggtcgtggagcgatcgagcgaatgatggaagcctacggttttagtacacgtcaacagctatgcgaacagctgggagtctcaaaaagcactctcgcgacccgatacatgagggactcatttccttctgattgggtgattcaatgtgctttagaaacaggtgtatctctgcggtggcttgcaacaggtgctggtgttatgttcgaaaacgaggagtctgatcatataattatcccacgaaagaaattattagacgggaaattatacgactcaaatcattacacttttgacaaagcttttttagcaactaactttaaagagcctgtagtcattattgacgaaaaagtgacatatattggcgatacaaaattcattgatattgaagatgggaaatggctgattgatatcgatggaaaatttatgattagagatattgcactgttaccaggaaaaagaatccgggtaattagtgaaaaaacagattttgattgttcattagatgatattgagtttcacgtaaatcttaacattataattaataatatttaa

SEQ ID NO: 447318 - DNA, 201 bp, Serratia marcescens
atgccgcagataaagccgaacgtgccatttcaggaaagtttgctcgttaaatgcccggagcaattacccaggataaacggggtaaccggtaaagacgttagcgagccgttattaacctatttagatatttatccgctgtgcgctgcgcggcataaccaattagtagatgaaataaaccaacgtaaggaattgcagcaatga

SEQ ID NO: 447319 - DNA, 504 bp, Serratia marcescens
atggcgctctccgacaccaccgttcggcaagccaagaccaccggcaaagcctacacaatcggcgatactgacggtggccgtatccccccaccggcaacaagagctggcatttccgctacgttcgtgcagaagcggctttcgcttggcacttaccccgaaatccccctcaaagaagctctcaaccggcgagacaatgttcgcgaattggttgcgcggggcatcaatcccaagagacatcgaaaccaagagcggcgactggcccttctggcggaggatcacaccttccagaaggtgttcgagcattggttcgagttccgtaagctgagtttgaaggaaggccgtcagagcacgcaggcacagattcaacgcatcttccggaaggacctcctgccaaagctcgggcctcagtccgtctacgacatcaagcgccccgaccagctagaggtaatcgaaggaatcgagcgccgtggcgcatttacaacggccgagaaatgtcgcacctag

SEQ ID NO: 447320 - DNA, 231 bp, Serratia marcescens
atggaactggtcaggggttgcaagtcgaagctcacctatccgtccccccgtcagcaacagcaaacgaagcccaagctgggcctgcagcatcccgcggtactggcggagcttctgcatgagttccggcagttcccccatccggaggaaggggttgtgcttgaccgggggcttcggggccgccacgacatccagatccgaggcgtgactctgctcaaggtcgggggactttga

SEQ ID NO: 447321 - DNA, 300 bp, Serratia marcescens
atggggtatgtcaggctgctcaccggccacggcattcgtggcactatttcgacggccttgaatgaaatcggttatcccaaggtctgggtagatacccagctctcgcacaccgatcccgacaaggtcagcgcgtcgtacaaccatgcggaatatgtggagcagagacggcgcatgatgcaagactgggctgaccgcctggacctttgggagcgcgggttatccgaggcggccagcatgcatttgaacctgaccgttcagtttgatgcgatgccattgatgccgaacgcggcaaggccataa

SEQ ID NO: 447322 - DNA, 414 bp, Serratia marcescens
gtgcccgttcaagaggcccctaaacctgagtatgaaccgtccccatttcagaaaaaatatgccgaaaagctcgaagtctacgaagctgcccacaacctgccggtggtgacctttgccaaattggcaggcaaatctcgcgatcaggtcaatcgagacatcaaggccaagcggctgcttaccctcagttttggaaatcggggccaacgcattccggattggcagttggacccgctgggccataaactcacccaagcgatcttggatcatgccccagaggtggacgaatgggcggtctatcgtgcgctctcggagccccacgagggattcaaaggacgcacaccgattgaagcagttacctcggggaatcttagcaaaatcagtaagatcctgtgtgacgaactaggccagcggtga

SEQ ID NO: 447323 - DNA, 786 bp, Serratia marcescens
atgaagttcataataaataaaacaatcagataccatgaagacagttcgagaatagatacgcaggacggttctgcagaacctatcatcctgacggcgacactcaaccgcctgctccttctattcgtcaaaaataaccaccagatactctcaagagagtaccttctagaaaaggtctggggagagcatgggcaagttgcttcggacaacaatctgaacaactctatgtccgtactgcgaaagatattggcttcgtttggcgaagacgacatatttatcaccttgcccaaacaaggcttctcgctgaatgcaaaggaaattaataccatcgatgatcaggccgtcatcaatggacagagcttgctttcaaccccaccggtgtctccttcgcgcagcgtgcatggcccactcaaagcagtattagcgctcctggttctagccctctcgggctggctggtgttattgctgttgagttacaggggtagtgtggccttcttgcccgatgactcgtatgcattgggcgatatcggcaaatgtcaggtgttcatcatgtcctcgcatcatcgtctttctcatagccaactggaactggagaaagtgaaagccaaggccgaacagtttgacttgggctgccaaacgccggcgaagcttttttactacgatgtcggcttgttgagtaggggcaacaataacaaggcccagacaagctttatcgcctactgtccgcttactccggactcgacaaagatctatcgctgcgagaactactatgaaaatgaaaagctatag

SEQ ID NO: 447324 - DNA, 489 bp, Serratia marcescens
atgaaaatgaaaagctataggtcgatccctttgagagcctatttgggtgtcgttggcgtattggggacagccatccttttgttcttcatccaggtccgtcaggaacgtacaccaccgtcctgtgctacggtgatcaagaccttcatcacgctcgacgcaaggccgacgcatggggtcattctggtcaacacaacgccctctgctctgggagccatgaaagttctcctgagtggaaagattgaagacggggatgtctcctataccgtctcgaaggagttgatcatgcgatatgcctataagggcacgcactatccgatgacagtggagaagagtatcgatagggtgagggattcggtttcaaaaacgaagctggataaggtgttcccgcaggaaggtcagtacctgcatatgaaaatcagtcggatcgacgagaatacctatgcgtttaccgacaactactcccccattttcatctgcaccacgcgctga

SEQ ID NO: 447325 - DNA, 795 bp, Serratia marcescens
atgaaattcataataaatgaggccattgtctacaatgaattggagggcacccttgaattgctaggggctgatgacagcaagactttgctgaagaatcagaatcgtaggatgctctccattttcgttagaaataatggtgttgttattaaccgggagaagctgctcaacgatgtttgggaggtgtatgggcttaaggcatcaaacaataatctcaatacctacgcgtcaagtttgaggcgatccttcgccgaccttggagaagatgagatttttatcacctacccgaagcagggatttaaattcgcggcaaatagtattgtggaagagagtatcgcggggggcgacgcggtggacagcgatagtgtgtctttcattcccgaaccaactcggagtgaaatagaaacccctcccggccattcatcgaaatggaaagggaagcgtttcattctctacgccctgatggctttcattctgtgtgccattctgttcgtcgaggtgatccatttgctggaaagaacggataaaaaaccgctgacgacggtcaatatcgcaagaaagggcgagtataaaaactgcgatatatatatcatcaagaacgaaagcgcagaccttggggagattaagaatgccatttccagcgcaggcttcgattgctccgttaacgccaatatctactattatggaagaattgaggagcagagaatgatgttggcgtactgtccgttggacgtgctctcgccatgcaggcatacggggccggagcaacgcacgctcatgcaggccggaataaagtaa

SEQ ID NO: 447326 - DNA, 552 bp, Serratia marcescens
atgaaactgaacaaaatcatgattgcagcagttctggctttcggcgcaacgtcaatgatggcgcaggccgcacctaaagatcagggccatggcaccgtgactttcaaaggcgcaatcattgacgctccttgctccatcactccagataccgtggaccagaccgttaacctgggtcaggtttccaacgtggcactcaaagatggcggccaatcttcgccaaaaaccttccagatccagctggagaactgtgatctgaccacaaccgctccgggcaaaaacaacgcagtgactatcgccttcactggtgcagcatccgtggacgacgacaagctgctaggcatgaccggtactgccaaaggcgctggcattgccttgaccgacggttccaacaagctgatcgaactgggcaaagcctccagcgcgcagacgttgggtaacggtaacaacaccctgaacttctccgcctacctgcagggcagcaaggcatccggtgccgtcatcactccgggtgagttccagtccgtcgcagacttcaccctggcctaccagtaa

SEQ ID NO: 447327 - DNA, 546 bp, Serratia marcescens
atgcgtcatctttccggaaaattgatgatcttctgcatgttggcgagttcattactaggcacagcggccaatgcagccatagatccccaaatacggggaagagtcaatatgcagggagccatttttgacgccgcttgcgctatcgctacgcagagccgtgaacaaattattgatatcgatattgtgcctaccgcagagattattcgcggcggcgaaggatccgcaagacctttttcgatcgaattgattaattgcgtaattaccaaaactgataattcacagacgggactaaagaactttcaaatgatttttgatggcgacgcggatgggcaactcttcagagtccagggcgaagccagaggaattgcactgcaaatctacgatcacaagggaaatatcgccacaccaggggccccattaccttacggagatattttagcgagtgcgatgcaattgaactatagcctgcgggtggtgagcaacaataggccactacaagcgggagcctattcttctgctgtgcgttttaaattgaattattactga

SEQ ID NO: 447328 - DNA, 2532 bp, Serratia marcescens
atggcgttatcacttgcagggaagcggttccgcatccaattattgacggcgtgtatctattcggcctgtggttacgcgatgccgttggcttatgccgaagatggcatccagttcaataccgacgtgctggatgtgaacgaccggaaaaatatcgacctgagccagttcacccgcagcggttacatcatgccgggcgcctataccatggcgatccatttgaataagaacgagttgccggagcagagtgtcaatttctatccgcccgacggcgataccaacggcagccaagcctgtttgactttaccgctggtggaacaactggggctgaagtcgggtttgatggggcaactaacgtggtggcgcgatggcgagtgtctggatcccggcagcctaaagggcatggaaatgcgtggcgatctggcgacctccgcgctgtatctgagcatcccgcaggcgtatctggaatacaccgcggagaactgggatccgccatcacgttgggatgaaggtattcccggattgctgttcgactacaacattaacggtcaggctcagcgccagcagcgtgacggctctcggcgctacagcctgagcggcaacggcaccggcggtgccaacctgggtgcctggcgactgagagcagactggcaggggcaactcaaccatcagaccgggtccggacaaggaacagagcaacgtctggactggagccgctactacgcctatcgcgcgttgccggcgttgcgttcgcggctgacgttgggcgaggactacctcaactcgggcattttcgacagtttccgcttcaccggcgccagtctggtctcggacgacaacatgctgccgcccaacctgcacggctatgcgcctgaggtagtcgggattgccaagaccaacgccagagttgttatcagccagcaaggccgggttatctatgaaacccaggtggcgatggggccatttcgcatccaggacatcagcgaagcggtatctggcgaactggatgtgcgggtagaagagcaggacggcagcgtgcaggagttcaagatgaacaccgccagcattccttacctgacgcgccccggctcgctgcgctacaagctggcgaccggcaaaccatcggactggcagcaccacagtaacggtcctatgttcggctccggcgagttttcctggggggtgagtaacggctggtcgctgtacggtggggcactactcggcggcgactataacgcagcgtccctgggtataggccgtgacctgatgatgctgggggcgctgtcgttcgacgcgacccaatcgcgggcccgcctgccccagagggatggcacgctgagcggcggttcgtaccgcctgagttactcgaaacgcttcgacgactacgacagccaggtgacattcgctggctatcgcttctcggaacgggactttatgagcatgagcgagtacctggacgcccgccggcaggactatcgggtcggtaacaacaaggagatgtacaccgtaacgttcaatcagcagttccgggacatcggcctgagcctgtatctgaactacgaccaccagacttattgggaccggccggtgaacgatcgctacagcctgacgctgtcacgttacttcgatatcgcacagttcaggaatctgagtctgtcgctgacaggatatcgcaacaagtactacggtgcgaacgacgacggaatgtcgctctcgctgtcgatgccgtggggcaacggcgccaacgtcagctacagcgcgacggcgaaccggcgtgataacagtcaccgggtcggctattacgaccggcttgacgaacacaacaactaccagctgagcgtaggcagtgcacgccagggcgccaatatgaacggctattttacccatgagggggatatggcccaagtcagcgctaacggcagctaccaggaaggcagctatagctcgctgggatttaccgcccaggggggggcaacggtaacgccggaaggcggcgcactacatcgcatcggcatgccgggtagtacccgcctgttactggacaccggcggtgtggcgggggtgccggtacgtggctacggcagcaccgtggagaccaactacttcggcaaggcggtggtgagtgacatcagcagctactaccgcagcagcgccagcatcgatgtgaataagttgcggagcaacgccgaagccaccaagtcggtggtacaggcgaccctgacggaaggcgccatcggttaccgcaaattcgatgtcatcgccggtgagaaagcgatggcggtcatcaggctggcggacggcagcacaccgccgttcggcgccacggtaatgaacgctaaaaagcaggacaccggaatagtgaacgacggtggcagtgtctacctgagcggtatccagccgggtgagagcatgacggtgcactggaacggcgcggcgcagtgcgccatcagcctgccgagaacattgccgcaagacgagttgagcaacctgctgctgccatgccgcacgctgcgggaaagcgaaaacgccatttga

SEQ ID NO: 447329 - DNA, 648 bp, Serratia marcescens
atgcgagacacgaacaacaaactgggcagacttgattggcagtactacctggcgctagcgacattggcgttgatgatgccggtcagtattgcggccgcgctgtggttgttgccagaggcccgtggacagtcgttggatggccaatactccgatagcgccagtggcgtgctgcatgtgcgtggcgcgctgacagaaagcgcctgccggctggagatgggcagcgtcagacaggatatatcgttgggtgaaactggcaccggtcgcctgcagcaaacgggcgatcagggtgtggcggtcgggttcgagctacggctgcaggattgcctgcgtagcccggttggtgggcgagatagtcgtaccggcgccctgagttgggcagcgaatcagcccgcggtcacggtgagcttcagcgcgccggcggatgttgagaatccccagttagtacaggtccgaggggcctcaggtctggccctgcgcctgctggatgacgctggtcaggatattcgtctcggtagccgcgggcagcccttgctgctgacgcccggtcaaaacagtctgatctacacggtaagaccggagcggactgcggcgatgctcaatcccggcgcctacaccgctacggtcgattttcggttgagctatgactga

SEQ ID NO: 447330 - DNA, 525 bp, Serratia marcescens
atgcgctggatagcttatgcgagtaaggccggcttgcgggggatcttcctgtcggcgtccgcactgacgatactggcgctcagcgcggctgctcaggccaataccacgatcaccgtttcgggttcggtcatcaatcccgcctcctgtgtgatcaatgacaaccaaacaatcaatgtggaattcggaaacgacgtcatcaccacccgcgtcgacaccgatgtatacggaagtagctacttgaaatcggtggtgtacacactgcagtgcaaaaatgccagtaaagtcaggatgaaggtcgaggggaatacggctcccttcaataacaagatactgaagaccgaacaaaatgacttgggagtagcgctgcgtatcggcgacagcctgatggccgtcaacagcaccgtatatcaattcgactatccgaactcgcctcaattggtggcgctgccggtcaagcgattggggggactgctgagcgcgggcgaattcaacgccggcgccacaatggtcttgagttttccttaa

SEQ ID NO: 447331 - DNA, 513 bp, Serratia marcescens
atgcaaatgccgcaggggataaacatggtcgtaccacgttctctattaatgatatctcttcttgtcagcggtgcgatttcaaccgccggcgcagccgagaacatgcatttttccggcacgctgatagcccctccaccatgcaccattaataacaaccagatggtggatgtggacttcgggcagcgtgtcggtgtgaaaaaggtggatggaaaaaactatttgcaaacggtcgactatcagatcacctgcgagcccggcaccggcgggctcgtcctgggattgactgtgaccggaatcccctcggcgtttgatgaggcggcattaaaaacgaacaagtcagacctggggatccgattattgcaggcaggacagccgttcacactgaacaagcgtattgccattgacgccgctaacccgccgctactgcaggcggtaccggtaaagaaaccgggggttgaactgagcgcaggggccttcgaggttctggcaacgttactggcagattatcaatag

SEQ ID NO: 447332 - DNA, 534 bp, Serratia marcescens
gtgggccagaacatgatttcactgggcggtctgctcatgacgttgctggtggcatcttcctgggtcggagcggccgagaacttcaaactgcatggggcgttggtggcagagccttgttccctggaagcgggggatgagagcatcgagctggatttcggcagcgtggtagacaagtacctttaccaacatcagcgcacgaacagcaaggcattctcgttgcgtttggctgactgcgataccagcctggggaaaacggtgaaaattagttttggcggggtggagagtctggccttgccaggtttgttggcgttgactgatggcagtctggcgaaggggatagcagtcggattcgaaacttcagcggggcaaacgcttgggctcaatgcgtggagcccacgagaggcgctgataaatggcgacaatacggttgcattgcaggcctatattcaggccgaaccggatgcgatagccaacaggaacattctgctcggcaccttttatgccatcgctaccttttccctgcagtacgagtag

SEQ ID NO: 447333 - DNA, 831 bp, Serratia marcescens
atgagcatatacaagaaaaccggcctcctgttggcgatgttctacatgaactcaagttgggcggcctatcaggtagatatacagagaactattacctatgacggcatctactaccgtgctcatgggtttttattcgactggttcggtgatgatccaacgtcgaatccatgttatcgaaagagctgcgaccttggcatgcaactccattcgttcaacccaatcaccggtgccgtaggcggccccataggatctgcctcctatttcgtttccaatcccccatggctgtcgagcgcgtcaagcctcggcgaggttggcaagggaattcgcggcatattgcccatagagcggttgttgatgcaaaccaccagcaacacgttaccggagcttgttgcagtatgtctggtctaccgtagtggcggcgtatcgcagaaatatgcggatctttgcggattcagcggcgagggtccgaaggacaaaccggtttggtgcgagccccgttctggtgcagttagcttgaactatggccctattaatagcgaagaactagacggcaagacaaagtcctccccctacatcgtctggtgcaaccgagatgttacggcgaagatatatgtcaagggtctcaccaacggccgtctttacctgagaggcgaccaaagtctctatgcagatctgacgatcaatgccaaagagctgagttcgggtttgacgcagagcttcagggaagggagagaagagacgttcactattcaatcaacactcggcagcgctggtgccgttgttcctggtgacttcagaggaagtaccgtggtttacgtcgatatattatga

SEQ ID NO: 447334 - DNA, 555 bp, Serratia marcescens
atgcgatattcgactattttacgcggcgcaactattcaaatgttatggctattagccgtatgtcttgcggcatttgttagccaagccaaggcaattacaccagtgactatttcaggaacgataatgaatcatgcatgcaccttaaagcccggagatgagaatatagagctggactttgggaatgtggtaaacaagaacatatatcagaaccaacgtactgatggggatgtttttacattgaattttgaaatgtgtgactcaacgattagtaacggagtaaaaattagctttagtggcttgccaaaccagcagcttcctgagcttctggctttgtccgcaggtagccaggcaaagggcattgccatcggattagaaacactgtcaggagaagctctgcccattaacactaaggggaagaaaattggattggtggatggagacaatgcaatttcgtttaaggcctatataaagggggagccctctgcaatcgaaagaaaagaaattcaaccgggagccttcattgccctcgcatcttttgaatttagttatgactaa

SEQ ID NO: 447335 - DNA, 798 bp, Serratia marcescens
atgttcgggcggtgtttctctgttttacttctgttggctttttttgagatggtcagaccggcctttgctgggctatatccaataatcactgacgttacgacaactcgcattaacttcaatacatccgagtatagattcaagcagcagctggtcgatattggtgcactagcagatatgccagcaccaccaggctcatggaccggcctcactcacaaacatataaattaccgcggggcagcagcacaagcgcaagtcactgcccaggttggccatgtgaaagttattacgggtgaaactatcggtcaggcggctgttcgggcctacaattcaggagcgcaaggcgtgaacataatgtggcatatcggagaacaagataccagagagtgcattggatatatgaacggccctcagccgataagcccatgggatagcgttatcatgccagtaggaagctgtgtttttgtccccccggctgaacagttctgcaatatatcaagtccttcggtcagtttagaacatggcatattgacattggggatgggagactcgactgcgagttacgatatgagcttaatttgcaccgcccctatgaaaatacggatctcatttggtcaagatgttgttcttttaagcaatggccttcggtcgaaattggcggtgccggctgctgtaaatggatttgtaagcatgctggcaggaacaaataaaactgagataaccagcaccattaacgtccctaaaaatgccaaaaccggccaattttctggttctagtgttgtttatattgagtactattaa

SEQ ID NO: 447336 - DNA, 609 bp, Serratia marcescens
atgaacaggacggtgagtatttttattcaagacaacgacgctttttttaccaaggggatgaaatctctgcttgaaagttatttctctcaacaggggatctcaactctattcatccatgccggggttgagtattcgcaaatagacttggccttcatatcgacaccgctgacgaaaagagcctgctattgtcatatgatgccgttggccgtccatcacggcacccggttttttaccgtcagagagcggtggcaccatagccacaataatcttccgcggtgtggcctggaatacggtaccttgtatcgccaggcgccaaacactgccatcgcccaattgctggagaagacgatgcaacaacccttggcaagcaagcgagtgaagtgcagtgcttgtttggggggccacctgacgcgccgagaaaaagaagtactgtcatacctgcgcaccggggcaagccagagcgaaacggccaagaaaatgcacctcagcgtgaagaccataaatgctcacaagcagtccatgatgaagaagatggacctgagaaagaagcaggactttatctactgggtattaaagaatgtcccaaaaggtgcatctcaccctgactaa

SEQ ID NO: 447337 - DNA, 795 bp, Serratia marcescens
ttgaacgcgtttgatacttggatcaataacccacttgtgcagagtgccgttatttccccacttgtgggcgccattctgggcctgctgtttgcgggttttaacaaggcgccttcacctgcagcacccgcaacggtccagcagaccgttatcatctttaagcaaacaatcgtggtgaatcagcgccgaggaacatcctcttcggaggatggatgggtatacattggcggggcgtttatggtcatggcgctggttatctggggatacagccgctacgccagtgatatcctgcactactggctgagtggcgtgttttcctgcatggcctttattcttgcggcaggtctcgtttctgttatccgggggcaatacaacacccctgaatggggctggtacatcttcacgcctctggtcgcggtgggctcatccatctacctgatcgatctcgcgcaggcggggattattgccggcgcacgtgaggcagcttttcgctatgggttcattgagttctacctccaacgattggaggatgaacatcggttctggatactgacccaactcttcggggtcgtcatgggaattggtacaacgcttgttgcgtcgtttcggtcattacattacctctccctgatgaatcagcgtgccagcggtacattgtcctcggtctggttctccctcgcgcggtacacccggttttccgctcagggtcgcggtgtcgtgctgctgctcatattgctcagcgtttcctacttcatggtttcaggtcttgcctatgaactctggcagcgacgggactag

SEQ ID NO: 447338 - DNA, 738 bp, Serratia marcescens
gtgatcggtggccgctatagccttgctaccctgaaagtggcgatacgcttgaccaaggccggaggcaccgatgcggtgttgttcgggcctctgaacaagacctcgttgcacatggccggtatggctcacagcgacgaattgcactggttcgccgagctgctggatttccacgggcggttctgtaagttcaacgtgctcgacaacctttggacgtcgcgcgtgacctctcacgtggcattggccgaggtgccgggaatgctcagccgggcacgagtgattgaggccatacggcttatcgatagcgcactcaaacgcagcggcatggaaagcccacgcatcggcgtgtgtggcctgaatccacacaacggtgacaacggcagcttcgggcgcgaagagttggatatcattggccccgcggtgcaaagcgcccggcaactgggtatcgatgccatcggcccgttccctggtgacaccatcttcctgaaggtgcaaggtgacagtcgggccttcgatgccgtggtgaccatgtatcacgaccagggtcagatagcgatcaagctgatgggattctcccgtggcgtcacagtccaaggcggtctgccgatcgtgattaccactccggcacacggcaccgctttcgacatcgccgggcaaggcaaagccaatcccggcgctattcgccaggcgttcgagatcgcctgccgcatggccgggcgaaagccaggtcgaaccacctga

SEQ ID NO: 447339 - DNA, 285 bp, Serratia marcescens
atgatttccgattcaccagttcattattataaaccggcgtttatgcatgtggcattcggctcattttttaaacagggattaacgcacccccagcagagcctgatacggccggaaatagcattcattgtcaacagggcggaatattttgacctgaaacaacgacatatttctacccgaagtggcaaacgctatccgtacgacattctggtgttcgccacctaccactgctctatccgtttcgcgggcaggccgaaggcgagtttcctcgcagcgaagcaagcgtga

SEQ ID NO: 447340 - DNA, 396 bp, Serratia marcescens
atgacgagctggcgccagcgctttcggcgtccggcagaaccggctcgtgagccagaccaggcagacgcttggcacaagcatgccgagacactggcggctgcaggcattcccgagccaggtgtctcccgacggggccagtacgccacgctgcatgacgagcagaagctctacgacgtcgccccatcctttgcggacatgctgccctgggcggagtacctgccacggtcccagagcctgttgttggacgatggcgcgtcggtcgccgcattttttgagctcaccccaataggaaccgaggggcgcgaacggcattggctttccgaggaagtggcactgaccaacatgctcgagaaagcgctgttgctgcagcgcacgttgctcgctggcaagaagtag

SEQ ID NO: 447341 - DNA, 318 bp, Serratia marcescens
atgttggatttaagcttcagcaagccgagtgaaatcgtcaaactgctctgtgaacgcctccgtacggagcggctggcactgcagatgacgcaagttgatgtggcagcccgcgccggcgttggggccaataccgtgtccaatctggaggcgggacgcaatgtgagcttcgagacggtggtccgtgtggcaatggtgctcgggcggagcaaggaattcgaagggctcttcttaccaaagctggatagccttgaggacattcttcggtacgaagaaagcgctaagcgtaagcgaaccaagaaaggaaccagaaatgattga

SEQ ID NO: 447342 - DNA, 1260 bp, Serratia marcescens
atgattgagcgagtagacgtctactacgacggctggggcgaacactggttgtggggctctatggtttccacgacggcggttacggggcgtccattggttgtgttcgagtacagcgatgaagcgaagaaaaagggtctggagctttcttcctacacgcttcctctgaatggacccaagctacgcagagacttcccgccgcatcaactggggctgcccggaccagtctatgactcgctacctgatggttggggcatgttgttgatggaccgtcttttcaaacggcgaggtttcaacgtggcgcgcatcgggccgctggagcggctcgcatacattggcaacaatgcgatgggcgcgatgtcattcgagcccgtggctcctgaggttcagggtgcgcagatcgagatcccccttgatcagctcgccgccgaggtgcaagaggtccttcaaggtgaaggcgaggccttccttcagcagttgctgcaggtcggtggttctccgcaaggggcccgccctaaagccctggtctatcgtgatcctcgttccggcgtctttaccaccgccgcagtggccggcttcgaggcctggctcatcaagtttccggcacaccaggaacaccccgaggtttgtgccatcgaaatggtctacgccgagtgcctgcgcatgtgcggtatccagaccccggacacgcagcatttcaccttacccaatgggatggctgcgttcgcgtccagacggtttgatcgacaggacggtcagcgcgtgcctatgcaaagtcttgccgcgttcacgggggccgactatagaagcccgggcgtgttggactacatgaacttcctgcgtgcgacgcacatgtgcaccaatgatgtacgcgaaaaacggttggcgttcgagcgagccgtcttcaacgtcgtattcaacaatcgagacgatcaccccaagaacttcgcctacgtcatgcagccttccggagactggaagctggcgccggcctacgatgtaacgttttgcgagggacctggtggctaccaccagatggacgtcatgggagaggcactagagatcgaccgggcagcgttgctgggtcttgcgaaggaagcggaggtgagcgctgcggcagccggtgccctcattgatcggttttgcggcgtggccagtcagtttgcgactctgactgagaatatgttcccgcgtatggtcacccacgaaaccctgagcaccattcaacaacgcatcgacgcgaacatcgctttgctgcgctaa

SEQ ID NO: 447343 - DNA, 1080 bp, Serratia marcescens
atggccaggcagttcggtggaatggcggatgccatcacattccgtctgggcgatcaccacaagacagaagcgcgacgggaaaaatctgcacgcgctttgctttccggcgacccgaagatcgcccgcatttacagtgaagaagaagtcatcaccattctgcccgggaagcgccatatctccctagagcacttcttacgccgctgccgctcgggccagaacaggctggccggctccttcaccgtggtggaggatggcttcgacgttcccaaaggtgaggtcctcgcacgccaaggtgttgccgtaatcgtgcatcccaagacccttgagcgcttcggctgctacaacgcccacgaactgcgtgaaggcatcgaccgcatccacggcaatctgcgtgaggacgtggaaacgaaccatacgaggttttgggggatcggcaggttctatctacccgagttgatcccgttttcgacgctgagcgctgcttacgtcgaacactcgtccttggtcagcgagcgtgaagcactggacaaagaaccccggcgcgcctggactgccctgcgcaatgtgctgcagcactattcggccatcaataccggcggcattcgccaccgcgggccacgcgttcggggtggaaagacgctgcagatcctgctgggagaatcggctaccgcagaagcatggaccgacggcagcagttacattgcgatcaataccagagtggtgcagcagctcaagtcacgcccgctcaaaaccgtcatgtacatcttctccctcgtagaacacgaggtcgctcacgagggcgacagcctggactgcgatcatgacgaagcgttctaccagcgtttccacgacattgccctcaagcatgctgaggatcggcagtggtacatgcacctgtggcttatgcggtacaccacgagtatggagaatgagggaaagcgggccagcggtgaggcgtggcgtgaacgtttcctcgtcgatcgtgccggcattggccgcggcgagcgggggttggagccggcgatcgatgacgccggtacacatccgattgttatggggcccgcaaagcccatgccctaa

SEQ ID NO: 447344 - DNA, 150 bp, Serratia marcescens
atgccgtgctgcgataccagatatatcctctggtttggtgtggtaaccatgttgctcaggcgtatagaagagagggagattatcgatgttttccatatggccaactggttgaaggcctttgtcgaagaacaggctcactgctatcagtaa

SEQ ID NO: 447345 - DNA, 984 bp, Serratia marcescens
atgcattggaattgtggaagttggcggagtcgtgtgtgcctgcaagcctggggatgcttgtcgctgttgctggcgggaacctctatggctgctgaaaagcattacctgcaattgaatggtcgtctggtcgatgtgccctaccagtggcagttgcccgatggagaggtgatccgcaagggcgtaagcgatcaagatgctcgggttgcggtggttccgcgtaaaggccgcgaggattacgtgctggagacgctctgggatcgaatcccggtgaatgtgccggcacggtgttggaatttgcgggcagaggagttcgaagattgcgtgagaatcgggccacgagaggattctgcgcggcagcgagaagaggatttagagttcgagcgacaggttgccgcacgccagcagaaccgagaagcgcgcgtggcttgggcgagtgagcaagtcggcctcgaccgggtgtcacgtattctcgaaaccgcgctgaccgagcatcggcgttggctagcctcgggggctgggtcgggtacgtttctttgccaccggctcaaaggggctttggctgccatgccctcgcaggaaaccttgccgcgtcatgacatgatggccggtaagcgtgatgcggtcgtggcatatgtgcaggctgcccagagtggtaactggcgcgctgcagccgggttgttcgacgcgatgatagcggacgaggatttcgagtccgcccgtgtgatcgtggcgtggctgcttaagcagaatattcctgctggctacaacaagctcagtacatggctgacggcgatgtccggatacgatggcggatccggcagcggcaccgcgctgattgaaagcctgcgccggcatgcggcatgggaaggagatccggtggcgcagatggatctggcgaatctgctggaaaacgcgggggacaaggcaaatgctacgcggctgcgcgaatgtgctattgggcagaacccagagctggtgaggtaa

SEQ ID NO: 447346 - DNA, 393 bp, Serratia marcescens
gtgtatttgttctggggagtgctggatctgttttacgtgatccgattcctctggctccagattgctgcaggcaacattccgctgtatcacgatattcaggctttcggacaactccacgagccaggcggttacgccgccatcgttctcggcctttccctgctgcttaccgtatctatagccggctcggcctatctgtttttatgcagcagccgctatgccaagccgctggcctatgcccagctgccgttgcgcctgcttttggcggtgccgtcgctatcgttcctcccgtggttgctgcatctgggcggcactttgaacccgtggctcaatcttggcctgctgttggtctctgaactgctgaagttcatcactttatatcgcatccgaccttaa

SEQ ID NO: 447347 - DNA, 513 bp, Serratia marcescens
atgccgaaagaccacttcactttgccgataatccagcgattagccgcggccaaagcgcggcgtggctggcctggacatgttgatatgcccgatcgcccagccatcaacctctgccggctgcagcaagtgggcggcatgtcgcgcgttaggcaacagccgcagccagtcggcgatactgcgcggcgttaccagcacatcatcggcaccgcctctccgccaccgaccgctttcccccagaatacgctcaggcgcgacaatcgccgtagtgacagcactgctttggatcgccgcctcagttcttacctggctgctatccacccggccatggcccctctcgaggaaaatcagacatcgcgcgtttcgacgagcggataccggcgacctgcacccatgcgcatgcccgcggcgcagctggtccggaatattcctgtctttcacgccgtcgaccggcccgccggcacggcccaggcgatgagtgtgctggatgggccgccactctggcctcggccgtag

SEQ ID NO: 447348 - DNA, 498 bp, Serratia marcescens
atgaaaacctaccctgcagttttacacctgatgtgcggcaaggccggcgcaggcaaatcgacgttggcgcagcgtttggcgcagcaaccgcaaacgctgttgctggtcgaagatgcgtggctggcgacgctgtatgaacaggagatggccagcctgcaagactatgcgcgctgttccgaacggttacggcgggcgctgggcgggcacctcgttcagctgctgcgcggcggctggtccgtggcgctcgatttcccgatgaatacgccggacaggcggcgctgggccaaagcgttggcggaggaggccggcgtcgcgcactgcctgcattttctcgacgtcagccatgcgcagtgcctgagccggataacgctgagaaacgcgcgcggcgagcacccgtttacactgaacgaagcggagtttgagcgcctggcacagtactttgttcccccggcggaagaggaagggatgaccgttttgcgttatggcgaacagaactga

SEQ ID NO: 447349 - DNA, 417 bp, Serratia marcescens
atgcgcttaaatgaagatctggacgacagcggcgaactgcatgaaatcaacgtgacgccgtttatcgacgtcatgttggtgctgttgatcatctttatggtggccgcgccgttggcaacggtagatattcgcgtcgatctaccggcttcttccgccaaaccgcagccgcggccggaaaaaccggtgttcctgtcggtgaaggccgacaagcagctctacgttggcgatcagccggtgaatgccgatcagctgacttcggtgctggatcaacgcactcaggcgaacaaagaaaccaccatcttcttccaggcggacaagagcgtggactatgaaacgctgatgagcgtgatggacaccctgcgtaaagccggctacctgaaagtggggctggtgggcatggaaggcgccgccaagtag

SEQ ID NO: 447350 - DNA, 234 bp, Serratia marcescens
atgcccaaggcggcaacgttaacgccttatactgaggggccttttgccccgccaaacagcaatgcagcagttgaacgagtgaaaaccgatttagtgaaacaacagcgtaacgcctcaacggataaaaactatcgagaaaccttgggtgatgcgcaatttgctatcgtcgtgttggcggtggcgtcctgctcactgattatctttacgctggcggtcacgctgtgggtgacctga

SEQ ID NO: 447351 - DNA, 744 bp, Serratia marcescens
atgtgttcgaggcgggcatttttatgcatatgcgaaaaaataggggtagaaataaaaaaatatgcggcagagcgacgcccaagaaatgatgaggaattagaggcgtcatgtacatataccttgactgatttattaagaagaattccggagttaagaccgctattaaaagaaacacttggtgaaaacccactttcattccaaattgggcatgcaagcagaaatatgctcttaagaacaaagaggtcaccatcgcaaaataaacaagagttttcaggatttacatatgcggctatttatccaaaaggtgctcaagtaactgccgatgaacttaactcctataatttaggaattaaagatattgaggaagaatccaaagaaaatataactaaatttgacgaaatgtatttcgtcggaaaagtttatcatcctgaaggtgagttatggtgggatcatgtcttaacgcataaatctggttattgtgggacaagcgcgattgtacctttctggggtactcaagacccatttatcttacacttggttgtgttatacacgctaagtattatagtcaggtatctaccagaaacatggtatgagatagaacatggtaaacttgattatattaactccctattggaaaattacttggctatttttgatagcgtattgcctaaacttgcagtggaaaggttaacaaaaacacatttagtcgtgacttcacctgacagtatgaactctcccatctaa

SEQ ID NO: 447352 - DNA, 147 bp, Serratia marcescens
atggctcctgtgccgaacgtcattcactcccacgagccagaaccgctcacccaactggcgaaacaggttcaggaatccaccaagctgaaggtcactccagcctccccccaccactgtctcacccagcgcctggcaaaaacaaaataa

SEQ ID NO: 447353 - DNA, 804 bp, Serratia marcescens
  misc_feature (774)..(783): n is a, c, g, or t
atgaccttcaacgagttctgggaagaggcggacattgcagtgattgatgacgcctaccgacgtgcagctcggatattcagcccagacatttctcgcacctacgtcgaatacttggccgataaggtagcagatcgggaagatgatgctgaggaatacctggaagcaatcatggaagcccgtgtgaccgtcgctggcctggggctggtgatggaggtccaggaatatttcgatgctgaagcagataaactagcgaaagcatggctggccgagcacgcaccacaaattaaaactctaaaacatgagcgtaaagaggcttatcggcagatcgtcgaaatgagtaccgaaccgcaggacatagatttagtcaggccagagaacaagtttgaaatgactcgggctcgtgaaggagagaaagaaactgaccttccaacctggaaacaccatctgttatgtgatgaaagcgggaactatccggcacagctgaaccaatgggaaaccacggttttcgagaccgaaacgaaacgtgaaggatttgctttctggtaccgtaacccacaatacacagggcagtcgtcactaggcatcgcctatgttgaaaccgaacaatacaaaattgttcgtcccgatttcctgttctttgccgaacaggatagcgaagtggttgtggacttagtagatccacatggcctacatctggctgatgctttgcccaaactgaaaggactggcgctgtatgccaaacaccattccgacacatacagacgaatcgaatcnnnnnnnnnnaattacgggttttggatttga

SEQ ID NO: 447354 - DNA, 144 bp, Serratia marcescens
atggcgatgggcatggtgatggccagccaaggtaaggtgtcttcaggctttgcggtgctgatcgcctcgcagctgctgacattgctggcgggcggcgcactgtttggccgcatgttgctggcgcggcaggtgaaacgggcatag

SEQ ID NO: 447355 - DNA, 798 bp, Serratia marcescens
atgcctgatggttcgtacggtattcagctattcaacaaatatggccataatatagcaacggttaatgacattaacttcagtcttcgttcatccggtcaaattcataattggcagtttggtaagtcaaatccggcagcaggaaacagtgtaacacttgacttaactggattcacttgccctattgtatttctgaaaccaatgagtgcagatcagcgcgtatcttgtgttgcaggaaatgagcgtgaatttacaggggctagtccgggggagtcggtaaccgttgaaatgaagtccagcatttataaatggtggaacaaagacgtcggcacgattcagtattacgttttcgacagatggattccgcccgagcgatctctgcatgggttacagctattcaatcgtggtggtagcttgatatttgatagcggctggtattttatgaaaatacgaaacgttttttggcttgatcctggctacccgaatcactcatcggtaaaccctgagggcgctaactggaccgtaattggatctgctggagcgggtaatttagctatggcaatgccagtgcctcgagggtggattacctggagctggacgggaaataatggtacatatcttcatgagtgtttccatttttctgactgggacaacaaaatcacgatttcccttgttccgcgtggagagtatctctggacacctcctcgtgatgggtgggcaaatacaagatcaagatctcaggttatggttattgatgttgacgggctgccaaccaattatcgtggtgtaaatgtaatataa

SEQ ID NO: 447356 - DNA, 852 bp, Serratia marcescens
  misc_feature (805)..(842): n is a, c, g, or t
atgactattattgctggcatgagttttaatgattaccctgtaattataagcgatctattaattaccagtgataaccataatcaattttcaaatagttcaatacctaccctgtctgactgtgagccacatttaattgattcaaatttttccatttacggaatgatgaaaaaaattgaaataataaatgaaaaatttgtaatatcttgggcaggtaatgtatttgaggcaattaatattataaaatcacttaaggataaatttgaaaaagtagttccttctgatgaaagtattcttttggagataggctctagcaagaatgtttcttttatttggagtgttatcagagatgaatggccaagattaaattcatataacgctgaggttaaagaaaaaaacataaaatcatttgataaattaatttattcagggactggtagtgaagccattgaggaggctatagatatttttgagaataagcatcctgtagaggatgtcgaaaatttggttgttgattccgtatgtagttgtctttttatgttcagtcatttaatgaatcacgaattaatttataaaaaagactccaatactctaaaagatcgtttcggtggcggttatgatgttgtgtgtttttatgacggtgaatttcgaagaattaataacataacttatctatatcttgatgcatcaattacgaaaaaaggaatgatagaaatagatggttcaggaacacttataaaacaattaactgatgatgaagcaatgtatatcagaaaaattaactttgaatttattcatagtatagatnnnnnnnnnnnnnnnnnnnnnnnnnnnnnnnnnnnnnngtatagataa

SEQ ID NO: 447357 - DNA, 243 bp, Serratia marcescens
atgaagaaaataatctctgcgctggctttgtgttttatgacttctttttttgctaatgcaactacactggatgcatatcttagtcatcataaagaaatagacgaagatccaattcttggtgagtatgtaaggaagtgggcttggtttatggcattaatgaatgctcagcaaaatataatacggcagactcaaaaaaaattaacgaactacttgatgcaaaaggtgatagatatggtgcgttga

SEQ ID NO: 447358 - DNA, 801 bp, Serratia marcescens
atgttacagaacaacatcaaacagctccgtacccagctacctatcacccagcgcgagctggcgtttatggtcggcaccagccagcaacaaattcagcgtatcgaaaccgggaaggttgctgcaaagctgagtctcgcacaggcaatatgcaatgccttggataagcctctaaacgtagtgttcccggaaagcgatcggttgataaacgacttccgcaaaaagcgccgtaaaactgatgaagaccttgaggtgatagccacaagtggtattgaaatggatagcggtctctggactgtaaaactttggctacagggacagcaggactatttgttgttatccatttcagctgcggataagcggaggttttattattattttcaggaaaaagctgccccaaacacagaacgcttcttcgtttttgattcttcggagtatcgttatgggttaaatatgcgtgaagtggtatttcatcagttcctgtctgatggtctgcggccaatcgttgacgaagatgatgatgatgcctacgaagacgattattttaatgtccatatcacgctggtaaatggcggaccagtgattccactaagtgttgagcctgatgctcctccaaacgaaaagacggatgatatcggccagttgaatgcgttttttgacacgctggattgcgagcctgaaaccacggatcgttttatgataaccgacgaagacggagaagatgctttcatccgtattggttctatcgctatggtgcgagtcgcacttgacgtgttagaacctgtggaagatgatgaagagtaa

SEQ ID NO: 447359 - DNA, 264 bp, Serratia marcescens
atggaaatttactggacgcttaaagctcaggatgacctggagcgtatctaccgtttcgcccttcagtacagccgccagcacgccgatgatgtattggatcgcctgattactggctgcgctggccttacggtgaatccggcaattggtgtacagcagactcggtatgaacctcgtgaggtccgaaaagtgttattcgatgactatgaggttcactacgaacttcgtgacaatgacatctatatcgtggatctctggcatacctaa

SEQ ID NO: 447360 - DNA, 240 bp, Serratia marcescens
  misc_feature (217)..(226): n is a, c, g, or t
atgttattaaacgaggtaatccctatgggttcgcttactaaacaaaccatcagcgcacagatacccgttgaattggctgctgctgttgaaaatctggcaattgagttagatcgttctaaaagctggattattaaagaagcgttgaccaatatgctggccgaaagagaacggcgtcaccagagcatccaggccggtcttgcggatgtggatgccggtnnnnnnnnnncggtcacgtggtga

SEQ ID NO: 447361 - DNA, 306 bp, Serratia marcescens
gtgaagcatgacagatggggctacagcctgaactggggctggcggcgcgaccagcttgccgatctggaacggatgttctacctgctggatgggaagaccattcccgataaccggcatgatgtctccatccggtttatggattttgtgcgcgataatccgcatcagcagattttcgaagatgagttgttcactattcgctactttcagaagggcagtgggcatatcacttttaaacgcctggatctggtggagaagatgaatgacattgtggcgaagcactttccggggatgttgcctgtgaaatga

SEQ ID NO: 447362 - DNA, 285 bp, Serratia marcescens
atgcgacagggccattcctttgactgctggctgatgcaaccggtagataaagcgatgccggtgattacccgcaatatcgaccgcagtatctggcgcgatctcatgctgaagtccgggatgttgaccctgatggatgcagaagcccgcagcaagtgggcgaagaacctggaggagggcgatcttccggctattagcgaagtcaacatcctgagtacctttgaacaactccaccacaataagcaggacgttttcgaacgtgggattatcaatgtgtttaagggttaa

SEQ ID NO: 447363 - DNA, 342 bp, Serratia marcescens
atgcaaactcagtcattatccccaacgcgggaggtttctccacgcctgtcacccgtggagatctggcagcggcttctgggccatttgctggatcgccactacggtctgacgctcaacgacacgccgtttggcaatgatggcgtgattcaggagcatatcgatgccggtattacgctggcggatgccgttaactttctggtggaaaagtacgagctggttcgtatcgatcgcaggggatttagctggcaggaacaatcgccgtatctgcgagctgtagacattttgcgggcgcgacaggcaacggatttgttacggcgtagccgtaatatcacggcattgtaa

SEQ ID NO: 447364 - DNA, 366 bp, Serratia marcescens
atgcagaacacaacaaatgtggcaaaccatgatactgccgaaccttggtggggacttaagcccacagccaccccgtgttttggtgcacgtttggtgcaggagggcgaccggctgcactatctctccgaccgcgccagtatcactggtcagttcagcaacgcggatttacgccacctcgatcaggcgtttccggtgctgctcaagcagatggagctgatgcttactagcggtgggctgaccccacacaatcagcattgtgccacgctgtatgcgaaagggttgacctgtgaagctgattcgctcggctcgcatggttacatctatatcgcgatttatccaacaccaggcaacagcgtaacccgttaa

SEQ ID NO: 447365 - DNA, 480 bp, Serratia marcescens
atggaacaacagctacctttatttgcagcaggtttgccggtatccgcgcagcaaaccatccgggaggcattaacccttctggagcagcagctacgcgaacccggcgcgtcatttacctccagcaagtctgttcgtgactggctgcgtctgcagcttgccacgctggagcgcgaagagtttgtggtgctctttttggataatcaacaccgtctgctggcccacgacacgctgttcaccggcaccatcaaccatacgcaggtccatccacgggaggtggtgaaggctgcgctgaaacataacgctgcagccatgctcgtcgcgcactgccacccgtcagggcacgctgaacccagcgacgcagacagacggattacagagcgccttaaagatgccctggcccttgttgatatccgcctgctggaccaccttgttatcggcgggatggatatcgtctcctttgccgaacgcggctggttataa

SEQ ID NO: 447366 - DNA, 465 bp, Serratia marcescens
atgaataacgctacaaatctgcaaatacttccagacactgaaaacaccaacaccctcaccgccactttagtgcccgatgagcaccgtatcggcttctggccccaacactttggctccatcccgcagtggataaccctggagccccgtatcttcacctggatggaccgcctgtgtaaggattataccgggggtgtttggcagttttacgccctcagcaacggcggtgcgtttatggtcccggaagcgaatgaggatgccagtgaaaaatggtcgctgttcaacacaatgaacggcaacggcggtgaactcagcgctgaagctgcggggatagccgcctgcctgatgacttacagccaccacgccatgcacaccgaatgcgacgccatgacggagcactactaccgcctgcgggattacgcgctcaaccactcggaatgtagcgccatcatgcgcatcattgactga

SEQ ID NO: 447367 - DNA, 213 bp, Serratia marcescens
gtgacctttttgaaaatgctcatcactgccttaggtcaggttttgacctggtgcggcgggcatcaggcccggcagtttattgaactccatttacgcaaggccggttacaatgacgacatcatcgatgccgcaagagaggcggtcacgcagatggtgaccgccctgataaccgccctgatggcgcagatactgcgtattctggacacgctgtaa

SEQ ID NO: 447368 - DNA, 630 bp, Serratia marcescens
atgaaaatatttaaatcagcaatgtttcttcttgtcgtctctgccctgacaggctgtggagatgatttttcgtgtgaaaacgaagaagtattaaaatcagttaatgacgtgatagtcagtaacgccgtaaacgaacgcgacttcaggacatttcgtccatatggtcaggcaggtctgacaggcaaagcggtgacgatagcctgggataatcctgttgctattgacagcaacccaaatgttaagtcattaacgtgtaaagtgcatcttacagccatgctatctgacgatgaaaatagcaatttaaaacagcgactggatgatattacccaaagggcagtgaaggagtccagctacgagagtaataaaggttttatcgcgaatgtgaataaagccgctattgatatggcaaaaaccaggcaagtcacgggtacgatagagtataccctctatcagtcaaaaggacgggttgtaactgaagtcagtaatacgccagaggccagccaggtaattagacatattggagatgatttattacggccgatggcaagagtttactctgctcagaggggagaattatcattaaatgacttttactccagagatattatgtctatgtttcgcatacaataa

SEQ ID NO: 447369 - DNA, 678 bp, Serratia marcescens
atgcctgaacaggaacaccgctatgaccggttagccagtcgtctcgcgatactggtcagccgtctttttatgggcgaatcactcagcgtcagtcagctggcgcaggagtttggcgtttctgagcgcacggtacaacgcgacctgcgtgaacgcctgcgttatcttgacacggaatatattgatggtcatgtcagcctccgggatgcacggggaccttttcgcaccaacagtgatattctgcgttttgcccggataaccagcgtggcacattattttccggctctggatcctaaactgctttcagtattactcgacagtggtcaggactccccctgtattatctggaatgatccaccccggcaggctccagcgttatttggcgggttccaggccatcgttcaggccatcatccgtaaccgtcttatccacttcctgcatcaggaacgcctgctgtcatccgtcgcaccttacagactcatctgccaggacggagaatggtatctggcggcggtatcaaaggagcgaattcaggtttttaccctctcagccattaccgatgtggtgatgaccgtcagtggttttgcacggaacaggcatatcgatcgtattttgcaggatccacgatttatgcgcgcactccctcattttgattacatcagcggaattatccataagtag

SEQ ID NO: 447370 - DNA, 618 bp, Serratia marcescens
atggttttcacagtaattagaccagataaaatacatcactacagtaattatgtaaaagcggagggggatgtctatgtgtctgatacatttaacatccctggtgtaacatctggtcaaagagaacgttataaaacaatttcactgatattgaatttattgccatttaaaaaagaagaaataaatatactggtttcttatttatatcaggaatataaaggcaggaaagccatttgtaaaaatgatgttaatgttacatctctaataaaaagtaaagactcagttgatttttcaatccgctacttaaagaagaagaaatttttcctgtctggtttagagcctctcactgagactgaaaataaatacgcactcattacgcaactgtatcttctggctaaagatagtaattttaacgagttagcttcctcgctaaccaaagcatggtcgcagaagaaaatacgcgaaagaaaaaaagagttggataataaaataatcaagccaacttcaggactaagtaaagaaagcataaaaatgcttaatgcattatccaaaaaatacgaattaagccatgtagaattgatagacatggcggttaagtcgctctttaacgacatgaagtga

SEQ ID NO: 447371 - DNA, 2130 bp, Serratia marcescens
atgtccaggctgactgatttaattgccaaagcgaaggccaaagacccacaattgggtgctgacttggatcgagaaatcaaggtcctgtcatcgcgccttcccttcgggctgaacttcgagcggcatagccctgaagccgtcgagttaccattgcgaccagtgcgcaagggggacaaggtgcgcgttttgccggagcgtggctccactaagacaggtgatctgcggctgtggcaagtgaaatccatccacaaaactaagaagatcgccgatctagaattactgggcgctgctaatgttgagactcagactgtagcgttgaatgacctggtagttgtggcggagttccgtgacacgatttggccgggactggtcagcacaggaaaagtacaacgcggtggcgacaaacctttccactccgtcatcaatggcgagaactaccatgtcctgaaggcgttgacctacacgcacaggggcaaggtagacgccatctatatcgaccccccttataactcgggggcgaaagactggaaatacaataatgactatgttgaaaaggatgacttgtatcgccacagcaaatggctggcttttatggaacgccgcttgcttctggcgagggagttgctaaatcccgagaattcagtgctgatcgtctcaatcgacgagaaggaatatttacggttagggttgctgctggagcaagtatatccagatgcaaagatcgaaatggtctctaccgttataaaccctaaaggaacgggaaggtcaggcgattttgcccgaacgaatgagtttttattttttgcacgatttggaacatctattgtcggtggcagacctgatgacggtgctattggtgccgaagtcccttgggaaactatgaggcgacgtaaccttgcctcagtaagaggtcgaaaaggcaaaggtgcttgtgggccaaatcagttctatccaatttttgtagatgaggccacaggagcaattattggacgcggcgatcctttgcctgctgacgttccttgcgacagcatcaagccgcctaacggtgctgtatctgttttccctattcgttcagatgggactgaaatgaattgggaatatactgattctgcattcgataaatggtggagggaaggctatattcgcgctaatggtaaaaaaaatgagcctcagccttacatcattcagcatcttcctaataaggcacgtaatgaaattgcggatggaattgcaattattgaacggaagcgtgaggataaatctgtcgttgcaaaatatgtgaatgcaacatctaaacatgtaactacccagtgggactttacttcccacagtgctgagcacggtgggacgggagtaattaaatctattattccagggaggaaattcccattccctaaatcgctttatgccgtcgaagatgctcttcgcttttttgttgctgacaagcccaaagcaattattctcgatttcttcagtggctcggggacaacagcccatgctgttatgcgtctgaacaagcaggatggaggtcgccgccagtgtatctccgtaactaacaacgaagtcgccgctgatgaacagaaaaaattgcgcgaacagaacttacagcccggtgatcctgaatgggaaaaatggggtatctgtgactacatcactaaaccacgtgtgcaggctgccatcacaggcaatacccctgatggtgaaccaattaaaggtgactacaaatttaccgatgaattcccgatgtctgaaggcttcgaggaaaacgccgaattttttaccctgacatacgaagctgagaagtcagttagccacaacttggcctatacacgcattgcgccgttactgtggttacgagcaggcgcacatggtaaacgtattgacaaactacccgctgaaggatgggcactggctgatacttatggcctgctgtcggcggtggatcaggccacccctttcattgaagccatcaaccactccagtaccgtgcgtgtagccttcatcgttaccgacgatgatcgccacttccaggctgtcaccaagcgtctgccaaaaggtgttgagccagtacgtctgtacgaatcgtacctgaccaatttcagcttcaccaatggggaattgaccgaatga

SEQ ID NO: 447372 - DNA, 429 bp, Serratia marcescens
atgaattttaagaccgttaccagtgagaatcagaacgccgaaattcgtatgctgaaatgctacctcgctagcgaccaccgtgggcattttgtgacgaccagtgaagcggcgaacatgccgggacagatatggagctgcgtatcctgtggttgccgactcatcttccataccggcactcacgctgactcaccctggtttgaacatgaccagaggacagtagctgccagtacgttgatgagctgtgcgcatattgacccggcagtgaaagcggagatacgcagcaaaacattacggagtcttttcaacaccctggattccccggtaatgtcgctggactggtactgcgtctggtgcgctaaccattacagcggggaaaaacgctgtactatctgcgggacaggtatttacagcattgaggaagcctgctga

SEQ ID NO: 447373 - DNA, 219 bp, Serratia marcescens
atgactacagccattaacaccattctttgcgcagaagacccacttatcgacatggtatacatcaccgcatacaccggtatgaccgacaagtggttctacaagcttattcaggatggcgaattcccgaaacccatcaagctgggacggagttcccgttggtataaaagcgaagtagaaagctggatgctacagcgtattgcagcctcgcggagagcctga

SEQ ID NO: 447374 - DNA, 570 bp, Serratia marcescens
atgaattacaccgttaaccctttctggcaacagcgtattgctgacacatttaaaaacgccctaggtgcctatccacgagtattaatgctacgggttgacctgcgactacctaatacgccagccgctacagatgcggctgtgatatcacgctttattgattccctgaaagtaaagatctcagcgtacctgttacgtaaacaccgggagggcaatcgaaaacggatgaccgatctacgttatatctgggcaagggaatacggggaacgtaacggtaaaaaacattaccatgtcgtgttattactcaatcgtgaagtctggtgttctgccggtaactataatgattcaacgtctctggcaggattaattaaacaggcatggtgtagcgctctgcgtgtggataatgacgagtacgcaacactggcacattttccacaaaatcctgcgtgctggattgacctggggaataacgagcaactacaggaggcattagtacgggcttcatatcttgcaaaaaatcataccaaagtcacctgtgatggcgaacgtaattttggatgcagccagcgctga

SEQ ID NO: 447375 - DNA, 147 bp, Serratia marcescens
atgggatgtgccatcaaagagcatccagccggtggtgacgagagtggggtgctgttaagagccgtttttggcgccaccgaacagtggcgaacccacaagcagcgtttctattttgaaacctgcacattgatggggatgctggcgtaa

SEQ ID NO: 447376 - DNA, 1320 bp, Serratia marcescens
atgttgctgagtcaggctcttgataccgttcttaaattctcccccaaagaattcgctgcgctttccgacttgctctcacctgagcttatcgatgaatgcctcgctgataccgggattgtgacgctccgaaagcgccgtcttcccatggaaatgatggtctgggccgtggtcggaatgtccctgtttcgctcgctttcaatgaaccagcttgtttctcatctcgatatcatgctaccggggagacgtccttttgtagcgcccagcgccgtagtacaggcgcgccagcggctcggcgaagaggtcgtcaggctggtgtttgaaaaaacacgtcaactctggtttgaaaagaccccgttatcgcactggaatggcctgacactcctggctgtagatggcacgttgtggagaacgcccgatacgcccgaaaatgacgcagccttcggacgcactgccaatgagcacgcgcgttccgactggccgcagcttcgcatggtctgccagatggaggtcaccagtcacttgctgacaggcgtgagcttcggcagcgtctcggaaaccagtgaggttgaccttgcagcacagttggctgagcagacaccggagcactcgttgacgatactggataaaggtttttatgcgctgggactccttcatcactggagcgcctcgggagcggagaaacactggatgctcccactgcgcaaagacgcacaatatcgggtacgggagaggctgggtacggggcaggagctcgttgagttgaagttaagcccgcaagcccgcaagaaatggccggctgccccggaaatgctgatagccagactgataagcaaagaggttaatggcaagaaagtccaaatcctgacctcgatgtgcgatccgctacgctaccccaaagccgatatcgtcgacttgtatgggcatcgttgggagatagaacatggcttcagggagatgaagcagtatctgctgcagaacgaactgactctgagaagcaaaaagccggagttggtcaggcaggaactgtggggcgtggcgttggcttataacctgctgcgcttcatgatggcgcagatggctaacagcctgaagcatgtagagccttatcaaatcggttttaaacaggctgcgttatatctgacagcccaactgagcctgcttccggcagttgccccagggaaagtcccgaagataatgaatgatatcctggcaatggcggggagcttcgtacttccttctcgacggcaaaggcattacccgcgggcagtaaaaaagaagccgcaacgttatacgttgcggcttcctcaaaagcttaactga

SEQ ID NO: 447377 - DNA, 174 bp, Serratia marcescens
atgccggaagtcgaggtgatcatcgtgccctcgagcgagaaaccgaccggcgtgggcgagctggggataccgaccatcgccccggcggtcggcaacgcgctggcgctgctcgggcggccgcgtacctcgctgagcctgccgctgcataatcctcggcgtagcgctgtcatctga

SEQ ID NO: 447378 - DNA, 714 bp, Serratia marcescens
gtggagcacagcgataacggactgtttatcaaacgggagcgttttgaagttctggcgattctgcgagaaatttgcaaacaacgcacgccgctgcgcgtagaaattcagcagcaccggtttcaaagtctgttattgagcgtcgggccggacaatatcgtgtttagcggtgaggaagcctcgagcgccatcgacggcgcttgcaccatcgtgattgaaagcaacgacgccaaaatcgagttttccgtcccccaggcggagctgaccgaacatcagggcgtacaggcctgttcgacccggctgccgcaggagctggtctatatccagcgtcgccgtcaattccgcatcactacgccgcactggcgccaattcttttgtaccggcgaatacccggacggcacgccgtacgagctgcggatccacgatctctccgccggcggcgtcggtttacgcttcgacggcccgctgccggatttcttccagccaggcttgcagttcaagaaagcggagctggatctgggcagctacggcagcttcaaggtcaacatggagctggtggtggtcaacgacgatcaggaaaccgacgataacgaccaggtggtgcacttctcgcgcctgtcatgccgctttcttaagctcggattggcgatggagcgcaaaattcagagcgcggtgttcgccttcgagctggatttcaacaaaaagaaaaaacgctga

SEQ ID NO: 447379 - DNA, 1728 bp, Serratia marcescens
atgagcgttgagaaactgattaccgaccatatcgatatctggtcctcggccctgcaaactcgatccaccgccgggcgtggcagcaacggcaaaatcgacctctatggcattaagaaactgcgcgagctgattcttgagctggcggtgcgcggcaaactggtgtcgcaggatccgaatgatgaaccggcgtctgagttgttaaaacgtatcgcggctgagaaagcggagctggtaaaacaggggaagattaaaaagcagaagccgctgccggaaattagtgaggatgagaagccgtttgaattgccggaggggtgggagtgggtgcggctgggtgatgctgttgaggtcattaatggccgggcttataaaaaacaagaaatgttgcaatctggtacaccattgcttcgcgttggcaatttattcacatccaacgaatggtattactcagacctcgaactggatgaagataaatatatagacagaggagatcttatctatgcttggtcagcatcgtttggcccatttatctggcaaggtgataaggttatttaccattatcatatttggaaattaaaacttttttcagaatcatctttgagtaggttttttctgcatgattacttggcatctattacggagaaaataaagtctcagggtaatggcattgcaatgcttcatatgacgaaagaaagaatggagaagcaagttatcgcatttcctccattagaagaacaaatcaatatagtttctaaaattaaagaactaatgtccctctgtgaccaactggaacatcaagccctgaccagtatggacgcccatcagcaactggtggaaaccctgttgggaacgctgactgacagccaaaatgccgaagaactcactgaaaactgggcgcgaatcagtcagcatttcgatacgttgtttaccaccgaagcgagcatcgacgcgcttaagcaaaccattctgcaactggcggtgatgggtaaactggtgccgcaggatcctaacgacgaaccggcttctgaactgcttaaacgtattgagcaggaaaaagcgcaactggtaaaagaaggaaaaattaaaaagcaaaaaccgttgccgccagtgagtgatgaggaaaaaccgtttgagttgcccattggttgggagtggattaggttgggaagtttatgtgaattcattactagcggctcgcgaggctggaatcaattttattctaatgaaggttcgacatttattagatcacaggatataaaacatgatcgtttggattttgataacagagcttacgttaaacttccattgaatacggaggggacacgaacacgagttgaacttggtgatctattaatgacaatcactggtggtaatgttgcgaaagtagccgtcattgatttggaattagaggatgcttatgttagtcaacatgttgccttaattagattggtttataaagcagtaaactcatacatacatacttggttaatatgtgaacatggtgggcggaagaaccttttagaactaagttatggggcaaaacctggtctcaatttgaaaaatattaatgacctccttattcctttcgctcctaaaaagcagcaagaaaagatattgatgaggatcaatgagttgatgtcactgtgtgacaacctcaacgtggttttgaaatccgcccagcaaacccagctccatctggcggacgcactcacagacgcagcattaaactaa

SEQ ID NO: 447380 - DNA, 1059 bp, Serratia marcescens
  misc_feature (961)..(970): n is a, c, g, or t
atggctggcgtaaacaaaacacatctgaccgaaacggacatcatcaccaaatttattctgccggcggtcaaggaagccggttgggatgtgatgtcacagattcggcaggaagtgaaactccgggatggtaagatcgtggtgcgcggaaaactggcttcccgtatcaaagtcaaatccgccgatatcgttctctaccacaagccaaacttgccattggcggtgatcgaggcaaaagccaaccagcacgccatcggcaaagggatgcaacaggggctagattacgccgggttgcttgacgttccctttgtgtttgcttccaacggcgacggttttatcttccatgacaaaaccaatccccagcagttggagtccgaaattgcacttagcgattttccgacgcctgaacagctatggcagaagtactgtgtctggaaagggttcacgcaggagcaattgccggtcatcagccaggattattacgatgacggcagcggcaagtctccccgttattatcagatgcaggcggtcaaccgaacggtcgatgccgtatcggcagggaaaaaccgcgttttgttggtgatggcgaccggtacgggcaaaacctataccgcgtttcagatcatctggcggctgtggaaagcgaaaaacaaaaaacgcattctgttcctggcggatcgcaacattctggtcgatcagaccaaaaataacgatttccagccgtttggcaacgccatgaccaaaatcaccgggcgcaccatcgatccggcctatgaggtccatctggcattgtaccaggcgataactggccccgaagagtatcaaaaagcctacaaacaggtggcgcccgacttcttcgacctgatcgtgatcgacgaatgccaccgtggcagcgcctccgaggattctgcatggcgcgaaattctggagtatttcggcgtcgccgtcaggccaatttgggtgnnnnnnnnnnctggagtatttcggcagcgccacccaaattggcctgacggcgacgccgaaagaaaccgaagacgtctccaacatcgactatttcggtga

SEQ ID NO: 447381 - DNA, 1011 bp, Serratia marcescens
atggctccggtgatcagtgtatttaataataaaggtggcgtaggaaaaacaacctacttattccatatagcccacttgttagcaggacaagataaaactatcttactcgttgatttagatagtcagtgcaacttgtcaacctattgcctcaaagataaagcattaaccgctgcttgggcggaggatggcaatagtatctaccgagtagttgagccaatctatcgtgggttgggtgactttaaacagttaatgccaatctccttcaacgcgatttacccaactttatatctgacacctggtgacattgctttaagtaactttgaggatcgtttaggtgactcatggaatgctgctcgtggtggttccgagccggacatcagagttcaatctgctctacatcgttatattcgttgggccagtgatgcaattggcgcagatttagttctcgtggatttagggccaaacttaggtgctttgaatcgggcagttcttggaagtagtgactattttatcattccaatgtcacctgatttattctcgatcagaggcacagaaaacttaggaaataagcttttaaattggaatgacggatggcagcagtgccgtgaagcttgggaaactcgagggaatggagacattgatatccctaccggtgctccaaagttcgttggctatgtaaagcagcaacacaatattcgcaacaacgtagcaggaatgactaaaggttggcaaatttttggcaatcaagttgaaggcgctatccaaaggaatatcattgacaaactttccacaagaggacaggtatttgaatggggaaaagatgatctgaattggcacctcggtaacataccaaacttgcacagcttagtaccttactctctaaaagctaagaaacctgttttcgattgtactggtcgagatggcttagttgggagccatgtaactaaagctcgtaaatcgagaagccactatgaaggtattgttaaccgcatactacaagttgttggctga

SEQ ID NO: 447382 - DNA, 441 bp, Serratia marcescens
atgctagttctgtgcggcccgcagtcttctgaaatcaacaccaacgccgagctggagagcagaaatctagtgggcgacaccgtatgcttgccgccagtgccattcttgaatgtggacaagctgctgttggcgatctctcaagccaacgggatttttgtgtcgccatcaaccggagaatcatttggcttatcggcttcagaagcgatttgtgcagacgtccccgttgttttgtccaatatcgaagcacataactatttagttgccacgcgtgaaaatgagtttacttactcgttgcatgatgctcgccaattgtcagaaaaaatagcctctatatctgacaattatgcgcaatctaaagcatcacttgccgctctgaaagaaaaattttccgcccatgcctttatgaacgattgggacgaattgctacgcagaaccgaatag

SEQ ID NO: 447383 - DNA, 429 bp, Serratia marcescens
ttgtgggaaacgttactgggtacgcagaaaaccacagaaagcgccgctctgtggtggcgttatcccctgagctggaatgctgaaatgcaacggcgttacccattccgtcagtctgcccaagaaacacagtattacctgtctctggaagaagacgaagaaagcatggtgtttgtgaaacgcgacgctggccccaacggcagcaaacagagcggtgattttgactacccgagtctggcattagcggatggcaacagcctttggatggataacgattatccgcagctataccgccggctggcggatacgctggggatggaatttgcgcagatcagcgagaggtttggcgaaatcaatttacgcaagctggatgaggacgacaccgatacgtggcgcttccatccggcgcttggggtattccgcgcattttga

SEQ ID NO: 447384 - DNA, 1314 bp, Serratia marcescens
atggtaggtttcgctcatcccctccaactgggtcaggaaccacagacgctgctgagcaaacgacaggggcaattccccatcgcgtgccaccggcagcatcgggatcaattcctgcgtcggcgcaacctgcagcgcctgggccaacacgtgcaacaccggactggcgaacagcgcctgcaacggcagctgccatccggcctgttgcacgcggttcgccaggcgcaccgccatcagcgaatgcccgcccagttcgaagaagtggtcgtaacggccaatccgttctacgcccaacagctcatgccagatagccgccaacagattttctgcctcgccctgcggcggcgcataggcctcgcgcgcacaggcgtcgacctgcggcaccggcagggcgcgcttgtccaatttgccgttgccggtcagcggcaacgcctccagccaaacgtaagccgccggcaccatatagtccggcaaccgcgcctgcagatgccggcgcaattcggtcgccagcgtagcgcgttccgtctccggcgccggaaccacccacgccaccagtcgcttattcccgtcgccatcgtcgatagcgtccacggctacgctgcgcacgcgcggatcggcgctcagctgcgcttccacctcaccgcactcgatgcggaagccgcggattttcacctgctggtcgttgcgccccaggtattcgatatccccccccggcagatagcgcgccagatcgccggtgcgatacatgcgcgcacccggcgcccggttgaaagggtcttcgagaaaacgttccgccgtcaattcgggccggttcaggtaccctcgcgccaccccttcaccgccgacgtacagttcgccgatcgcccccatcggcaccggttcgccatcgccgcccagcagatacagccgcaaatccggaatacggcagccgatcgggctggcgacgatcgccgtatcctgcgccgacagcggccggtacgtcacgtgcaccgtggtttcggtgatgccgtacatgttgaccaatcgcgtctgccggttctctggacgagcaaaccacggcgcgagatcggaaggcttcagcatttcaccaccgaacacgatctcgcgcagctgatggcgcgcttcgctgtgtgcctgagcctggataaaggctttgaaggcgctcggcgtctgattcagtaccgtgatgccgctgcggcagacgaaatgataaaagtccggcgccgaacgggcgatctcctgcggtacgatgaacagctggccgccatacaaccaggcgccccagatctcccaaaccgaaaagtcgaaggcgaatga

SEQ ID NO: 447385 - DNA, 141 bp, Serratia marcescens
atgctcctcatccgccaggcggagcagcgcggcgcgcaccagcggcccctgcgtcaaatcgaacgattgagtggccgcctgacgacacagcgtttcagcctgcgcggggtgacgtcgcagatcgtggaacgcaagcggtaa

SEQ ID NO: 447386 - DNA, 969 bp, Serratia marcescens
atgattgattctgtaagaatacctataattgagttttttaatgagagtcgggacggtaaaaaatatatagacacacttaagtggttggtatttcatgagtttaaaaggaaaagcattgaatgtgattcttctcttcaccaaataacatttgggagtttgcctaaacggaatggggagatatttaaagatgttgttgttaataaaattgacatagatggccaagggtattttgtttatggtggggagacatttaatcttattgatattttaaggtttcatgaggttgtagatgaggaattaggggctagtggcattttaggatacttgacgaatgttattgagcatataattattgttcattgcataaaagaaattgtaactcggaaaccttcatttttgaagcgattccttttcattaaagatggccctttaggtttctttggacaaacggcaaaattgcataaagatatgagagagttatgtaacttatatattagtgaatattctctgaaattagtcggcttagaaaaatcaggttcttttgttgaacatgcagagcaaatctcctctggagatagtgcttgtttgctaaaaggtcaagcgttgccactttttaataattatatttataagcatatacttcctggcccttccactgaagaggagttagataaagtccccccttatgcctcaacttcttattacagcggaaagttgatttatcgtagtaaatcggatagggtttgggttttaactatacctatcaaaaacagtgaggaattcaaaagtttaaatagaaattcattctctaatttagatgagattcttaatgttgttgaacatttgaagtgtgacatgtatgagaatgctattgtacctatcgcattagttaatcagctagtatctcttgcaaatcacccatcttctaatatgttagagaagtttgcaattcaatcaatgaataaataa

SEQ ID NO: 447387 - DNA, 138 bp, Serratia marcescens
atgagcaagtatatcaccatcctcaacgttcctaagttcaataaaaaatggaattctgtctccattgttaatttcttcaagaaaaagctttcgaagaactgtacttttcccttggcctgcaatgccgattatatttga

SEQ ID NO: 447388 - DNA, 1695 bp, Serratia marcescens
atgttcattaagtctttgtctgttagtaaattcaaaaaaattaacacagcagaaatcaccctaagtgaaataaatgtattggtaggggcaaatggctcaggtaaaagtagtattctgcaagctatacatttttcagtatgtgcagctattgctgctcgccagcaaagtcagcaaacattctccactgaacttttaatgtataatatcaccccggacttcacagttttaaagaacggtgaaccttataaaaactcaagatcacctgataatcaaagtgttttgagtatctttggatatgatgaacttgctggacgagaattagaatacaatataaccctatctaaggggcgaaatcatgggaatatgtcatgtgaaaggactggtgattctatcggattcggttcaataatcacagatgaaaaaaacctctttagtatatatgttcctggcctggctggtatctcacagaaggaagaattgaaatcgccagcaatagttagaagaggagtggcaagtggtgatgcaaatttatatttaaggaatgtcatttattacctgaacaaagacaaccgattgataaatctcaatggtatgttgcaagttgtattcccagatatagaaattgaagtggatttcaaagaggataaagatacttatctaactgttaattttaaagaaattgggagtgggaaaatttaccccattgagttggcgggaactggattactccaaacattacagatatttgcttacatagtgtatttcaaacctaaactattactcttggatgaaccagattcacatcttcacccggacaatcaatatattcttactgactcattgagcctaatctcagaaaataacgaatcagaaactcaagttatactttcaactcatagtaagcatataattgattcattatatggtgaggcgaattttatttggatgaaggatggcaatgttcaaagccaaggaatgaatttagacaaaatatctatgtttttagatttaggtgctttaaatgacttggatagagtaactgcgggggctgtagagaacatatttctcactgaggatagagatagaaaatacttcaaggctcttttgcaatataatggttttgacatggaaaagaccgctatctatagctacaaaacatgtacaaatgtgcaaggggcaattgtatctgctgaccttcttaaggagatttcacctaattgcaaggtcataattcatcgtgaccgggattttatgactgatgatgaagtagacatggtaaaagcagaaattctaagaggtgatgccattccattcattactgaaggtagtgatattgagagttattttacaaaaatcgaacatttgtctcatataacaggctcttcaacgcaagatatgcaaacatggatttctgatatagccacacaaaatcatgttgtcatccagtctgattttcaatcaaaaagagaggtgattaaatttaatttatacaagggaagattggatgaatgtcctggacacctagcattattcggaaaccaaattccgacatcagctagtaacattaaaggtaagttcttgttaaagaaaatacgagggggaattcaagggaaattggggcgacagtatgatttaactcaaatgagcccacacctaatcattaacgaattaggttctattctagaggccaagtag

SEQ ID NO: 447389 - DNA, 1302 bp, Serratia marcescens
atgaaaagattggtccacctgcaccactatcgcgccctactgcgcagcctgcttatcgccgtatttatcggcgtcgccgccgccctggcggtgtggctgtttcaccgttcgatgattggcctcgagtggctgctgctcggcaatgccgacggcagcctggtagccgccgccgccgcgctgcccggctggcgacgcgcgctgacgcccgcgctgggcggtctggcggcgggcctgctgctgtacattcaccagcgctaccgccaccagcgcccggcggcgcccaccgactatatggaagcgattgagaccggcaacggcaagctggataccggcgccagcctggtgaagtgtctggcgtcgctgctggtggtgtcgagcggcagcgccatcggccgcgaaggcgcgatgatcctgctggcggcgctggtgggatcgctcttcgcccagcgctttacgcacgagaaagaatggaaactgtgggtggcctgcgccgccgccgccgggatggccagcgcctaccatgcgccgttggcgggcagcctgtttatcgccgagatcctgttcggcaccctgatgctggcctcactcggcccggtggtgatcgccgcagtgagcgctctgctgatgaccaacctgctcaacggcggccaggcgccgctctacctggtgacgccgctctccgctcccttgccgacgcaatacctgctgatggcgctggtcggcgtggtggccggcgccggcgggccgctgtttttgtggttgatgaccgccagcggtcgcgccttccgatcgctgcgcctgaagccgccattgcagctggcgttgggcggcctgatcgtcgggctgctttcgctgctgtttccgcaagtgtggggcaatggctacagcgtggtgcaggcgctgctgatcgcgccgccgggggtgttgctgctgggcgcgatcctggtgtgtaaactgttggcaatcctcgccagcagcggctcgggcgcgcccggcggggtcttcaccccgacgctgttcgtcggcgccgcgctcggatcgataatcggtcagctgttcggcctgtggccgggcatggatgcggcggtgccgctgctgctggcgctgaccggcatggccaccctgctggccgccaccacccatgcgccgatcatggcggcgctgatggtgtttgaaatgaccggcgaatacgcgctgctgcccggcattctgctcgcctgcgtgatcgccaccaccgtgtcgcgcggcctgcggccgatctcggtgtaccacacggcgccgctgcccaagcgcgaggtttag

SEQ ID NO: 447390 - DNA, 237 bp, Serratia marcescens
atgccggcgccgaccataaacgccgccacccgcccccacagcaagccgccctccggctgcagcagcagcaagatcaggccgcccgccaccaacaacagcgcgcccagcagcgccgtggcgcggtacgaggtcatcagcatcaagcggccgctcagcgtgctggccagcggccacccgatcgacatcagcgccagcgtggtgcccgcctccagcggcgagccccccatcacgccctga

SEQ ID NO: 447391 - DNA, 540 bp, Serratia marcescens
atgaaatcactgcttttattccccgttgtgggtggcgtgctgctgctggccggttgtgccggcgtcagcagcgagttcggctgtaacgccaccacctccgacagctgcatgacgatggagcaggccaacgagaaagccaagtcactggaagagggcggcggagcaaagccggctgcggccgcattgcctcgcctggctgacggcgactttgcggcgattggtcgggataccggcccggtgccggttgcggtcggcagttcgtcacgcttgctgccacggcagggggcagcctccccggcaccaatgatgccgacgtatccggcgatcgctgcgccggcctccatcgtgacgaccgtcagcacctgcacgttgccacgctgcgccggtgttggcagcacccgaccggttcgccaggccgaacagacggcgcagctgtggatcgcgccctggattgacagccaggacgtctatcaccagccgggcaaggtgctgttcgtggttaaaccggccggctggggcaaaccccagtccgtgtattga

SEQ ID NO: 447392 - DNA, 219 bp, Serratia marcescens
atgaataacaatgacaaacccactatcaagcatttcgatgactttccctttacgggaggcgcttctgcagaaatcgggaacctcgtcgtctgcggccgaaccagtgtggggaaaacgacgctgatgcagtccatcgtgggtaaatacagcgcggatgccgtgcggcagggcattgctattgcaccgacaccaccttctaaggatgagaccaaatcatga

SEQ ID NO: 447393 - DNA, 732 bp, Serratia marcescens
atgagaattatacaaatcactgatacacacatttattctgaagggaataagattgggttaaaacacctttctaatctgagatgtattattgactttattgagtcaaatcttgatcggattaacgcagatttaatcatggttactggggatgtatctcatgatggtggagaggcgtcttacgagaagttttttaaagcgatgagtcatgtttctttacctgtctatgttatacctggaaatcatgataacaaacagaggttgcgttatgtttccgagaaatatgattgtgctttaaatgttaattcattttgtaataaggattggcgtatactgagtgtcgattctgttgtggataatgaggattatggttttataaaaaagaatgatttggttaattttgaaaaggaaattttagcaagtcaaagtaaaagaattgcagtattcttacatcatcatcctattcaagttggcactccgattgtagatgattgtatgttgatgaacgcatctgaatttcttgatgtttgccagcgtttgaatgttgcctttattggttcaggacatgctcatacactgtttcaacgtaagattggagatgccctggtgtcagtttctccagctgcgtgttctcaatggaataatggaactagagaggtttccttcattgataatagcgcgtttagtgtagttaaccttagtgaacatgtgcatgtagcaccttggtttatttga

SEQ ID NO: 447394 - DNA, 228 bp, Serratia marcescens
atggccttacaaaagcaacaatctggcgccaaaatgtcatttggtgagcacagagatttggaaaaagtggttacagccgttgtcccttcgggtaagcaaaaaagagtcaatgtgaactttgatgaggataagcatattcggtttaaggctgcctgtgcaaaacgaggtctgtctatatcggatgtaataaaagagctggtcgatgactggttaaagagtaatgagtaa

SEQ ID NO: 447395 - DNA, 621 bp, Serratia marcescens
atgaaggttatcgcatttttgaatccaaaaggtggttcaggtaaaacgaccgcaactatcaatgtcagttcttgcttggccaactccggaaatcgggttgctgtggttgatacagaccctcagatgagcttgaccaactggaacagagcagaaaaggcaccctttgatgttttcactgcttcttctgaaaaagatgtataccaggtacgaaaagagttggctgactatgattttgtcatcattgacggcgccggttcgctttctgtcattacttccgctgcggtgatggttagtgatctgatcatcattccggtgacgccaagcccattagatttttctgcagcagggtcagtcgttactgtattggaagcccaggcttacaatcgtcctgttgaagctcgcttcttgattacccgtaaaattgagcaggctaccatgctgaatgtactcaaggagagcattactcaaactgggattaaagcgtttagaacagctatatctcagcgtcagagctatgttaagtcggttcttgatggcgagagtgtctttgaaacgaacgacaatgccgcaaaaggggaaatccaaatattaacccgagaaattgttgctctttttgagtaa

SEQ ID NO: 447396 - DNA, 966 bp, Serratia marcescens
atggttaattataaatcggttttttttaaaaataaattcccatgggcgagacgtgctatcttgtcctccctttttgtttttatttttatctgcaaagcaaatgcaggtatggtgtgggaaaccaccaatgcgcctattgtgaatgggcttattaacaccgggaattattctggcgcaggtgccactggccgacttgtgggcattgatgttaatgatcagacgcagaacccttgttttaagcgaacttgtatagtcaatattggagtatttaccaattttaataaatttccagccccttatgtagggacggcattatctactcaatggcaaactgatctctatcctgagatgtggaacgcatcgacaatgggggcgttatataaagctataacatctaaaaaagttctaaatcccataggtgtcggccataatgtatatggctaccctaattgggggtactactgtgatcctgataatagcccctcattatgtatcattaaaaacaaatgggaggcctactcaaaagtgtgctatgcgcttgtttatcagtttacgggatctgtatattataatgctttccctgggcaaagctgcattggcccaacaccgccaaataacgaatgcaacatcgatgcaggggcggtaacgttggatcacggtcagttaagcactgacgaagtcaatggccataagaaaaaagagagcgtgaggctttcttgtacttatccggctaacgcgaatatttctgtggtgagcaacaatgccagtgaaaaaatagagttaaaagctgacgggagtcttttctcgaccgtcactatcgatggtattcccggcatcactggcaagaaaatcaacattcctactggtggggtcgctattgaactggaatctaccttgcacaccgccgggaatgttgaagaaggaccattcagtggtaatgccatattaatcataaattcatattaa

SEQ ID NO: 447397 - DNA, 420 bp, Serratia marcescens
atgaacagaacgaaccttctctgtgtcgttgtttcatttgtgaaacaccagactgaacaactgcttcctcacgtgagtgtcggagtcagcttggccagattggaagaggatgcattgtttttgcaacgtattcttgtcaaccttgaacaggcggctcggaatatccagagtatgcggagttctgaggacaaactggctatcgatcaaacagtgttctgggcagcacatgcgttgggacaccgtcaattttataaccgtgtgaatcagcggctcctgcgaataggtttgcggcgagcgattaagctgggccaccaactcgacccggaactgtggcagtgtgggtggcaaagtggttatgacgatgcttacggcaatgacatagaagccagggtaaatctggagcaaagcagtatttgttga

SEQ ID NO: 447398 - DNA, 1020 bp, Serratia marcescens
atggctacgataaaggatgttgccaggctggcgggtgtttccgtggccacggtatcccgcgtgataaacaattcccccaaggccagcgaagggtcgcgcactgcggtgcaggccgccatggaacagctgcagtatcaccctaacgccaacgcacgagcgctggcgcagcaatccaccgagacgctggggctgatcgtctccgacgtttccgatcccttcttcggcgcgatggtcaaggcggtcgagcaggtggcctacgccacccacaattttctgctgattggcaacggttaccacgacgccgaaaaagagcgtcaggcgattgaacagctggtgcggcaccgctgcgaagcgctggtggtgcacgccaaaaggctaagcgatcaggaacttttcggctggatgcaacagatcccgggcatggtgctcatcaatcgcacgctgccggggtttgaaacgcgctgcgtggcgctcgacgatcgctacggcgcctggctggcgacccgacatctgatccagcaagggcaccagcgcatcgccatcatctgctccactcaccagatttccgacgccaccgatcgtctgcaaggctatctcgacgcgctgcaggaacacggcattgcggtggatgaaaagctgatcgcctacggcgaaccggacgagatcggcggcgaacaggcgatgaccgaattgctcggccgcggccgttcgttctccgccattacctgctacaacgatccgatggccgccggcgcgctgtcggtgctgagcgataacagcgtcgacgtaccgggagaaatttcgctgatcggtttcgacgacgtgttgatttcgcgctacctgcgcccacgcctgaccaccattcgctaccctatcgtggcgatggccacccaggcggcggagctggcgctggcgctggccaaccggcaaccgctgccggaaatcaccaacatgttcagcccaacgctggtgcgccgccactcggtcgccaccctcaacaacgcgcacgaacagccgtaa

SEQ ID NO: 447399 - DNA, 2283 bp, Serratia marcescens
atgtccattaaacgctatccgcagctcgcccattggggcgcttataccgccgtggttgaagacggccggcttatccgttgtgaacccttcgtcgacgatcctgatccttcgccgctgctcgattccatcgtcccgatggtctactccgacaaacgcatccgcaagccggcggtgcgccgctcgtggctgcaaaagcgcgagggcagcgaccgtacgctgcgcggcagggaagatttcgtcgaggtggactgggaattggcgctcgatttggtggcgcaagagaatcgccgggtgcgcgagcgttacggcgcctccgggttgtttaccggctcttatggctggtcgtcggccgggcggctgcaccatgcccgctcgctggtgcggcggttctacttcagcggcggcggcggcgtcgatcagcagggcaactacagctggggcgcggcgcagttctttctgccgtatgtgatcggcactttttcgcccttgaccgggcgcgtcaccagttggcctagcgtggtggagcattgcgagctgtttgtggcgtttggcggattggcgctgaaaaacgctcaggtctcttccggcggcgcggcggaacatgcgctcaagccctggctgcaaaagctggcgcgcaagggcacgccggttatcaacatcagcccgatgcgcgatgattgtcccgagtttgtcaacgcggaatggatcccgatccggccgaataccgacgtggcgctgatgctggcgctagcttacgaaatccagcggctggacgcgcaggatgaagccttcctgcacagccactgcgtgggctatcaacagctggcggattacctgaacggcgccggtgacggcgtggcgaaaacccccgtttgggctagcgctattaccggcattccggcggcgcgcatcgcgctgctggcgcggcaactgatcggcgtgcgcagttttatcacctgttcctactccgtgcaacgcgcgcatcggggggagcaaccgtattggatgatgatcgcgctgtcggcgatgctgggccaggtggggctgccgggcggcggtttctcgttcggccacggctcgatgaacggcgtcggcaatccacgcgtggacacgcctgcgccgaccatgccggtaggcgaaaatccggccgggctggcgatcccggtggcgcgcatctgcgacatgctgttgcaccccggtgaggcctatcaattttgcggcgagacgcggcattatccggatatccatttggtgcactgggccggcggcaacccgttccatcatcatcagcagttgaatcggctggtggagggctggcagaagccggacacggtgatcgttcaagatatctggtggacggcggcggccaaaatggcagacatcgtgctgccggtcaccagttcgctggagcgtaacgatatcggcggctcgtcgcgcgatcgctacgtgttggcgatgcatcaggccattgcgccgcagcatcaggcgcgcaacgatttcgatatcttcgccgatctggcggagcgtctcggctatcgtgagcgctttaccgagaatcgcgacgagcgggcctggatcgaagctatctaccggcaatgcggcgcagcgcagcagcgcgccagcgtcgcctggcccgagtttgaggccttctggcaacggggctatgtcgagctgcccgcgccggctaaagagttcgtattttttgacgcattccgcgccgatccgcaggctaacccgctgcaaacgcccagcggcaagatagagctgttcagcgagcggatcgccggctatcgctacgaagatttcgctccgcatccgcagtggcggccgccggtggagtggctgggcgcgccgcaggccaaaaactggccgctgcacctgatctccattcagccgagcgatcgcctgcatagccagatggatccggcgccgctggcgcagggcaacaagaccgccgggcgagaaaccttgtacatgcatccggacgatgcggcgccgcgcggcgtggcggacggcgccgaagtgctggtcagcaacgcgcgcggcagctgtctggcgggggtatcgctcaccgatggcgtgacgcgcggcgtggtgctgatggcgaccggtgcctggttcgagccgggtttcgacgcgcagcgccggccggtcgagcaggcgggcaacccgaacgtgctgacgctggatatcggcacctcgccgctgacgcaggggccgaacgccatgagctgcctggtcgaggtcagcgcattcaccgaacgtcgggatcaagatagttag

SEQ ID NO: 447400 - DNA, 711 bp, Serratia marcescens
atgaaaggtatcatccattatcttaccgcaatatttatattgcttactccatttcatggccaagcaaccattaaactggaaaaaataagcctcttggtcaatcaagagaaaggagagacaacggtaagagtcgataatatcggtaattatcctgtgttgctattctcatccgttgttaaaaatgcattaagcaagcaaggagaagatcccttattcattctttctccgccagccgcgcgtattgatccgggtaaatctcagctggtacgcgtcatgcttgccgatccctcgggacttgataaaacccgtcagcaaatgcgccatatctatttccaggaaattcccgatatgggagaaaaaagcaaccagcttaaggtgaatactcggcatcgggtcgtcgctatcgccacgccctccgcgctagtggaaaacaaatctccctggcaaaccttgcattggcaacaaaatgggcattctatacaagtcaaaaatctcagcccttacgttgtcaggttagcccctaccatcaccgtacaacccagtaaccagcagtttgttttagaacaaccttatttgctgcctgggcaaacgatcggtacacgtaagagcgataggcttaccatccccccctcccgtttgcacttcacgccaatcagtaacacggggcgcgccatacccgatatcacggtcaaccttgccccaatccagtga

SEQ ID NO: 447401 - DNA, 1059 bp, Serratia marcescens
atggcgacaggaatatcgattcaacgaaggattattgccggcgggctatgggcatgcgcaatgttgggcgctcaacaggcgcaggccgctttcgggcagtgtgcccctatttcggggacccacgggttttcattccttttttccccgagtttaaccgccccgtctcaaaacgtgacggggcgaattattagtaatgcagccgggaacaattggaacttgtctggttcgtattacgtgaaatgcgagtgccagcaacgtacggcatcttatgttaccgccaaggtagcgctgagtgatccagtattcagcgaaaaccaactgacttattacgcgctgaatgaatatttgggcgttgccagcgaggttttcgtggcgggttatcgtaatgaatacatccccactccgtttgagaatgaaacaaataaaaaaaccgatatggacggcgaagacgagtcctgcgccagcacgccttataacagcggggctcgagggcgaattcacttgtatttccggcgccctttcgtcggggtgaccaccatccccaacacgaagttggtagatacctatgtatcggtggctagcggggtgaaaagcaatgtgccggtctcgacggtttccatgagcggtaccgtcaccgtgccgcagagttgcgagatcagtccccagacggtggtggtcgactttggcgatatcgtcagcacccatttccaaacgaaaggcgcgatgccacctcgtttcacaccggaagagagaacgctgacgctggcttgtcgcaatatttccgagggcgtcaaagtcagtctgtcatttcgcggcgaggccgacggcaacatgccggaggcgctgaagaccagcaaccgcgacatcggcgtgatgattaaggatatgcagggcaatgtgattcggccgcagagcgggcgcttgcccatcgataacttccactatcccgaccaaagcggcagttcgcggatcagcgtatatccgatcaataccaccgggcaagccccttcagtggggcagttcaatgccacggcgaccattcaggccgaaatccaataa

SEQ ID NO: 447402 - DNA, 1782 bp, Serratia marcescens
  misc_feature (83)..(92): n is a, c, g, or t
atggcattcgttgtagacattcgcgttgaagataatgctgttgcagctccagcaacagcgcaagttatagcccagaggttggnnnnnnnnnngttgggaagtggactaagggaaagatttgagactcatatccataagcgtgagtgccagccgggtcaacaagattacaacaccaaaatggcaagccgagccctggctgcgtttaccctgtatcagctaggcggcgttgatgagaaacacgcgggagaatcggtatgtgatagcagtgcagatggtggcattgacggtattgtaataaatcatagcgaaaaaatagttgttgtagttcaatcgaaatttaatcaggctggcaatggtacatggactaaagctgattttatttgctttaaagacgcttgtgaaaaactacaaaacgagcgttatcatttatttgaccaaatacttcaagataaaaattcagatataagtacggctctaaattcctttgattataaatttattttcaccatgactcacactggtaaaaagggtgcttcagaggaagtactgcgagatatgcaagaatggcaaagccaactaaatgctgcttcctttactcctgaagagcttcccaaagaggaatgggctttccaagttcatttaatttcatctgaagaccttgttcattggctacagactggctcaagaggacaaatcgatctatctggcgttgaggttgagcgttatggatacttaaatgaaccttataaagcgttctatggaactctatctggtgatcaagtaggaaattggtggaaacagtacggaactcgccttttcacaaaaaatattcgcaacatgctaggtaaaactgatgttaatgaggaaataaagaaatccgtatctgaaaatccagagatgttttggttttataataatggaattaccattttagttaatgaagtgatacctcatagaagaaatgcagcctcaggagcagaaagaggttcttttgactttaaagatgtaagtatcattaatggcgcgcaaactgtaagtagtattggctctgttatggatgcacttggagataaaatatatcaggttaaagttccagctcgctttatcgaagttagagaagaccttgacaatttaatttcaaattcaataacaagggcaaataactttcaaaacagagtgctgggaagagactttgcctcgcagcaaccggatcagcatcgcctagcaagagaattgattttagaaggatatcaatatcaacttttaagaacagacgaggattactcacaaagtaattcaaaggttattgatctggacgaagctttaaatgctcttgcttgtttaagtaaaaacaataccatcgttgctacattgaaatccaatagaggtagattttttgagaactttgatggttcactttacaaaacgctattcaatccaagattgagtggcacaaagctgattaatgccgtcaatcactttagagtaattgaaagagctattagtgaaacattatctgccacagataaatctacccatagcagacgtcacttaataataactcatggtaatagatattattcttccgtactattgaatactatactaaatttaagcaccagtaccgatcaaataaatccaaatgtggctaagctaactgctgatctcgctattttgatagacactacagaaagttatatagagacacattatcctaattcttaccctgctagattttttgccaatccagcaaaaatacaggagttatacgcgagtaactag

SEQ ID NO: 447403 - DNA, 1128 bp, Serratia marcescens
atggccgataacttttcatcgcgaatcgaacgtttaagaacacgaagaagagggataaatgaaatatttgcaatggacagcgggcttgaaagcagagatatcttgctggagaaatcccgacaacaagaaacctgggaaagcagggcatccggaaaatcagccacgaaatatgcattaggtgccatgcaggaagttgatccagtttatacaaggattagcatcgaaacagggaaaaggatagaaaaccaacttgctaaccgattggaaaaaaaggatattacagcatcctttcgtttgcagggttctgtaccgcttaacatccatatcaaaggtgttagcgatgtagatattcttactattgatgagcaggtatttgtctttgcaaacgaaggaagcaaagcaaacagttatattttatctacgaaaaaatccgtagatgtactacaaaccctacgcgccgaaattgaagatagcctcagtttagcttttccggctgcaaaggttcacactgaaaactccaaagcagtaaaaataactggcggctctttagcaagagatgtggatgtagtcccggctgtttggtggaataatgccagatatcaagatacaggcaatgaagttgacagaggtgtggcaattttaaataaaaaggataatcagcgagtttataatacgccgttccttcacattgattatattgagagccgctgcaaaacaacactaggcggcttaagaaaatcaataagattgcttaaaaatatcaaagcagatgcgcatgaggaaagcatagaaataaacctaagtagttttgatattgcttctattatgtatcatgctgatatggacaacctcttaagaggtcacttctatgaacttgcgatactaagtgaaactcagcgctggcttgactggttatggcgtaattttgaagaagcaaagaaactggaagtccctgacggaaccaggaagatatttgacacagacgaaaaaaaggatgagttattaaaactatctctgcaagtcgatacaatattgacagccgttcacaatgaaatcaattccattttccataaggattcaatcgatgagggaatgagagaatatttgagcaattcaaaagtcgattag

SEQ ID NO: 447404 - DNA, 624 bp, Serratia marcescens
atgaaaagccatgaatatattgttataagcggttttaacaggagcaaggtaggtaaaataattggttccttagcttctctgatatcagggcttttggtcttttttattttaagttaccttgaaaatcattcttatattaaaacaaaatctgtaatgaccccaacagtatcttcactcattagtgcaggtacaatgtatctagttctctactggatttttgactcaagattatggaagtggaagttaatatcaaaaattattaacgtcccggacctgtcgggagagtgggattgtgaagggcgcggcgaaaacaaggaaggagacgttttttcatggaatgctaaaattaatatattccagtcatgggataaagttcatatacggttgcaaacctcccagtcaggttctgacagcatagctgcttctatcatatatgatggcgaaataggttatcggttagtttacaactacagaaatgatccgaggataaacgaaaaagagttaagcccacatatgggatttgcagaattaacttttgataaaagcctgacaactgctgatggtgagtattttaatggcagaggtcgaaatacctttgggacaatgaagctaaggaagttataa

SEQ ID NO: 447405 - DNA, 138 bp, Serratia marcescens
atgaaacgaagaactcggattaactacacgccagagcagatgacgattatgagtatgagtatgagtatgagtatgagtatgagtatgagtatgagtatgagtatgagtatgagtatgagtatgagtatgatgacttaa

SEQ ID NO: 447406 - DNA, 384 bp, Serratia marcescens
atggggctgtgcaataccacgtttctggtttcggtgcagaacgcggcacattacagcattcgcggcatcgccaccgcctgtacggtgtttacccgcatggtgggctcggccatcggcaccgcgattttgggcgcgacgctgaatctcaacctgcagtggcgtttgccggagattgacgatccggtacagcggctgatggaaccggcagtgcgccagagcatggggagcgaggcgttggcgcagctgacccagcaagtggcggcttcgctgcattgggtgtttctggtttcggcgctggtgtcgttgctggcgctggcggcggcgatgctgatcccggcgcgttgtcggccgcagggcgaagaggaagaggcggaacaggcgtaa

SEQ ID NO: 447407 - DNA, 726 bp, Serratia marcescens
atggtaaaacttaggaatagattttttattgaactttgggatgcaacatcagcaatatctgttatgaaaatgctggcagaacaggctgaatacaatatcaaacgagctgtagaggaggccagtaagcctggtgctgtatctgaaggtgtgtatgatgattatagagaagatgaacatggagtatcttacacctttgaacgaacctattacacttgcggatcatgtattggtctcgatcatgatgaagtaaaagatgaatatgtatatttaattacccaactcactcgacgctcagcatttcttacaatctatggcctgttcgagcatcgtatggaggagtgcgtaaaactgatgcttgatttatgtggttatactgggaagctagaaaaaggaattcttgaaaagacacattacgtgctgacaaaggggattggcgcgaaaggcattgttaatgtcgatcatcttacaatactccgtaacattatggctcacggagatggcatttgtactgaatatcaacagatcatcaataagactacaaagaaaagccctagtgaaaagcgaaagataaatgcattaaacagagccgtatcaaactctttaatcactgtaaatgatttcggtggtgttttgttaaaagataactccctaagtggcatcacaataattaaaaaaaacaacattatccatttaaaattacattttagaggtcgcagccctgtgtga

SEQ ID NO: 447408 - DNA, 738 bp, Serratia marcescens
atggctaaagcaaactcttcattttctgaagtgcaaattgcccgtcgtattaaagaggggcgtggccaagggcatggtaaagactatattccatggctaacagtacaagaagttccttcttcaggtcgttcccaccgtatttattctcataagacgggacgagtccatcatttgctatctgacttagagcttgctgtttttctcagtcttgagtgggagagcagcgtgctagatatacgcgagcagttccccttattacctagtgataccaggcagattgcaatagatagtggtattaagcatcctgttattcgtggtgtagatcaggttatgtctactgattttttagtggactgcaaagatggtccttttgagcagtttgctattcaagtcaaacctgcagttactgataaagaaataaatcccgtagtaaaagaaaatattgaatggctttattcagtgaaaacagaagaagtttctgcggagcttttagcacaactatccccattggcccatatcctgcaagaaaaaggagatgaaaacattatcaatgtctgtaagcaggttgatattgcttatgatttggagttaggcaaaacattgagtgagatacgagccttaaccgcaaatggttttattaagttcaatatttataagtctttcagggcaaataagtgtgcagatctctgtattagccaagtagtgaatatggaggagttgcgctatgtggcaaattaa

SEQ ID NO: 447409 - DNA, 438 bp, Serratia marcescens
atgagcagtaattataccgcgaaaattgtaagcgtcaatgaggatgaaaaaacctttgtcattaacaaaggtagcgaggattatataagaaaggatgatatttacttaatattcgaattaggggatgaaataattgatcctgatactgatgaaagtctaggccggctagaaatcgtcaagggaaccgcaagagtgtcgcacatacaagaaaaaatgtcgacgataatctccaatgaatacataatgacaccagagagaaaggaaataaaacaaaataaaaacaacagattaatagactccttcactaaaaccctatatggatttgggcagctcgataatgaatcgcaaacagaaacaataatagcaagcgagaagataattaagaaaatacctaatgtaaaagttggtgactatgtaagaaaaatatattcacgttag

SEQ ID NO: 447410 - DNA, 912 bp, Serratia marcescens
atgcaaaaacaaaaaatcggtggcctctgtttgttacaggttatcttgtgtgtttttgttgtattaattcacactaggccttttataaattattcattcataaactcaatcacttcgaacggtatatttagaatagcagtccctttgttttttgtgatgaatgggtattttttcagcttcgataaagaacaattcatttctaaattaaaaaaactatttgttatttacacctttctcttgatgctattttccccactctggcttgatttatcatcaccctatgggataatgaaaacactgacctataacatcgtcattggatggcatcacctatggtatttgtcatcactcatcgtcgcttccgttattatttatatcatgcgcaataaaaccggattattattaataatatccacccttctatttattttgtcttattttattcaaaattcttatcttttactcgacggcgatatatttgaaaagttaaacagcaagctatacctttataggaacgcattaacattcgccgtacctttcatgctgatagggatttatattaggaagaatgaggatttaaaggtttcattgccattgctggcgatttccatcgtggcattgttaactgaagttataattttcgcactcgcggagacgaaagataacatggcgcgggatttatatgtcacattgatgttcacagcaccagtactctttatattctttaaaaatatggcattatcattcgaagaaaaagtttctgggagagtttacttttaccacccaatctgcgaaatgatgttcaaatttgcagggtatacgggtggtctggttatctctactgcgacccttgcctttgcctttaccttcgccatcgtcatagagaagatgaaagagaaaaacatgttctaa

SEQ ID NO: 447411 - DNA, 831 bp, Serratia marcescens
atgataaataatatacaaatacttagggccctggctgttttaatggtaatagcaaaccattcatcaggtttggtctataaatatggtttcaatgctgatggctttttacaggttgggcattggggggcatatggggttgatatattctttgtgatatctggttatatcatggcgatgattgacaaagtgaaaagtaagacgcctgcaagttttatcaaagataggtttgtcaggattgttcctgtttattggatctttaccttgttaatgatattcatgcaggctgtttatccggaggcctttagagaaggcttattcacgaatgagcagaatatttcatcaatgctttttattagctatctgttaggttatgactatccaaccatatatgttggttggagtcttgagcttgaaatgactttctatgcgatttttgcactgtgcctttttattggaaaccaattcataaaaatatctttgttggttgcgcttatttttattctgtcctttttgggattcatgagaccagcagcggtagaattctcattcggtatcctgttgtattacttggccaatgggttgaagatagagaataaactcagcgctttttggtttatccctttgattgtgaccctagttaccatgcttatgattagcgatatgccgatagatcttgtctcttggagtagaccattagttatcgggattatatcatttgctatggttgctttttcaattgcttgtgttgatcttcgtaaaggttttttacatacatcggcgatgcatcctattctatttatctggttcaggttttctcactgccaattataa

SEQ ID NO: 447412 - DNA, 1260 bp, Serratia marcescens
atgaaagaaatcatttctccggtcgataccgaggacggcctgtttcatgatggcgacccatcaacaggcacagaaggcaccgtcgtttcgcaaaaatggctgaacccggtacagggtgctgttatcagcagccagcaagaaatggccgccgtactaaaagaggcgggaattaaaattgacccgtccaagcaagatcaattactggcggcaattaaaaaaataactggcacggcaacggaaggttttttaaaagctggtgcttttgggcttggtggcgggcctgtagctaaaaccgatgcttacagcaatatcgcgcagttttatcgtgtgaatgacgtagcggctaacaaaccaccgataaccggcactgccgctggcgtagtgtgtttaccaatcgatggtgccccctcaaccggctacttggctatcagtattcagggccatgcatggatcggtcgctcaggcgctgccgtcggaggggtaacgtggaatcgtgtatttactacaggatacaaaccaaaaccagacgatgttaatgcctattccaaagaggaagctaacggaaggtatgcctacaaatctattaccgtaaacggcaaacctttatcttcaaacgttaacttaactgctggagatgttaacgcttggaacaaaactgaggcagatggacgcttcatctataagactggcgacactataaatggaatactaaaaaacagtaaggaatttcaatcaaccagtcctgataattttagaattattggtggtgcctttggtacattctggcgaaacgatggcaattctttttatctgatgctgacgaatgccaacgaccaatatggcaactacaacagcctgcgtccatttagcgtaaatgttaaaacgggttcagtcactttaggtaatggtattcatgttggcggcgaatggcctgcaatcaccacatctactggaacaacgtggcatcctgacggcaacgttcaaggcagctgttggggcggatacctcagtaactggttgaacaccaatgtttccaatgcacaaaacaatgctcagaactgggcatatcaaaatcttgtccaaaacgtcaggcttactgggcgaattaaccgacctgatactggcggccagataagggttcctgatggttgtgtgtttactggaatgtcgggggccaactatgacccttcaatttgggcgtcatattcttatgtgcaagttttaattaatggttcttggcgaaatataggaacttcttaa

SEQ ID NO: 447413 - DNA, 225 bp, Serratia marcescens
atgattaacgtgatcgcccgcaaaggcatccgggtgccaaaagaagagaggcccgaccgttacatcaccgacggagcagcggtcagcgttgagcaatccgcttactaccgccgccgcttgcacgaaggtgatttgctgttggccagtgtcacgccgccaggcgatgcacctgcgaccgacgttccagaacatgcacttcccgccaaggttaagggggttaaatga

SEQ ID NO: 447414 - DNA, 2316 bp, Serratia marcescens
atgaaacagctagattttaccctgagcctgatcgacaagctgacgcggccattaaaacaggcgcaggcgtcggtgaccggcttcgcggaaaaatcacaggcggcctttggcaagattgccgtaggcggtgcggccctggtgggcgtcggcttgtcaatcaagggagcactcggcccggccattgaaatgaccgatgcgctcaactcggccgccaccaagggcattgacgacaaaaccctgcaaaaggtggccggcgatgcgctggcgttcagtgcccggtacgggaaatccgccaccgagtttatcggctccactgaggatattcgcagccaggtggcgcggctgagcaatgacgagctgccggcctttgcggtggcgaccaacaccctggccgccgccgtcaagggcagcgccgccgaggcggcggagtacatgggcagcatgtacaacaaattcgacagctacgccgagaaaatcgggcgggtggagtttgccgagcaggtggccggcaaaacggcctatatggcgcaggcgttcggcaccagtatgcagacgatctccgatctgatggaaggcgccaagggcgtcggctccaactacggcgtggggctggatgaacagtttgcggtgctggggcaactggagaagacgttgggcaccgaggccagcggcagctatgaatccttttacaaggtggcgcagcagggggccaagcagctgggcctgagctttgtgaatgcgtccgggcaaatgctgaccatgccgcaaatgctggagaagctacaggcaaaatatggcgccagcattgagggcaatctcaaggcgcaggccgagctggataaagcctttggcgatggcgcgaacgttatcaagcagctgtacggcaacgttgacatcttgaatcgtcatatcaacaccctcggcagcagcgacggcatgaagcgggccacggaaatggcgcacaagatggccaatccgtgggagcgcctaacggcgatctggtattccatccgcgcggcgatgggcttaaccctgctgccggtgctgtacccgctgatcaacaagatggcggatgctggccaggtgttggtgcgttgggcaaaactgttccccaacttggcccgcgcaatcggcatggttgtggtggcatttctggggcttgccgccgtcggcgcgatcacaaacatcgtgttgggtgtgacgaaatttatcgtaatggggctgcgtgccctgtgggtgggattcaccgccatattgaggatccatattgcggctatctggctgtatcaaaaagcggttctggcctggtcggccgtcatgcgtatgctacgtggcgtattgctggcggtacgtattgcatcggttttgaccgggatagcctttaactttatgtcctggcctattttgctgattgtcggcgctatcgcgttgctgggcgtcggttgttatctgctgatacagcattgggatgctgtaaaggcggccatcatggaaaccgaagcattcaaagttctggccgctgtcgttgagtgggtaggcggcgtgtttgcagaggtctgggcctgggtagcggaaggctgggagcaactttgcgcctacttcaaaggtttctcactggctgatgcgttcacgggcatggtggacacggtgggtaagatgttcagtggcttatgggcctcggttagaaaggttttcgcagagacctacaactggatcatcgacaagttgaacatgctgccgggtatcagcattgatgcaatggcggtggatgctgtggcaaatgtgcctgagagccttgcggggcaaggcagtacacaaccggtcacagtacccacgattgaagccggtacgctaccaactggacgggcttccatcgcgggagtggaggccgttgcaccatcgccagccgttacgcccgttgccgttccacagccagtgccggcattgatggcgcccaacagtatgcacggttccctgcccgagaaaatgcacgatcgtagcgttgttccaggggcgccgcagggaagaggcgcgacacctgcgccgaatgtgtcggttatcaatgtgccgcaacccccacaggtaaaagtgatcgcggccgcacagcccgacaaggccaaaccggcagcgctaaccggtaatacgcttatcaccggcggcaagctaaaagggattgggccgggcggactaagcaaggacatcaccaataacacgcgcaccgtcaccgataacagtaagcaaatacgcattgaaaatatcaacgtcaagcaaggcatgacgccagagcaattaatggaatggcaggaattaaactga

SEQ ID NO: 447415 - DNA, 198 bp, Serratia marcescens
atgatccgccacactcctggcgaggtggtgtatcaccgcctgtccgccagcgcccgtcggcccacgctgctggcgccgctgtggtgcgaaaaccgctggagcggcatgcaggtggtgggcgcttatctgcagcaatacggcgggcagggcagcgcgctggatgaaaagcggcgctaccgccctggaatgccgctctga

SEQ ID NO: 447416 - DNA, 324 bp, Serratia marcescens
atgaactattccgtccggccgccgcaatgcgacgacaaaaccattctcgatatcacgatgaatttatatctctatccggcggtgcttatcgcgcatcgcctgggcatctttgaatttattgctttgcacccccgcaacctgaccgatatatgcgctcaggccaatgtggaaagacgcccggcggaaacgttggtcatggcgttattggcattgaaattgatagacagagacggtgaaaacattctctctcacgccggaagcggaaacctttttgttaaaaaacaacccgcattatttcggctacttctgggatttgatggttga

SEQ ID NO: 447417 - DNA, 648 bp, Serratia marcescens
atgaactactctgatattgctgaaaggatagtgaaagtgcttgtttcaccgggaagcgttgttggattggctcaaggggcggtatcgataccgattgatttgggatatttagcgctgagcgtttttgatacgggcaatcgttggcgtttgcagacggaacgtatccgtctcattagtgctatccgctctggaatattcaatcgtcatcaaatcttacgagcaatccgcatagttattaatgcgttcacagattatatccccacagatatgcaagacagggtttatcgaggtatagcctcatcggcagctggcagactgctcaccagtggtgttgtcgctgcgactatagctaatcaggtcatagcggcaggcggtgcctcgttcctgtcgaaattttctgccggttcgatgggatttttcctgacgagtggggggctggtcgaacattgtatctataagacctttgagttagagcgagagaacgccccggtgtattacaaattacggcgggcgggaaacctggattttctttacttcctgcttaagccgtatatgaaaccttttatcgacgctttgagcgtccgtaaccgttatggcgagggggagtttatgaagatactggaaattctggagttcaaagcacaatga

SEQ ID NO: 447418 - DNA, 210 bp, Serratia marcescens
atgaaagacactggcgtgttcaagagaggcattaagttcttatacgacgtgttgtttcagctgctgcttattgtgatgtttgctttatgcatttattttttctttcactatgagacaacgacggagcgcctaacttatataatagggacggtggtttttttctatatcgctcatagggttgtcttttttttaaccaagaaattacgctga

SEQ ID NO: 447419 - DNA, 630 bp, Serratia marcescens
ttggggaatccgttcaaagatgtcgggacgtattttctggatgtgtatggctggaaagccggtcaagaagacaccaaagaaaattatcgcgcggcgcaaacttgttacggttatggggtgtcgggaaaccagagtgggaagatgtttttgcgtacctggaatggtaccgagtggagcaagtggttcaaggtttggacagaggcctccacgatcacggacaccaatggatatctcaaacccgcctccccggtagtcaagctctttggtgatggccgcagcgtattcaatgaagacgttctgggggtaaaaacggagaggctcagcgaaggggtttaccgcatggcagggacgctcggattcaatgccgacccaatttggggggggataaacggtgggattgaaatcccattagacagtaacaagcaagcattgatttgggttgattatcaggttgaaaccaatggcgatatcatcattcgcagttatcaccgtacccacgacggtgttcctgttttcgcgcggaatattaaagaagggtatgtggatggtcagcctatcgacattcctgagggacgtcatatcgatctgcgcgtacaaatgcccgaattgcccatggcggcagaggtgtaa

SEQ ID NO: 447420 - DNA, 366 bp, Serratia marcescens
atgaacggcaagtttccgcaacattttctgtggggcggcgcggtagcggcgaaccaggtagaaggcgcgtatcaggccgacggcaaggggctgtcgacctccgatctgcagccgcagggcatcttcggcgccattacgccgcgcacggcgggcgacagcggcatcaaggacgtggcgatcgatttctatcatcgttacccggaggacatcgcgctgttcgccgaaatgggcttcaagtgtctgcgcacctcgatcgcctggacgcgcattttcccacagggcgacgaagagacgccgaacgagaccggctggcgttttacgatcggctgttcgacgagatggcgaagtacggcattcagccgctga

SEQ ID NO: 447421 - DNA, 1476 bp, Serratia marcescens
atgacgaaaattaatgaaagcggccaatgggtagatagcgtttatcaaatccagcgcggcgacaaagtgatcgggggccgcgatggcgttgcaaatatccagccgcagcagctggcgaaccgcacgcagtatctgaaacaggcggtcgagggattatccgtcggcgaacagccgttcgacaacgtggaaaaggcacaagcaaaaatcaatgacggtagcattccgctgaatgcgcgtttttccgtgcgcattgaaagcaccgacgcatggctggccgaatacaaaaatatgggtggcgtcgccacggcaacgggaaaaacgttaccgtctggcgagctggttaaaaagataacggattatttttatttaaacgatgcgattggtaatttgctggttgatatggttgatgaagattatttctctgtgtggcgtttattcgataatggcgcattcggtacgattaaaagtctgttatcgccacagggtatatttttggacgacctgaaaattacccatgccggcgatcggccaggcgtcatttatcaggatgcggatgattttgtcgttgaaatcgtcgggcgcgatggagtaccagcgccaaaagcgctacaggggcatggcaaattttccaccctcgaaacgtcgggcgcctggctacggcttgaggacgtggacggattttaccgggactatatcgatctggatggcaacccgctcaacgccggcagcggcggcatgagcgagttcgatctagtggcgcacgatgcgcagaacaaagcctactcgcaatccgtgcgcgaccgttacaacgctgacattcagcgccttgtgtctgccctgaatcacctggtcatgtatagccagagcctaggcactcagcaggaaggatggccctccctcaccaaggagccaacggtagactatgacaacctgatgctgggcgacagcgtacgccctaaaagccgcacggctgccgagtttgttccggtaggtgatgccgtgcttaaaccgctaaaagccgtggtgcagtctggggacggcgcaacagtgctcagcgacgcgcaaatcgcggcacttcagccaggtgcgccaaacgaaggcgaaggcggcgcggcgctgaccgatttcctgcgtaagctgtggctgcaaaagaattgcattgaacgagatccgtcgcggcgctttgttgtatcaagcacaggcgttaacggccgcactatcgaagaactatcaaaaggcgctaacccggagttataccaacgccccctgcaagcggtgaaacaagtcaaagccatcgccgatgggcttggcgtcagttatgccattgccgcattcatcttcatccagggcgaatggaactataacggcacacgcggcggcgtacagacaaaagacgaatataagaaagcaatggggacattattccctgacatgacaaacgatatggcgagcggggtgatgctgccaacttactga

SEQ ID NO: 447422 - DNA, 393 bp, Serratia marcescens
atgaaaaagcctattgccatcgcggctctctacccacaacacaatcacattcaagatcttcatgtgttggcgcatctcaatcgagtgcttgccttcgcccggtgcggccgtcgttgcgggaaaacctacgcagccagccaacaggagctgatccgcgcagcattcaagctctccgcaggcgcgacgctgcgacttcttcatgccagaagaaagcagcctcttagggacaggatggtcagttatgaccctgccagcggcccagaccagtcagttgagtgcgtatataaacgcaactacgccacaggcggtttaacactggtatcggtcaatattttgtcgcgtaagtggcaaaactcgccgtggttttacttagacgagtggccgtgggcgtga

SEQ ID NO: 447423 - DNA, 687 bp, Serratia marcescens
atggctaattccgccttaataactgctctgattatcattgtgcttgcgcttgtgttcacgctcgtaatttttgcaaaaagaataaacgagttaacgaagacaacttatgattactccaagttaatcaaagagcttgaggcgcaaaaagctatagcagtttctaaggtgaaatcacgtgaaagaaaggttgaatctaatgcattaaatatgaagaaattacgagtgcattttaaaactctcgatgtgaattcgttagataatgttaagtctcttgtcgatgaaattaaaaaggatattacttcatcgcagcatgtttcagtttattcccctcgaagcccacaacaaagaagttcagttgcggatgctttttacagtgagtcggctctagattctcgtgagaaaaccgaagtggaaactcatactatttggagcgaagcaccgttagagatttcttttagctatgaagactttaatggtgataagtctagacggactattttgcttaatgaggttttgagtaataagtttggtgattactattttaagggctactgccttgaccgagacgacacacggcaatttaaattagatagggttaaatctaaaattctatatgaaaaccatagatattcattggatgactttatttatgatgttttggatatcgatacggaaggattaacatga

SEQ ID NO: 447424 - DNA, 171 bp, Serratia marcescens
atgctcccgttactttattattcaacttggattttttatcaaaacattatcaaaacgttttatcaaaaccccctccaaattctctcatcaaaccgcgacagtgatccaatctttgcctcgatcatcgtgataccggtcggtctgtttctgcgatttgtggcccaacaataa

SEQ ID NO: 447425 - DNA, 567 bp, Serratia marcescens
atgggaagtatcttgagcgataaacctaccaccatcgatgagcgccggcagtttgctgagcaaaatttcatgtcgatggattttgtgaactggttcttcgacgagaagaaggaaggctgcggcaatgcgtggttcatcatggccgctgctatgtgggaaggttggaaaggacaggctacccgaaatgcgcagcctgtaacgttggaagtaattgcgcaattcaaggaatggaacaacggattcccggttgaaaaattcaaggccgactacgttattggctgggtattagccaactattacgtttcgccagcgccagcagtgccggaggaaatgccgtgcggcggcgctgcggacgagtatcacgacggttatcaggacggctggaacgcctgccgcgccgcaatgctcgaacctgttagcctgggttacaagttggtgccagttgagccaacagcgaagcagtgggccgctggcgtcaaggctatggactcagggatcgataaagtaactctcgtctacaaggcgatgctggaaacagcaccaacacaaggtaagaacaatgaatga

SEQ ID NO: 447426 - DNA, 333 bp, Serratia marcescens
atgagcaagcaaacctacatcgaagatttgcaacattcgcacctaaaggagctgcaggcgcggcgctatcggacgttctcaccatacaggcatagaggtaatgaccgctggcttgaggtgtgcaacgcccacaaccgcaatgtaattcgaaaggctcgccgaagcatcggcaatagcaacaagattggcgtcagaaagacaggaaaaggcatgtgcggctttttgcttgagctgaaaatgtgggcgcagtttgtcaacggcaatcgccaaaattccggcatgcctaagcgtgtgtaccgcatcaatcaccgtggggtgatcacccatgcctaa

SEQ ID NO: 447427 - DNA, 315 bp, Serratia marcescens
atgagcaagacactgaatttttatggcgccagcgatgatctgtttgaggttgagggtgcgatacgtgaagagatcggctgctttaacgagttggggatctatcacttgaaatctgccgaaggcgaagtgctgattgtcgcaacctacaccgatgaaggttgctgggctattgggctttgtcaggttggcgaagacgtgccggtaccagcttggcctgtctcatactccatgcatgagcgaggttacagcgtccagctgaccatggaagtaccggacgatacgcagctggttatggtcaatgaggatgacgattga

SEQ ID NO: 447428 - DNA, 534 bp, Serratia marcescens
atgtcttggattttaacctttacgggtaaacgctttgattacgaagcgccaaccgttgacgctatttgcattgaagatatagcgcaagccttatctcatgaatgccgcttcaatggtcacattcctgaattctatagcgtggcgcagcattgtgtcattaccagtaaaatcgtcccgcctagttttgcttttgaagcattactacatgatgcgcacgaagcatattgcaaggatattccatcaccgcttaaaaagttaattcccgactatcgcggcatcgaaaataatattgattttgttattcgttataaattcggccttccagccaccaccagcccgatcgtcaagcatgccgatctggtgatgctggccaccgaacgccgcgatctcgacattgacgatgggactccttggccaatgctcaacgggatccgcccttcggaagaaattttcgtttcaccagtcaatccagtacaggccagggcgatgttcatgcagcgttataaccagctggccagcgaaagggctgcgtga

SEQ ID NO: 447429 - DNA, 828 bp, Serratia marcescens
atgtctcaattagatggcggagcaattcaacaagttaaagacctggtgatttctggttatcaccttcgtgatatcgaaggattagcctgcccgacagcaattttacctgaaggtgttggcgttgaaagccttgagcgattcggcttagaacgcttccgcttccgcggcgccatggaaacaaccagcattgccgattttgttcgctactccaccggctatgccaaagcggaggaaccagcacgctgcttcattgacgccgacaacatgagtgcacggtcagtgttcaatatcggttcccttgagaacccaggccatgccgataacgtcgcttcgatcaaactcaaaaaaaccgcaccgtatcgtgcattgctggcaatagatggcgatcgcctgcgccagaaaaatattgctgaatggctggaagactggagcgactatctggaagcatttgatgccgagggtaaagcaatgtctatctcgcaggctgccggtgccgttcgccgcgtgagcattaagcaaatgtcagaagcagatcatgaagacggtgatttcagcggtaaaaaatcactcatgcaaagcattgaagccagtagcaaagacgtgatgccggttgcattcgaattcacctgcacgccgtatgaaggcctcggggaacgcaagttcagcctccgcaatagccttctaaaaagtgacgagccgcttttcgtcttgcgcattgttcaacttgaagcgcaggaagaggcaattgccaacgagtttcgcgatctgctgatcgataaattcgatggcggctcagtagaaaccttcatcggtaatttcaaagcctga

SEQ ID NO: 447430 - DNA, 315 bp, Serratia marcescens
atgcagtttgacgacgacaagatctgcaaaacgttcaaggtgccggcagaggtaatcgacactatcgacagccagcatgaaagccatgccggaaaaacattcgagtttttagtaaacggcgctccgctggttttgctcaaaaccaagaatgctgttgctgcagactatatcagtttcatggatggcgtcttaaaggcaatgcttaatgatactgaatcacttgaaaaagaagcgaatatgtcaggaaaaaccattaaacatgccaactttgaagcttttggcgctcttccgattacagagaccaaagatccttaa

SEQ ID NO: 447431 - DNA, 486 bp, Serratia marcescens
atgcttagcggtaaagagttgggtcatgcgatcgagcaggccattaacaggaaaatttcttcgggtgccgtcaagaccaaggcggagatcgctcgtcatttcaaaattaaacccccatcaattcatgactggatcaagaagggctcaatcagtaaagataagttgccggaattatggggttatttctcggatgtagtaggtccggagcactgggggctgaaagagttcccccccctaatgtgtaactcttccacgctgccaggcgagctgtcagaggggcacagaatttatgatgcctactcgcatgcttcagaagaaagacgcgtaattgtcgattttttattatcaattggcgaatctgaaccaacctgggttgatgcagatgtgcgggcatatgttagtacgcttgatacaaaagttaaaaaatatctctctgaaaacaaaccgttagttaaaagcaccactccccaaaagaccggtacttaa

SEQ ID NO: 447432 - DNA, 129 bp, Serratia marcescens
atgccactcgtagcctgggcgctggtaaacaactttctgattttcaatgtcgtgctcggcaatgacgactacgtgaccatgctgatcacgccagcgactgccgatatctgggtaattagccgccattag

SEQ ID NO: 447433 - DNA, 1014 bp, Serratia marcescens
atgagtacgaaattgaccgcatacgtgtgggacggttgcgcggcggcgggcatgaaactgtccatggtagccataatggcgcgcctggctgacttttcctcggatgaaggcctgtgctggccgtcagtgaagacgatcgcccgtcagattggcgccagtgaaagcactgtgagcgcatcgctggccaaactggaaaaagacggctggatcacccgccaacagcgccggaaaggcaaccgcaacacctcaagcatgacgcagctgaacgttgagatgcttcgcgctgctgcaaattctcaccctccagaatctgaggcctcaaaatctgatgcatcaaaatttgatacctcaaaatctgacccatcaaaatccagcaatacagggcgttttgaccctccagaatctggatacgatccgtcagtaaattcaaaacatgatccatcagataaaaacacttttggtcaaccgccggcggcggccgaccagggggatattgtttctgaagaaattcacatcactgatcaggccattctggtgctgaaacacctgaaccagctgacgggcgccaaatacaccacggccaaatccaccttgcagaacatccgggctcggctggtggacggacacacgcttgaggaactcaaactggtggtggaatacctcgttgatcgctggctgggcacagagtgggccaaatacctgaaccctgaaaccatgttccggccgggtaaattcccgggcaacctgctggcggctacagcctggcatgacggcggtcggaagcctgagcaagcccgttcgtcgccggtggcctgcgcagagcgtgacgcggcctatcgtcgtttcatcggtaacagtctgccgcttcaaaacccgggcgagttggagacgttggcgagaactgaggccagcaaagccggcgtgcgcaccatgcagccgagttacgcagtgccggcatggaaccgcatttgggctgattgtgcccagcgcctgaacggagggaaggccacatga

SEQ ID NO: 447434 - DNA, 243 bp, Serratia marcescens
atgaaaccagtaaccaaacaaatttgtggcgttaccgtcttcccgctggtggctgtactgcagcagctccgccggtggtggtctatccgagggctgcgaatccattgggctgatggtcagggcgtgcgccgaattgctcgtgagcgtgattggcaaggcgtattggcatgtttcaacatcgagcaaaactatagctttatcaaattgttggcaaaggcagagcagcaaagggggatcctgtga

SEQ ID NO: 447435 - DNA, 1116 bp, Serratia marcescens
atggccgataactctgttgacgctatagtaaccgatcctccttacggcctgagcttcatggggcataagtgggattaccaggtgcctacggtagatcagtggacagaatgcctgcgggtgctcaagcctggcggccatctgcttgccttcggtggcgctcgtacctatcaccgcctggtggtaaatatcgaggatgccggctttgaaattcgtgatcagctgatgtggatttatggcagcgggttcccgaaatcaaaaaaccttacaggggaacatgctggcaaaggtaccggattaaagccggcacatgagccgattgtcatggcgcgcaaaccgctattaggtaccgtcgatcaaaatgtaagtgatttcggtaccggcgcgctgaatattgctctatgccgggttggtactgacagtgtgtcaactcactcaagaggttcgaatgctgcttttccgaagcgccccggggaatcaactgttgaggaaagcgggcgaaccgtcgatcaacgcgacaagcttgatcactcagagcgattgggccgctggcctgcaaacgttctgcatgatggaagtgaagaggttataaccgagtttcctcaaaatgccggcgcccgggcaccagtaaaaggaactgagccaacagcgaatggtttcagcggcccagttaagtttggcggcatgattgatagggttgccagttaccaccatggtgatcaggggagtgctgcgagattcttctattgtgcaaaggtcagtaaatcggaacgtgatgaagggatggagcgttttgtgccgttcaccgctagtgatatgaccggcggaagaaaagaggggagcgctggccttaatgacccgcgcgctggtgctggacgtactggcggggccaggaataaccacccgacagtgaaacccgttgagttgatgcgctatctttgccgtttggttacacctgcgggtggcgtcgttctcgatccattcatgggctcgggttcaacaggtaaagcggccctgcttgaggggtatagctttattggcgttgagttggatcctgaccatttaaccacggccgcggcacgcattgcacattcagctaaggcggtaagcggatcatga

SEQ ID NO: 447436 - DNA, 666 bp, Serratia marcescens
atgaatcaacaatatttggagtatgtccgtggtgctgtgtcgctcgctttggctgatatccatggtcagagtaaaggccagctggcggcattcgaggggtcggcgatgatccgcacaacacgttttaagcgccagaaggttcgcacagtggtattggaaaagcgcagagtttgcccgataacggatccgatgcactgccctgagacgcgaaccagaaagaaacccttcccgctgattgaggaactgacctattgcaccagttcctggcgccgggccatttcagtgctggatacccatcaggaagcatggctgcgctattgttacggtgattataattaccatgataaacagttgcaggtagttccttatatctgggaacaattctcagatcagtgtgcggtacgcctgagcaaaaaggtaaaactcaggctgcaaggcttggcattgctggcggtgcaggtagtcgccagtgaaataaaaggtctgccgcgggagtacacctatacgaatcttgccagcatggccggagtccagcggaataactggcaaatgcactatgccggacactgggagcgccttttgctgttaatcaaggggttggatgaagacgcgcttttcagtgttgcaaaccaaagaatagcaagaagacagcttttaacagcatga

SEQ ID NO: 447437 - DNA, 537 bp, Serratia marcescens
atgaacaagttcgtactgaatactttgctgttcgttggcgcacctttcgccatgtcaactattgctgctgctaacgctgcggatggaaccattaacttcaccggcaatgtcactgaccagacctgtacggtagaaacaagcagcgccaaccaaaccattcctatgggtaacgtaagcgccaaggccttcaaaaatgctggcgataccgccctgccgacaaaattcaacattgctttagccaactgccctgaaactgttaaaaaggcttcggtgaaattcgacggcatctatgcaaaagacaatactgcactgttgtcattgaaccaagaagcaggcgtggcaaccggtattggcattgccctctatgaggctgatggagcaacacaaattccgatggcttcattttcgaatgcgcagagcgtgcaaaaggacatcagtaatgtctttacctacgtagcgaaatatatgtctacctctgacaccgttaccgtcggcccggcgaatgccacgacgcagtttagcatcacctataactga

SEQ ID NO: 447438 - DNA, 192 bp, Serratia marcescens
atggaatacaagggactctcaggtgctggttatatcgcattactgccgtgggtttttaaagtattaaaaattaccgctaataattcaaacatattcaacgatcaaatatttagcaatttagaatcactaactttaaatgccccaagaaacacagtattggttcataaaatcagaaaaaatatccccaaatag

SEQ ID NO: 447439 - DNA, 702 bp, Serratia marcescens
atgtgtgacaatagcgggctttccgaaatgtcatcttgtcagtgggcatcgtacattcaagaaacgctagaaaatattgccagtacgaaatcatctgttattgaatatgtaatgcctgaaaaccttgacaccttttacagaattcctgagtactatggcaatcaagtatctccggataaaatcagacaggaatttcaaaactacaataaaaaactatgtccaaataagtctctttcaaaagcaataacacaattgccaccaccttcccgatggtgccaaactccccctccagcgtactgtaatgccattcaagagggaaaatttaaaacaggcatgtcagaccgtttcgctgtcgccaatgaatgtgtaattacatcattattaatgtaccgccaaggtttattgaaaaaacaagctcgtttatccttaagtaaaaatgctcctcattatagatggatgtggtttattgctatgtctttttttattggtgggaaaattgccaatgtaatgacaaaaataggcaatttagagaatcgtagcataactgaaaaacatagagttaaattcatccttttaaaaatacttggctttattgtgcgtacattaataagatgtatcgtcgcatctcaaaaaatatttgttccaacgaccaatttcatcaaaaaattaaagagaacaaagcatgatactaaaataaaatag

SEQ ID NO: 447440 - DNA, 2121 bp, Serratia marcescens
atgtttcatttagataacaccagcggcgttcctgaaatgccggagcctaaagaacccatgagcaatagcacccgctggtttggtgagagtcagtctcagggcggcgtgagttggccgggtgctgactggtttaatatcgttcaagccgaactgttgaacctgtgcgagattgcgggcatccccccccagaaggataccttcaaccaattagcccaggccgtccctgtactgggtgagcagcgcgtcaaagagtttatgggacaccaggatgggttccgttgggtggggcaaattccctcgtttgagtctctaaagcaaacaaagccggactatagcggtcagcgtattctgctggccggatttgaggacggagatcatcgtggtaatggtgagtttgttgcagtagaaggcacggcgaaaaatgttcccggccagattgccgtcattaatgcaggttggtactggaagcgtgcctccagcgaggttcacttatcggattgcgggctgaggaaaacgcacagggataatgtgacggcgctatctggcgagctgtatgacgtttccgatgcactgcaatccgtgattgattatgcgctggaaaatgacctgccgatcatctgggacaactatgattcgtccaaccctgggtatcaacgctatggttactatgtcaccaaagggatacggctacacaaacaggtctatgtcagcacagattacgtctgcacgggcgttaagtcccagattgggagtctggttcttttcgtaaactccagcaattttacccctatcgacacggctgctggtccttacgccctggtgagtctgagcggtagctttaatgctgaagggaagtattactatgggacgctgaataccgcctgcaacgcggaaaacatcatcgttcgtgactacagcaaccgcgctaagcagctcaatggcgtgctgtatatggcgttggggttcaactacaagcaaatttccgcttttgggtataatgggcgtggcattcacctttttgcctatgatggcattgcgcaagatactcgcgtagagcgctgtggtaatgaaacgagcttcggcatgtatgcggccccgtttcctcatgccgacaaacccgacgaaagcaatgcaatcacgttcttgtctctgttagcgcatgatagctatgaaaaaagctggtttatcgcgggaacaaaaaccaacctgctacgggtacatgatgaggcactgaaatgtactgtcgcatcaccatcttccacgattggtattgagaatcgcaacggctacggttatacctccgcttacttttcatcaatagccggtaagctcgggacggtttcattttcaacattcagcccgcaatctactgtcacacccgtcctgactctcggcgtgatttccagtgcaatggataatattggggtcggtggtgcacgggtttctgtgatttcgggagaccccggcccattgggcggtttcatcggaaacatcagtaatgtcggtggtgaaactcgcattggcatcggcgccagggcaaccatcggatattctcgctcagatacattactgcttctcgatccggactcgaaagtattgcgcggcgcggcaaccacaacacagtgtgcaggggtgctggaggatttctcatcaagcgctcttaccgtgcttaatcaggggattgttcgcggaggatcgtgttcatccttgtcaattcaggttacagcggcctcggcgactatcgatggagcaaaaatcaatggtgatgtgtatgtcagttcactgaattttcgttcctacatcaagaattgctgggtttcaggtacgctcacggcagccaataattcaacgtttgatgtggataactgcactattcacaacgccttcctcgacggtagtaccgggctaagcgtgaatctaaaggcaggagtaatggattttgccaggatttcacgaggggtatacctctcaccccctccgtccataaacttttcgttcagtgggtttgttgtgccttcagggcaagcggcaattggcaggacgacgacagaccctatcagtggggtgacctacatgtgcgtggggaattctacctggaagaaattgacctattcaagctga

SEQ ID NO: 447441 - DNA, 876 bp, Serratia marcescens
atgtcatttcaattttcaccatcgccgcaggcattgtggctgtatcaatatgacgctgatggtgcctatatcggctccgtgtttatgcatattcctgctaatacgggattgcctgttaataccacgcccattgcatgtgaagcggggctgggtgagaccggaatatttactggggaaacctggcaatacgtctccgatattcgcgggacgcaatattggaatgaacgcggtcagggtttcgttatttccagccttcaagagtcattgccggaatgggccattacccttgagccacccgcagcagaatcagggtgcgttttattgttcaccaatggccagtggcaacaggtcgaggataaaactggccaggcattctatgagagcaacggcaataagcacaggataccggatggctattacatattgcctgatggttgcactttcgttgccccgccggaagataaatccacgtttgtgacgcaatgggatggcaccgaatgggtgtatgtgaaagacctgcgcggccagcttgcctacaacactgaaaccaaagagccgttttctatcacggaaattggcccattacctgatggttacacgctgctggtgcctggtcgtttcgatgtctgggggggtaagtcctgggtgccagatgaaaccgccgagcggacattccatgccgaccaggctgaacgtcagaagatgagtttattgacgatggccacagaacagattgcggtactgacctatgccatcaatacaggttcggcgaccgacagcgaaaaagccacgttggcacaatgggaagactaccgcctgagcgtaaaccgcgtcgatacgacggtcaccgatattacctggccagagaagccgtaa

SEQ ID NO: 447442 - DNA, 813 bp, Serratia marcescens
atgtatcacttggataatgtatccagcattgccgaaatgccgccggttaaatccgtgctttttactgagcgtcgattttttaccgaaggcggtgacggtgttgcgccaagttatccaggcgcagactggttcaatattatccaaatggaaatgctaaatgtgttggctctggctaacatcaccccggataaatcacagtttgaccagtttgccagggcaattcgtattttctcttcggattatatgatacctccgggaattccattggcctggccaggcgtcaccgcacccagcggctttatgttgatgctgggccagaatttcaacaaagcggcatatccacgcctggcgcaagcctatcccagcggagtcatcccggatatgcgaggacagaccatcaaatatttgcccgcatcgggccgtggcctactgtcctatgaggctgatggcgtcaaaatccatacccacagcgccactgtggcgtcgactgacctcggaacggcgacaagcagtaatttcgaccacggtataaaaaacaccagcactgacaatgaacacgcccaccaggggggaatgggtgggcctggtgctccctgggactcttattacatcgtcggttcagacaacgattcgcgccgcacccgcaataacaccagcacggccccagctcacagccatacggtcaacattgggttgcataaacatacggtatatatcgggccgcatggtcataccgccaccataggcagtaccggcaacccggaaaacaccgtcaaaaatatcgcctttaacgccatcgtgaggttagcgtaa

SEQ ID NO: 447443 - DNA, 534 bp, Serratia marcescens
gtgagtgggaagccaatcaagaaaaagtcggagcaagtcggtcagacaactccagcagaagttaatgcgcctgaagcgccggttattactccggctgttacaggacactatcagcccgttacccagcccagtgcgccaccgcaatcggattcggcagcacctgagctaaccggtggcgatgtcaccgtgaccctgagtgtttccgggacgcaactggataccgagcagctaaatcaagaccaggttcctctgtctgccgttctgacactggaagatgctgacaaacctgttggcgttgaagtgttgttggttcaggccgtatcactcaatggcttttaccgtgccgggcagttctggccgcacgaaggcgtccatgcgttcgtctgtgatgcccaggacagtgatagcgcagagagcacggccaacatggttgcgcccttcatcagcgcagcgacagcagagcggctgaaaactgagccgaacctccgggtcacggtagtagaaaccgtcgtcactgacgccgagggggaataa

SEQ ID NO: 447444 - DNA, 600 bp, Serratia marcescens
atggctacccaaaccaaaaagaaagcggaagaaaaatacgtcaaggacgataaaaaaaagccaggtgacggcaccgagaacagcgcgggttccactgtaggtgatggcaccgagaacggcgcaggttccgctgcaggagacggcaccgaaaacggcgcgggttccgctgcaggtgacggcaccgaaaacggcgcgggttctgctgcaggtgatggcaccgaaaacggcgcgggttccgctgcaggcgatggcaccgagaccggtgcaggttccgctgcaggtggtggcaccgaaaacggcgcgggttctgctgcaggtgacggcaccgagaccggcacgggttccgctgcaggcgatggcaccgagaccggcgtgggttccgctgtaggtgatgacaccgaaaccagcaccgatgcgaaaccccattggttcaccgtccaggtagtgcgctcaccgagcgggcggcgtttccgggccggtgttgagttcacctctgagccaaaaccttacgatttctcgctgtttagtgctgagcagctcaaagcactggctgcagatccgttcttgcgcatcaagcggattgcgccggctgaggagtaa

SEQ ID NO: 447445 - DNA, 204 bp, Serratia marcescens
atgttgatcacgatggaagatatccgcgccggcggcggctgtgcgcctggtttgcgcgccttctttgcccgctatgggctagacctgaaagccttcattcgcgatggcggtatcgatgccgagctgctggccggcaccggggatgcgctggcgatcaagattgtgcgcctggcacaggccaaatctgagccggaggctaactaa

SEQ ID NO: 447446 - DNA, 798 bp, Serratia marcescens
atgagtgatttttattacggtcaagggaaactttacctggctcgccggaatacggcgggccaggctttatcgtggcgatgggtcggtgatgtttcagcgctggatttagaactggagtttgacgagaaaaaaaccaaaggctcggcaggtggccagctcgttacaatgcagcgttatatttcagccatcagcggtaaaattacgtctacatggcatgagtattcagcagagaatctaagagagttactctatggcgagcatgtatcacgctcgcctaatgtatgggcgcaagacaccttgcctgtcgggattgcagctggagaccgcatcagcctgagcaatcagcaagtctttggtgtgaaaatcgacggtgtgacggacggggtggattatgtcgtagatgcattgtggggcgttatcaattggataacaacaccgcaaactcagcccgttgtcgttaagtatggacatgcaggtaatgagacattaccaatcttaaatcaccagggtgaagaattttcattacgttacgaaggaattaacctggctgaaaataatagcccagtattggtcgagatttacagggtgaagtttgaccccatatcaaagatggctttattaaacaaggatgaagaccttagcggtctcgagaccagtgcggaaatcctttatgacttttcgaaaaatgaagacccgttattaggccggctgggacgtgtcgttatcttcaaacggttaagcggcataacccataacggtgccattactcataatggcgtatttacacacagaggttaa

SEQ ID NO: 447447 - DNA, 666 bp, Serratia marcescens
atggccaactcgctgccagagcaaagtaaatgggaagaaaccatttatcaaattgaaaaagacacccctgttctcggtgggcctggtgggccagataacgctcaagcccaaggtctggcgaacagaactcaatatttaaagagtagccttgaagttctgcaaactggtgtatcaccgtacccatctatttccgctgcacaaaatgatattaataatgggaaaatcccggagggtgcatattttcatgtcagggcacagcgaaatatcagttgggttgatgagtatcagaacgtcaatcatgtggctgtttatacagggaagtcgcttgctgatgcctcagcgatcaccccttttatcacccctacggaaggtgacccggacggcacattagccggtcaggcattgacgcgaaacggccagtattatctggtttatcagcacgatgatgcggcctatccattcgtttactatatgaatgacgcaggtacagcgaagtttgttgaacgcctaccaggccccgttgccatcaggaaggccaacattctggtagcgggtaaaaatttgtttaacgtgcagacaatcacgtctggatactataccctgactactgctattccgactacatttctgttgaagcaggcgcaatctatagctctgacaagatga

SEQ ID NO: 447448 - DNA, 2619 bp, Serratia marcescens
atgcgagtcatcacgttttatgattctgattacaactatctgagtgatgagatatcaaaggatgcgttcaccgctcctgtgggttccgcgtatgtgaggctgtctattgctgagacttatttatcagcatttcagctgtcatttggtactggggtattaccgtacgaggcataccaggccgtcttgccggatgaaattggtggagcaaaaacgaatatattggaggcgctaaacttcgcgccgggtaaaaacctatttgacccaaataacgttctaaacgaaatccacttatcatctatcggcactatttatcacaatgaagataaaacgatgtcggtgtctggattcatacccgttgtttcaggggctagctattgttgcaatcagcaatggttgagcgccgcgtactatgatgccagagggattttcatcagtcgccagaatgaccctaacttcaaagataaaagcattaataaattggttattccggattcgacagcattcatgcgtattgaggtgctcaccgttgtcgttcccgtgacaatggtcgagatgaacgatttggcaacggcgtttgaaccgtttaagttagtctcgccggagcaatacaacaatagcaatgttcagtttggtgatgaggctgttgatcctgcatcattattgtcgtttacctcggctgtgaatctgttttccagaaaaacggcattgtatggctatatcaatgaatatggtgctgtttatcctgttcaagcatcatctggggcggattacgtttactcagactatatccctgtcattgcaggtacgacttatacctccagcctaccgatgcggtttaccgcattctatgatgcagataaaaaattcattaccacattgccgaccgtttctcaggttgtagcaccggctaagtccgcgtttttgcggctgacaacactccaggctaatgcagacacactgcaattagtggaaggtaaatacctccccccacgagatgactatatgcatgtaatggctcccgttctgcaggacggcacccctgtacgcatccctggcgaactcgtactcgcggagggattgagccttgatttcgtcagtcatggtctattggttccaggcacgaatatttataactcgcatacaattcagccaggttatatcgatgagtggggaataatccacccaggaggtaccagctactgtttttcagattttattcctgtcaaacccaatactcagtatgcattgaatctgggggcgcgattcgtttcgttctatgcaaaaaataaagcgttcatcagaactgaggcaagttcagcccagacgataaagcaggtcactacagatagcgactgctgttatctgcgagtaaccatgagcgttgcccgtagcacagatctgcagcttgaggagggtactgtctccagtgattttgagccgtttgcgtattcactgttatcagcattgcctgatggtacccctgtcaccggcggtaacggctcacatgtggtggagcgaacccctgatagctatggcctggaacggctacgggaaacccatatgcgactgctgaagttgtcgtatggcgatactacgcgcctgacctacgccatgattggcgatagctatacacgaggccaagttcgttacgcgctgaaggtagcccagaagctatggaatagatttaataacagccccatcaacacggtggttccgcctctaggctgcggctggcggtcattcggtttcgaccaattcggagataatactgatattgtcgggacagtaattaatcaatcaacggatgtaacatgtgcgtataacattggccacggccctgacatctctgcgacgacgctgggagccgctggcgcgacgatttcgtatacgcaggacctgacacaaggtttcacgtcatacctattcgctgagggcggcgcgggtgtggttcagtatcaggctacgggaatggcagacccgattcagatagacctcgcaacatactcagccggtatgcagatcatcccattgagcttgccgacgacaggcagcgctgcggtggttacgtggacgtgtgttactgcacctgccgtgttgtacggcgttaaaattttgcaccctaccgccagcggcgtagtcgtacacaaactaggagggagtggctcccataccaaccactggattaacgctatggatgcgcggtggttaactgcatttgaaaacctcggagcagacctggtgacaattatgctaggcactaacgatcaaggtgctcagatttcgccgtcaacgttccgtttgaatctgttaactatgattgaccgcgtgcgctctgttcgtccaacggcagatgttttactgatttgcccagccgaaaataaccgaccaggcggcaatagcattgcaatgaagtcctatgccgaggccatgttcaaaatcgcgagggatgatagagatgttgcatacatcaatatgcagcagtccttcggtgtcaatccggccgattatgcagcaggtagtgcgcggccgtggatggtaggagatgggttacatccaaccccagaaacaggtggctatgctatcgcagcatcgatcatccgagccttgaacctcacctaa

SEQ ID NO: 447449 - DNA, 189 bp, Serratia marcescens
atgctgacgaagcttaccgtcgaaacggcgctcaatgcagaactaagcgagcacctcggacacgagaaaaatgcgcccaaaaaaggctcaaatacccgcaatggctacgcgtcaaaaacgctgctgagtgatgacggcgagagcgagctgaacacctcgcgtgaccgtgaaaatacctttgaaccttag

SEQ ID NO: 447450 - DNA, 996 bp, Serratia marcescens
atgaccataattgaagccacagctattgatctcactaaagggaatataaagttctttttaacctcattaactacggatgaattaatgagtacatgtaaaatttcacgtatcaatgaaaaagcagagcaaggattccaaagagctcttgacactgcacgagcaagtaaaatagcaaaatatcttaatgatggaaaagtcatccctggggctttaatcctatcctgtcaaagagatgatgatataaaatatgatgaaagcttgcaaaaattaactatagagggttctgaagggctgttcatggttattgatgggcaacatagactgtatggtagttacattgcttatggtgcaggtaacaaaactagaattcctgtgtgcattctatcgggattaaatcggcaagaggaaattgaatattttattgatattaactccaatcaaaaaggtgtacccaaaacactgagaattgaattaacgaagtatcttgttgaagaaggctcacttgaaggcatcaggcttaagttatttgaagatttgagtgataattctgactcccctcttttgggaaggttgagcgcctcacaaaaaggcaggggatatattacacacgttcctttccaagcggctttagatagagtgttgcagatttcacctttaaaagatttgccatatgaagataaactcattcttattaaaaattatctatttggtgtgaaagaaaatcttattgaagttggaaatcaagacaaattgtttcaagcaactttctttcaatccatatttagagtatttgaacaggcatgttcagtggcaatgacagttggttctaattataaaaaagaaacctttgtatctttgttcaattttcttcaaaatattaattatgaattgcattccggcactaacgaacaagcaattacagctttagaaaaagatatttctgctctgttagatattgaagtaaaacttaaaatatccaagaggaatctgttctaa

SEQ ID NO: 447451 - DNA, 903 bp, Serratia marcescens
atggggaaggtatcttctattattgctagtgaaattgaaactcggttattatttcttttaaagaaagccggtgtggacggaataaatattgaaaggccatcgataaatgatagtttgaaaatgacgctaataagagatcaggctcttgaagtaaatataagttctgaaaaaatatattttaatgacaccactgggaattcagtatatgaatcattactttatgattatgctatggggcattatagacgtactaaacagaacgaaaaccttctccagttaattaatagcaacccaaactgcaatccggtatggccacttgttaccgcttattattgtgcttttttttgcgcaattgatattggccggatatttaacaaaatcaatataaactttgatgaagagcaaattacagaactgaatagacgttcccgaaccaatgacaatacaatttcgtctcaacgtggatttcttggcgagattgatgaggaaaataatattatctccttaagttctaacaaagaaaaaccacattcctatgcttggtttcaacttgagagtactatcttaagtttagtaaataaaaataaaaaatgggatgagctaaagacgatgagagagataataaaaggttcaaaatacaataatcgtgggaatagatggttgaatttaagtggcacaagaaacaaatggaattatactgatccgttgctttttcatgaaaaaggagacaatttgggaggtgattttatgaaaatcatcaagaacgaattaaatgcagaagagtggctagcagcagctaaaaccaagactgatgatataagcaacgctacatctgttgcatgtttctacaaaattctttatgaggcaacgactaaagcctataataacatcctaattggatga

SEQ ID NO: 447452 - DNA, 903 bp, Serratia marcescens; identical to SEQ ID NO: 447451

SEQ ID NO: 447453 - DNA, 996 bp, Serratia marcescens; identical to SEQ ID NO: 447450

SEQ ID NO: 447454 - DNA, 906 bp, Serratia marcescens
gtgccgagcctgatttattcctttgcccaactggaagccttcaccgccgtggccgagcacggcagcctggcaaaagccgcgctcaagctgggcaaagaccgcacgacgctgcgcgatttgattgattttctcgaggatggcttgggctatgcgctgttcctgcgcgaggggcgcagcctgcacctgacgccggaaggcgaacagctgcagcgccaggcgcacctgctgatgcgccaggtgaaagcgtttgaggcgtttgccaaagacgtgccgaagagcgcggcgcaggaaatttctctggtttacgatcccttcacgccccgcgcgttgctgcaggcgctgattggtgccatggcccaacgcaacacgcgcctgagcctgattaacgcctcgcgcgatgaggcagaaagcctgctggcgagcggccaggccgatctggggatctgccaggcacgccatcgcagcgtgggcgacgccatggagtggcgcgccttaggggcgatagagatggatttttacgccgcaaaaacgcttttccccagcgcggagcagtcgctttcgctgctggagctctcgctaacgccgcaggtgatcatgcatccggactctgacgaacccgtggcgcgccgcctgcaaatttccgggcataccattttcaccaacgagctggaaatgctgcgcgccctgcttgaacagggttgcggctgggggttcttgccgacgcatatgcatgcggaacggtggaaaaacgtcagcacgctgcgcaccgaagtgggcagccaggggatcagccaaaccatggtgaccatctggaagccgggcaatgaccggcgggcgctgattgatgagacgttggggttgttgccggggttgtggcgggaggttggggtgaaaagtcgctgctag

SEQ ID NO: 447455 - DNA, 1308 bp, Serratia marcescens
atgaaaagcaaagtgtttaaccgcagcctgctggcgggcgttgtcatcagtctctgcagcggcctgttggcgcccgccgcgctggccgcctgtgcgggcaccgaactcagcgcctgtcccgcgcctttcgatatgcaattgccggatacgcacaagatgctcacctggagccagagcgaccgggtgatcggttttcgtaacgactaccgcaactatgcgggggatgtatttcaccatggcaacgccacgccgctgcttactgctgctaaacagctaacgaatgccagctatcgggtgaatggcaaaacctacagcctgcaggattacctgcagcgccagaacgtcagcggtctgctggtattgaaagacggcaaaatcgcctggaaatatctgggagagggtaataccgacgctaccctatggacgtcgcgttcggtgggcaaatccgtggtcgccacgctggtgggcgtggcgattaaacagggcaagatccgctcgctcgacgatctcatcacgcaatacgaacccgatctgaaaggcaccgcgtgggacggtgtgaccctcaggcagctgatcacccatacctccggcgtggcgtggaatgaggattacaccaacccgaaatcggacttcgcgcagctgaccgagtgtgaagccaagcccggtacctacgcctgcgtgcgcaagctggtggccggcctacgccgcgcacacccggccgggcagaactggtcttattcctccggcggcgcgtggctgctgggcgacgtgctggagcgtgccaccggcatgacgctggcggcctatctgcagcaaagcatctggcagccgtatggtatggcgagcgacggcgtgtggcatgcctacgctaaaggccagcatgacgtaggcgcgcacgggttcaacgccacgctggaagactgggggcgcttcggtgagttcattctgcataacgggaagctgccgaacggcaaacagatcttgccggccgattgggtagcccagtcgtccaactggacgcgggcggcgggctcggtatcggcggcgcatcctaacggcatctacggcttccagtggtggaacaacgaagtgccggtggatgcgatcaacgtagaacccgctccgcaggcctccctgaaacattccctgtgggcgctggggatcttcggccagatgatcatggtcaatcaggcggagaatctggtgattgtccagtggtctacttggccgcaggcggagccgtctttcagcgcccaaccgctggaggcatcgctgatgtttagcgcgatagccaaggaactgcgttaa

SEQ ID NO: 447456 - DNA, 987 bp, Serratia marcescens
atgggtttattcactttggaagaccaagaattcaaaaaggttgctaaaactacgtttatgcgcgaatcgatccttgaacgcagggatattcagtcagcaatagccaagaacatgagcgattttttgcccgattgcctggtaatccaggaggagtttaacaattgggaaaacagtcaacgtagaattgatttactctgtatcgacaaggcgtttaatctggttgtcgttgagctgaagcgtgatgaacaaggtgcgcatatggaacttcaggcggtaaggtatgctgctatggtttcacaaatgacgtttaatgatgctgcggagtgctaccaaaaacatcttgataaagaaggcgttgctaagaatgctgagcaggagatactcaagttttgtgagcgagacgaaggcgagattgctgacttcaatactcaggtaaggattgtactgatctcagctgatttctctacggaagtaacaaatacggtactttggctgaacaataacgggttaaatgtcagctgtttcaagttaagcccttatttgcaccttgataagatactggtcaattttgaacagataataccactacccgaagcaaaagatttcttggttagacagaaacgaaaagaaacggaagccagggatgccaaagaaaaaggagagagggattactcgaaatttatctataagggtgtggtttataacaaaagaaatctggcctatgagctgatgagcgaatggattatggatactaatccgtatggtatgcaggcgatagcgtctgtgtttggcgatgatatccatcgcagccttattaaggttgaacaggatgtgattgcgtcacggcgtaagcgatttcatgatgaaaccattgagcttgcctccggtgagatagtactaattactaatcaatggagtattggctctattcaaaagctgataaataagtttgccagccttggctatagcattgagatgcaccagtaa

SEQ ID NO: 447457 - DNA, 1080 bp, Serratia marcescens
atgactatttttagccgttacctgatccgcaacgtgttcatcggcttcgccgccgcggccgggctgctcatcccgctgttcaccacctttacgctgatcaacgagctggaagacgtggccccgggcggctaccgctggcagcaggcgctgctggtgaccgtgctgaccctgccgcgcagcctggtcgatctggggccgtttatcgcgctgctcggcggcatcgtcgggctagggcagctgtccaaaaccctggaactgaccgcgatccgctccgccgggatgtcgatattccgcattgcgctggtcatgctcgccgccgggctgctgatgaacctctcgctcggtgccctcgatgagtgggcggcctcgccgctgcagcagcgcgcgctgcagatgaagaacaacgccctggcgcagtctaacgataacgacgtcaccgtgaacccactgtgggcacggcgcggcaacgagtttgtgacggtcaaaaccgtcgatgagaacgaccagccccacggcattgagatcttccgttatcaggccaaccgcgcgctggaatcttacctctacgccgacagcgccagcaccgccgccgacggcagctggctgctgcacaacgtgatgcagaaacgctggcaaggcggaaaggagacgattgagcggcaaagcagcctgccgtggcgctcgctgttcgccgtgccgagcctgaaagagctgaccctgccggccggcagcttctcgctccaacagctggatcgctatatcgattacctgcaaggctcggggcagcccagcaccgaataccgcctggcgctgtggaaaaaactcggccagcccctgctggtgctggcgatgattctattggccatcccgtttacctttaccgccccgcgcgcccccggcatgggcagccggttagcgatcggcgtgatcgtcgggctgctgacctacatcgcttaccagatcgtcctcaacctggggttgctgttcgccctcaacgcgcccttcaccgccctcgccccgccgctgctgattttggcgctggcgttggcgctggtttatcggtttgatcggcggggttag

SEQ ID NO: 447458 - DNA, 1071 bp, Serratia marcescens
atgtctttgattgaacgctatatcacggttgagatccgccgcctggtgatgatgatcgccgggtttctgatcttcatgttcgccagctactccgcccagcgctacctgaccgacgccgccaacggcacgctggcgctgcgggtggtggccgaggtggttttctataaatcgctgatcgcgctggagatgatattgcccgtcgcgctgtatgtctcggtggcggtggcgctcagccagctgtacagcgatgcggagatcaccgccatgctggccgccggggccagcccgctgcggctgtacaaggcggtgctgatactggccgtgccgctggcaatagcggtcacgctgctgtcgctgtatggcaggccctgggcgtacgccaatatttatcagctgcagcaagagtcgcagtcggtgctggacgtgagccacctgcaggccgacaaattcaacgtcagcggcaacggccgcatgatcctcgccagtcacgtcgacaaaacggccaatcatctgacagatgccctgatttatgtgcgcggcggccatcacaccaacctgtaccgcgcgcagtcggtggaagtgctcgacgcctcccccgccagccccgccgtgcggctgaaaaccggcaccgcctatgtgctggatcgccagggcaccgacgacaacgggcagaactacgacaactttgatatcgcgctcaagccattcgtgcccagcgccgagagccggcacaagtcggcctcgccggcggagctggcgcgctccgccgatccgggtgacgccgccgaactgcaatggcgcgaaagccgcgggctgaccaccgtgctgatggtgctgctggcgatcccctttagccgcatcaagccgcggcagggccgctacgccgcactgctgcccctgacggtgctgtttaccgtgattttctatggcggcaacatttgccgcacgctggtggccaacggctctctgccgacgatccccggcgtttggctggtgccgatagccatggctgctggtatcgccctgctgctggcgcgcgatttatccctgctgcggacaccctcccgatga

SEQ ID NO: 447459 - DNA, 567 bp, Serratia marcescens
atgacgttacgccgcttgctgaccctcgcgctgctgctatcgccgctggcggcgtcagcgcataacttcgtgcatggccggccggtggcgccgatcgccatcgccgatcgcggcgagctgctgctacgcaacggcgatttcagctaccggccgtggaacagcgcaaaactggcgggcaaggtgcgggtgatccagtacatcgccgggcgcacctccgccaaaaagaagaactcgctgctgatcaacgccgtcaaagacgcgaacctgccgggcgatcgcttccagcccaccaccatcgtcaacaccgacgacgcgataccgggctccggctttttcgtgcgcggcaagatcgagaaaaacaagcggcattacccctgggcgcagttcatcgtcgacagcgacgggctggggcgcatggcctggcggctgccggaagagagctccaccatcgtggtgctggacaaggccgggcgcgtgcagtgggcgaaggacggcgcactcaccccgcaggaggttgaccaggtgatcgccctgctgcgcaccctgatcgaccgggaaacgccatga

SEQ ID NO: 447460 - DNA, 870 bp, Serratia marcescens
atgaccgctaacgataattggaagaagttctccgccgaaaccacccaggcgctgtttgtcgcggtggaagaggatgacctggttgaggcgaatatcagcctgccgcagcagattgatttgcagtgttcccccgagagcattcgggacaactacgcgctgtgcctgcagttttgggaagacggcttttcccgccgcgagctgctgcaattggtgaacggtttcctgcaagacccgcagttggcggcggccacccgaatgcgctacaaatatatccgcgcccgctataagcacctgcgcttcgcccagcagctgtacggcgcgccccaccgcgccaaccgcctgttccacaccaccaccgtggtgctcggccattttcaggatgcgtttcgcaacggcaaccagaagaacctgacgctgtacggcaacctgctgcggctgctgctcagcaagccggtgtggtcgtacgtgcgctatgcgctgcgccacacccgtctggaaagcgcacagggctttatcacctaccgccaggaacagatgcgccagctgcagacgctgatcgccagcccggcgctgaccgggcatcagttccacgacgtgcgcaaaatcgtcagccgccaggtgtcgttttacgacacgctgagatcgatcgatcccgacaaccgcgaagcccggcagatctcgcgcttcctggcggcgattaacggcctgatgggcgaccggcatgacgtgatggtggcggacaagctggccggcggcgatatctatgaccggccggcgatcctggatatcgacatccgccagcgcctggagctgctgctggcgcgctttccgctgtcgttttcccagccggccatcgcggcgggcagataa

SEQ ID NO: 447461 - DNA, 1335 bp, Serratia marcescens
atgaaacggtggttttccgatggcgcgtttcgctccattttacgtaatgccgcctacttaggctccggcagcgtcgccagcgcgctgcttggcctgctggcgctctcctgcgccggtaaaggcatgtcgcctgaaatgttcggcgtgctggtggtgatccaggcctataccaaagcggtcagcgatttcatcaaattccagacctggcagtttgtggtgcaattcggtaccccggcgctggagcaccaaaacaccgggcgcttccgcgacgtcgtcgccttctccttcgggctggatatcgccagcggcgtcatcgccgtactgggcggcatgatcatgctgccgttcttgtcccacgccctggggctggacagcgaaagtttctggcttgccatgctgtactgcaccctgatcccgtcgatgacttcgtccacgccgaccggcgtgctgcgcgccttcaaccgcttcgatctcatcgccatccagcaggcgatcaagccgttcctgcaggcggtgggcagcgtcatctcctattatttcgatctgggattccccggctttatcgtcacctggtacgcctctaacctgatcggcggtacgctgttttggtggttcaccgcacgcgaactgcgccgccgcgatatccacggcgcgctgaggccacggctgttcaacgtcgcgcgccgcatcgagggcgcctggaacttcgtctggaccaccaacatcgcccataccatctgggccgcacgcaactcctgcaccaccgtgctggtgggcgtggtgctcgggccggccgccgccgggctgttcaagatcgccatgaccttcttcgatgcgacgggcaccccggccaagctgctggagaaaagcttctatcccgagatcatgcgcctggatccgcgcaccaagaccccgtggctgctgggcctgcgctcctcgctgctggccggcggcatcggcctggccgtcgcggtgttgatgctgctggtgggcaagccgctcatttccgccgtcttcgggcagcaatacctggaagcctatgacctgattcaaatcatgctgggcgcgatcatcgtttccatgatgggcttcccgcaggaatccttactgtttatggcaggcaagcagcgcgccttcctgatcgcgcaggcgacggcctcggcggcctacattgcgctgctggtgtcgatggcatatgccttcggcgtgcagggcgccgccttcgcttatttactggggcaatgtttagacgttctgttatccctgataccgacgatcggcgcctaccgcaatcgctttatgttggggctgaatgtgcccaaagagagtaattaa

SEQ ID NO: 447462 - DNA, 795 bp, Serratia marcescens
atgaaaaaaaataaactcactgccgaacagcactcctcttccacctgcattagcgggctgattgccgtggtgggcagcgacggcacgggcaagtccacgctgaccgccgatctggtgaaaaatctgcagcagcatcgccccacgcagcggcgctatttggggctgatctccggcgaagacggcgacaaaatcaagaagttgccgttcatcggcgtgtggctggaacggcgcctggcggccaaatccgataaaacccaacgcatgagcaacaggccgccggcactgtgggcggcgctgatcatgtacggcttttcgctgtggcgcgcctccaacctgcgcaaggtgcggcggctggcgcagagcggcgtgctggtgatcagcgatcgctacccgcaggcggaaatttctggtttttactacgatgggcccggtatcggcgtggagcgcgcaaaaggctggctattgagccgcctggcggcgcgcgaacgccgtttatatcaacgcatggccgtctatcggccggcgctgatcattcgcctcgatatcgacgtcgatacggcgttttcccgtaagcccgatcacagctatgacgagctgaaagacaagatttccgccatggtgcgcctgcaatacaacggcgcgcgcatcatcgagctggacgccagagccccatacgacgaggtgctgagcaacgcgctcaacgccatttcggccgtggtgccccccgtgaagcgcccacagagcgacatcgggcaacccggcgaaaacgccggcgaagaaactcaggtttattaa

SEQ ID NO: 447463 - DNA, 726 bp, Serratia marcescens
gtgagtcagcagataagaccttcatctgatcgctcgcccgtgcgcgtaatagcgataaccggctgtgacggctcgggaaaatctaccttggccaccagtctggtcaacgccttatcggcaaaagaacctgccgaactgctttatctcggccagtcttccgggcgtatcggcgaatggatcagttcactgccgattattggcgcgcccttcgggcgttatttgctgaagaaatcgcagcgcgtgcacgatcgcccttccgcaccgccggataatgccacggcgctggtgatttttttactctcctattggcgcgtttataaattccgccgcatgctgaagaaaagtcgccgcggcgcattgctgattaccgatcgttatccgcaggccgaagtggcagggtttcgttttgatggcccgcagctggcaaaaaccgccggcggcaatcgctgggtacgttggctgagaaagcgcgaacaacacctgtaccaatggatggcgtcttatcagcccctattattaattcggctggatattgacgagcaaacggcctattcacgcaaacccgatcactcgctggcggcgttgcgtgaaaagatcgccgtcatcccgcacctgacgtttaacggcgctaacatactggatttagacggccgcgaaccggccagccatattttcgatgaatcgctgcgcgccgttaaaatatcgctgagggccgccaatgcctag

SEQ ID NO: 447464 - DNA, 732 bp, Serratia marcescens
atgagtgcaaaatttccgccgttgattgcggttattggcagcgacggatcgggtaagtccaccgtttgtgaacatctgatcgaatatgtgaaacattatggcccggcggtgcaggtgcatctgggcaaacaggcgggtaacgtcgggcgtgcggcggcgaaattgccgctgctcgggcgctcggtgggcaaggctatcgagagcaataccaaaaaagtcaaaacgaaaaaatcccggattggcctgttgccgtcggcggtgatcatcgctttcgtggggcggcggctgctgcgttttcgccgcatgctggcgtttcgtcggcaagggttcatcgtgttgaccgaccgttttccgcaggcgcaaatccccggcgcttacgacggcacggtatttcccgtcgacgttgaagggagccgtttcgtccgttggctggcggcgcgcgaacgggcggcgttccaatggatggcggggcaaaaaccggatctggtgctcaagctgaatgtcagtctggcggtggcctgcgcgcgcaaacccgatcaccgcaaagcggcgctggagaagaagatcgccgccacgccgttattgacgtttgaaggtgccgacatcgtggatcttgatgccgatcggccgatcgaggaggtgctttctgcggcggaaaaagccatcgcggaatttatggcggcgcagggctatcgctattcgactgatggagtatcaacggctgcgcactga

SEQ ID NO: 447465 - DNA, 1173 bp, Serratia marcescens
atgggactgtatgataagtttgcgcggctcgccaatgaccgtgaacaatttcaaacgtccggtctgaacccgttcggcacctgtatcgacgaagtgtattccgccacccagggccgcatcggcgatcaaaagattgtcctcgccggcaccaacaattatctcggcctgacgttcgatgcgcaggcgatcgccgccggccaggcggccctggccgcgctcggcaccggcaccaccggctcgcgcatggcgaacggcagctacggatcgcacctgacgctggaacgggagctggcggaattcttcgatcgccccagcgccatcgtgttctccaccggctataccgccaatctgggcgtcatcagcaccctggcggggccgggctccgtggtgttgatcgacgcggacagccacgcgagcatttacgacgcctgcgccctcggcggcgcggagattattcgcttccgccacaatgacgccgccgatctggagcgccgcatgctgcgcctgggcgaacgggcccgcgaggcgatcatcatcgtggaaggcatctacagcatgctgggcgacgtcgccccgctggtggaaatcgtcgacatcaagcggcggctcggcgggtatctgctggtggacgaagcacactccttcggcgtgatgggcgagcacggccgcggcctggccgaagcgctgggcgtcgagcaagacgtggatatcatcctgggcaccttcagcaaaagcctggcttcgatcggcggtttcgccgtcggcggcaaggggatggacgtgctgcgctacagcagccggccgtatatctttaccgcgtcgccgtcgccttccagcatcgcgtcggtgcgcacggcgctgcaaaaaatcgcgcgccatcccgagctgcgggaaaaactgtggagcaatgcgcaccgcctgtaccacggcctcgccgagctggggtataccctggggccgcgcatcagcccggtggtgccggtgatgatcggctcaaaggaagaagggctgcgtttctggcgcgagttgatcgcccacggcgtgtatgtgaatctggtgctgccaccggccgcgccggcgggcgttaccctgctgcgctgcagcgtcaatgccgcgcacagcgatgaagagatcgacactatcgtgcgcgcctttgcggcgctgaaaaaataa

SEQ ID NO: 447466 - DNA, 261 bp, Serratia marcescens
atgctaaatcgcgatgctgtaatggattatatcctgacgtgtttgcaaggtatcgtcgaaggcggagtggaaataaaacctgatagcgatctcgtcaatgatcttggcctggaatccatcagagtcctggatctgctgatgatgctggaagatgaattagatatctccattcctatcaatatattgcttgatgtcagaacgcctgagcaactgcttgacgcgctgcgcccttatctggagaaaagccatgggactgtatga

SEQ ID NO: 447467 - DNA, 915 bp, Serratia marcescens
atgagcggcaccgtggcggtgacgggcacgaccggctttatcggccggcacatcgtccaggaactgctggcgcaagggtttagcgtgcgcgccctgacgcggcaagccggaaaagccgccatcgacaacctgcagtggatccccggcgcgctggaagatcggccctcgctcaccgagctggtgcgcggcgcagagtgcgtggtgcactgtgcgggccaggtgcgcgggcatgcggaagcggtgttcacccgctgcaacgtgaccggcagcctgaatttgatgcaggccgccaggcagaacggccgctgccatcgcttcctgttcatgtcgtcgctggcggcccgccatccggcgctgtcctggtatgcccattcaaaacaggccgccgagcagcaactcatcgccgccacaggcgatatcgcgctggggattttccgcccgacggcggtttacgggcccggtgataaagagctgaagccgctgttcaacggcctgctgcgcggcgtgctgccccggctgggtgcgcctgacgccaggctctcttttctgcacgtgagcgatttggccaaagcggtcagccaatgggtgcaggctgaacccgcgcagccgaatatttacgaactgtgcgacggcgtggccgaaggctataactggctgcgcctgcgggacatcggcgccgccgtgcggcacgggccggtgcgtctggtaggcattccgctgccgctgctgaaagccctggcggatatcagcgtggtgtggaaccgcctggtcaaacaggaaccgatgctgacgcgcagcaaaatacgcgaattaacccatcacgactggtccgccagcaatcacgcgctgtcgcaacagattaattggtttccacaggtgagtttggagcgcgcgctgcgtgaagggctgttttaa

SEQ ID NO: 447468 - DNA, 1707 bp, Serratia marcescens
atgcgctatgcggacttccccactttagtggacgcgttggattacgcggcgctgggcaatacgggaatgaatttttacgatcggcgcaatcaacttgtgaccgtgctcgaataccgcacgctgcagcaaaaagcgatctcgggcgcgcggcgtttattgtcgctgaaactcaagaaaggtgatcgcgtggcgctgatcgccgaaaccagcgcgggattcgtcgaagcctttttcgcctgccaatatgccggcctggtggcggtgccgctggcgatcccgatgggcgtcggccaacgcgactcctacaccgccaagctgaaggggctgatcgccagctgtaaccccgcggcaatcatcagcagcgaagagtggacgccgctgatcgcctcggccacggaaaaggcgccgtcgctgcacatcctcagcgacgaggattttaacgccttgccggagccggaaatcgcgttgcccgcaccttcgcccgacgacatcgcctatctccaatacacctcgggcagcacccgctttccgcgcggcgtgatcattacccagcgggcggccatggcgaacctgaacgcgatcagccgcgacgggatcaagctgcgcgcgggcgaccgctgcgtctcctggctgcccttctatcatgatatgggcctggtcggtttcctgctgaccccggtggcgacccagctgtccgtcgattacctgcgcacgcaagatttcgccatgcgcccgatgcagtggctgaaactgatcgccaagaatcgcggcacggtgtccgtcgccccgccgttcggctacgacctgtgcctgcgccgcagcaacgccaaagagctggccgatctggatctctccagctggcgggtcgcgggtgtaggcgccgagccgatcccggccgagctgctcggccagttcggcgaacacttcagcagcatcaacttcgacagcaaagccttcatgccgtgctatggcctggccgagaacactctggcggtgagcttttccgacccttgctccggcccgcaaaccaacgcggtcgaccgcgatattttggagtacgagggtaaggcggtcacgcccggcaagaagacccgcgccgtctcgaccttcgtcaactgcggccgagcgttgcccggccaccgcatcgagatccgcagcgaaaccgggcagccgctgccggaacgccaggtcggtcatatcacgatttccggccccagcctgatgaacggttatttctgcgacgacgaatcccaacagcagatccaggtaaccggctggatggacaccggcgatctgggctatctgctggacggctatctgtacgtcaccggccgcaagaaggatctgatcatcattcgcggccgcaatatctggccgcaggatatcgagtacgttgcggaatccgagcctgaaatccgttccggcgatgcgattgccttcgtgaccgaagaacacgacgaggcggccaggatcattttgcaaatccagtgccgagtcagctcggaagaacgccgggagcaaatcgtgcattcgctgagcgcgcgcattcaaagcgagttcggcatcgcggtggatatcgagctgctgccgccgcacagcattccccgcacgtcgtcgggcaaacccgcccgtgccgaggccaagaaacgctggctgagcgcctcgctctacccgcaaatgccgcagctggccggtttcgcgcaatga

SEQ ID NO: 447469 - DNA, 1125 bp, Serratia marcescens
atgatccgcattgagaaagttctggataaacgcgagcttaaagaatttattgctttcccctcgttactgtttcgcgatgatccaaactggattgagccgctgtatttagagcgcgaagagcatctgtcaaagaagaatcccggcaccgaccatatcgaatggcaggcgtgggtggccaaaaagcaggggaaggtcgttgggcgcatcaccgcacaaattgattccctgcaccgcgagctgcatggcgaggataccggccacttcggcatgatcgacgccgttgacgatcccgccgtattcagcgcgttgttcacggtggcggaggagtggttgaggtcgaaaggcgcgcgcaaaatcaccgggccgttcagcctcaatatcaatcaggaaagcggcctgttggtcgaggggttcgacactccgccctcggcgctgatgacgcacgccaagccttattacgcgccccagatagcgcagcagggctacagcgaagggattgatttgcttgcctattggatgaaaagaaccgatctgcacttttcgccgtcgttaacccggatgatggaccaggtgcgcaaaaaggtgaccgttcgccgcctcaaccgcaagcgctttcgcgaggagatgcaggtgctgcgcgaggtgttcaactccgggtggcagcataactgggggtttgtcccgttcacccagcacgagttcgccaccatgggggatcagctgaagttcctggtgcccgacgatatgatccatatcgccgaggtggatggcgccccctgcgcctttatcgtcggcttgccgaacattaacgaagcgattgccgatctgcagggacggttattgccgtttggctgggcgaagttattgtggcggctgaaggtcagcggcgtgcgcaccgcgcgcgtgccgttgatgggcgtgcgccaggaatatcaattcagccgcatcgggccgattattgcgctgctgctgattgaggcgctgcgcgagcctttcgccaagcgcaatatcgacgcattggaaatgtcgtggatcctggaaaccaataccggcatgcggacgattttagaacgcatcggcgcggttccctataagcgctaccgcttgtacgagaaaacgctttaa

SEQ ID NO: 447470 - DNA, 1284 bp, Serratia marcescens
atgcccgcaggcactcttactctaacgaacaattccgccgtagtgaaaggaacggggacaacgttcaataccgagctgaaagccggtgatttcatcgtgagcgtcgtcggcggcgttacctatacgctaccggttaaaaccgttgatagcgccacacaggcgacgctgattaaagcctatgacggcccaacgcaggcgggcgcagcatggtatgccgtaccgcgcgacgcgatgaacaccattaccgcccagctggccgcagagacggcgaaagccctgcgcgggctgaacctcgataaagataactggcagcaggtattcagcggaaccggaaacattacggtgacgttacctgacggcagcacgtttactggcccagcctggaatagcattactgcggcattggaaaataaagccgggaaaggggtaaacaatgatataacccagctgaaggcattgagcacagcaatcaccgttgcgcagggaggcacgggagcaaaagacgctgctggcgcccgcgcaaaccttgggcttggcagttctgcgacgagaaacgtaggctcgacggctggaaccgttgcagatggtggtgatgctcgtttgaacactgtgggcggtaaatctggcgggcaacttaccggcggtctgggtgtgttgaacggggttaataatgtaaatctttccttacagggaacatatttattatggaatgagcagccgggaactggaataagctcattagttaataaccccggtgacggccttggcgggttttggattaggctgttaaataaagcgaacacagcagagaaggcgcgtttcacgttcaatcctgacgggacaatgattgcgcccagtggagtttattctttaaatgggcgcgtccgttcatttacagggttaggcgcgggttatgttgagatttttgttgatggtgtccctaagggggtgaacttctttgattcagacgaaacaatcaaagaaaaaattaatccagttgaaccaggttccgcttcggctgttatacgtcagattcgcccggtgtcatacaagtttaaagacactacttatgacggtggggtaactataggtgctacgcatgatttcggtgtaattgcgcaggaagtagagaagatattacctcatggtgttacgacactatcagatgggaaaaagtcgctgaatccacttgagctatttggtcttttgttgacagcaaataaggaaatgctggagagaatagaccgccaagatgaattaattaaattattaatggagaaataa

SEQ ID NO: 447471 - DNA, 552 bp, Serratia marcescens
gtggccgcttgctctgatgccggcttggcgagcggcgtaattagaaccaacacgctgtggggaacggctaacacttctgttgacggcaacggcttcatcaagaaagcctcgccgatagctcgtctgtctggcaatcccgacacgatggactcggattacctcgatggtttcacgttgtcggggcttgctgcagtgaatgacgaagcggcaggtgttaaagctgagcgtcaggctgtgggtgtctataccgtcacaggctctcttggactggcaaaagaggggtggactatcgaggtaccacaggacgtaaacggcaaccgtctgtgtttcgtggagaccgacaccgccgaagacggcactattaccgtcaaagtcagcaagcgccgctttgacatcgacacagccgcgattgtggccggtgagccgatggatattccggcggggcgttggattgatctgcgcctggaaatgcctgtgcgcgaggttgaagtagcaccggaagccgaggaggaaacttcggcccttgaaaatgtgaacgttgaccctatctaa

SEQ ID NO: 447472 - DNA, 732 bp, Serratia marcescens
atgctcaccaacgctggtgaccagtgggggacatttaataacctgcgaccgcttgctgtctccaccagtgacggctccataaatgtaggtacaggtttctcggtcaattacactggatatataaataagacaggagtctacccatacacaaataatgggcaaaattataatcagtccaatggattacacattcaaggttcgggcgatcagtatgccgatatttattatcttgagaccgtaggtcaatacggaacattatctttccatattcactctggtggattagatgcttacccatcctttaagaatgatggatcacttgcgctgaatggtacttatccaataatcacaatgtcaacaggaacccgataccatcaggacggtaacatttggggatctgtttggggagggtatctcagtaactggttaaataacaatacttatggcccacaacgcccgcagccacccgtacaggttaatactgatgcgattggcagtcttgcatttgcccgtttgaaccctcaaaactccagagttggttatggcgagctagtgtctggttctaatatatcgccatccggagttaccggctatcccgcgggtggtaactgggctgctctcttcgcggagggtcagttaggagggacatggaaatgcttggggttatgtatttctgatagtgagggtggcaacaggcattacggtgtcagtttattcgtgagggtgtcatga

SEQ ID NO: 447473 - DNA, 507 bp, Serratia marcescens
atgtttgaatattttttctactcattaaaaaagacaatttcaccagcaaaggctaggttaatattcaataatacatgcatttcaaaaagaaaaaaacacaaaataatctcaaagtctggagtaaaaatatcaagaaaagctaatatcatgattccattttattacgagtatggaaacatagagatcattggtgatgtatttgtaaacgctaactgtacctttcttgatgatgaaaaaataattatcaacgatggctctatgattggcccaaacgtaacattatcgaccgtaagtcaccatgtaactcctgaaaacagacatgataaaaacatcactgctccaattactataggtgaaaatgtctggatatgtgccggcgctgttatcctccctggagttactataggtgataacagtgtcatcggcgctaacagtgtagttaattgcaacgtgccagaaaatactttatatgctggcacgccagcggtatttaaaaagaatttataa

SEQ ID NO: 447474 - DNA, 123 bp, Serratia marcescens
atgtactacgccggcttcgtctttatccgtatcgagcgctcgagtttttggacggttcaggccgggaaactgaactcggtaacgaagattctgaagaagggatcgaggtgtttggcgttgtga

SEQ ID NO: 447475 - DNA, 228 bp, Serratia marcescens
atgcataatgaaatattgtctgaagcccaggctgctctgggcctgaacaagcaggatatggcgcgcgccctgggcgttcattacaacacctacggaaagtggtcgcgcggtgagcaaaatccgccggcggccgtttataccgcaattaacatgcttctttttcttaaagaaaaacagcttgttgcggagtggctttacaggaatgaatctttcaaacagattcggtga

SEQ ID NO: 447476 - DNA, 531 bp, Serratia marcescens
atgaacgcggacgagtttaaaagaattgtcctgcagaatgggccggtattgcaagcgtgtaaaaagcctaaaacccttgtagaagcgatgacctccaattttgcattggcgaatagtgacattaattggaaatttcatagcggattggcttttgcctggcttatggggagcacggttgccgcttctagactgaatcgtctaaacaagaatcgtcgatcgacagtgcccttttgtgaggcgtggggcagggtggccaaacgggataacggaaagatccatattaatgaacgacgattcacgcgctggttatcggtcgcgacgaacgacctggaaaagttttatcaggaaaccctgagagcaatcgatgcgatggatacctattcctccccgttttcggtcgcttcgttgtatgagctcgctcaggatctggataacgacttctattaccaaaatagcgagcttgagcaaaaagccgttgaacgctttcgggtgatcgctgcagagcaattcctcaatggccagggtgcctga

SEQ ID NO: 447477 - DNA, 240 bp, Serratia marcescens
atgtctaaatatcaactccgtaagctaaatgtaaactctttagcggtttcctacgataccaaaaaagagttcgataatttttctacactgcgtgacgcaattaatgctgataaaagtctgttctttgggaaaggcttccatgtgttggacacagataacaatatcatcttcgatgataaggctgtggagcatttaggcgctcaatttacgctgaagcaggcaatttttaactatagctga

SEQ ID NO: 447478 - DNA, 219 bp, Serratia marcescens
atgaataatttagaaattgaccggagtgtcacgggggatctggtcactgagttaaagaaatatggcagtaaaacagtgactgttatgcaatcctacgatgaactagctgaccgtcactacaagcctcgccccgcgttccgtgactgggtgcgtcggttgaaagaaggtgagcgattgcccaggggccggtattttaacgggccaaaaaagaaagcatag

SEQ ID NO: 447479 - DNA, 2079 bp, Serratia marcescens
atgtctgacatcgatactaaagcacctgcaaaaccaaaatcaaccgccaagaaaagcccggccaaggctgcatcagccaaaaccgcagcggcgaagtttgttgaagctgcgctggacaaggctgagcgtaaaaatctcatgctcaaagagatcacctttactgatcagaatgcgcgtattacccctcgcactcaggacgagatcgaggagatggcaaccagtatcgaggccacaggcctgttgcagaacctcgtcgtacaccgcatggcggatggtcgatacggtgcggctgccggtgagacccgccgccttggtatggatttgttgatggtgcaagggcgttcagctgctggcgtaccggtaacgccggagtttatcgtccctgttttagtcgtcgatgagcaggacgcctatgcgatttctgttgcggagaacgtgcgccgcaccaatctgcaacctgccgatcagctcgaaaatatgcgtaagctggctgagaacggaaccccggccgaacagatcgctgccatcctcggcttcagcaccctgcatgttaaaaaatgccttaagttgacaaccgtagcccctgcgctgctggagctgctgaaaacgaatcaaatcaattttgaccagctggcggcgctgggtgcgacggatgatcatctgcgccagattcaggcatgggataaaggtaaatatgacgaccacttccgcacaccaaaggcgttacgaaaaatagtgctggccgacgaggtttcggccgcagacagccagttggttaactttgttgggattgatgcctatcaagcagcaggcggtgagatccgcgaggagatgttcgttgacgatgtcattctaaccgacccattgaagctggaaacgctggcgatcgccaagctgcaagcggtggcggatgatgtggcgaaaaatgaagggtgggcatgggctgttggccgtactcgtgaggcgcaacgttataccgacgatgagaagacattcgtagtcccttgggtaaccacgaggctgaccagcgagcagcaggcagaaatggatcagctgctcgctgagcaagaattgctggatgacatgtttgatactgctgaactcgatgcagacgatgaatgggaacatgcgccacgcgttgagcagattgagacgcgtatcaacgaaataaacgcagctgcagaactcaacaactggccgtcagaagttcgtgcgacggcaggcataatcgcttatctgaaagatggccagatccaaatccaacgtggcttgatgaaagtggaggacatcaagcaacaagagaaagccaaccgcgaagaaatcaagaagaacaccccaccgtcagaaaaggggctgtcccaagtcttggtgagcagtttatccgccgaacgcactttagccgtgtcagcggcgctggcgcagaacaccaacgtcgcgattgcactccatacgttcacgctggcgcggcgggtgttcgacgcgggatatttctatgtgttgcacacctctgtagaaagcatgcgcagcggctgcttatcccagtcagaagaggctggtagcgcgagtggcatcgccaacctgaaactgaacgagatgcatgagagctggctgaaccaattcccggataattggagcgaaagttttgagtggctgctggcgtggccacagggtgacgttctcgggttattggcatactgcgtttcccacggcctcgatggccgagacagttatctcaaggataagcgggttggcaccaagctggattcggtagaaaaagccctcgatttccagatcggggaatggtggaaaccgactgccgcgaacttcttctcacggatcggcaaagaccaaatcgtggacgccctcaatagcgccggtgaaatcgggaaggcaaaagatgccgagggtatgaaacgtaaagaagccgccgaattcgccgctgcggtgttgagcgaaacaggttggttgccgagctgcatggcaccgcagccgcaggccgaatcggaaagccgggctgatgccactgccagtgccacgaacgccaacgatactgacgctgacgacagcgctgccgcctaa

SEQ ID NO: 447480 - DNA, 432 bp, Serratia marcescens
atgatgaaaaagctatcggaaaaaatgcttgattttgcattggcacggccatacatgtgtttaactctcagcatagtgtttttatttttgtgtgctgccaaaggggtagagtatatggttaatggaagacatttaacaccattgctaatatccattttggcatgtgcaattggtgggctatttttcgtttacttttatatgcgccatactttagcaatgagtagaacttataactttttgttaaataataggaattctattgcggagggagttgcggtggaccacctaagggcattggcaaagagtcatgctgttgagaaagaattcgatgattatttttcgtcgaagaaacaccctcaaaaaattgaagttttcgtgaataagataagcgaattcgccatgaaaaaactcaaagataattcacgttcttga

SEQ ID NO: 447481 - DNA, 996 bp, Serratia marcescens
atggcgaccacagtaatagctgcctttaacgaatttatgaaagataccgtgaatctcaaaaaggcagataccgatgacgcgcgtgcaagtcgcgactggcttatcggtaagatgaatgattttgagaaggacgataaatttccggtgagttatccagcgatccatattgcctttggatcctttgccagaagaaccaaaatccgtcctctggacgatatcgatctgatgttcggcttatccgcgcagagtgccacctataacgttctgagtgaccggatcactctgacctcttccggcgaggggtcgcgcctgcacgggtatcggcattccggagctgacactatctgctccgtcagaattctgaatgcctttaaaaaccgcctgcaggacattgcccaatacgcccaagctgatatcaggcgtaaccaggaagccgtcacgctgaaactggtcagcaaggactggaattttgacatcgtaccctgctttattaccagcgaagatgcctttggacggacttactatctgatccccgacggcaaaggccactggaagtttaccgacccccgcaaagacagggacagagtcacaactgtcaatgtgcagaatgacggcaatgtgctgaatgtcatcagagcagtcaagtactggcagcggcgaccgacgatgccctccatgagttcctacctgctggagacgctgattctggactattacgccggcaggtcagcctgctcatcgtttgtcgatatggagctggaagcgcttttccgccatctcggtctgtacgtacagttctccgtcaacgatcccaaaggcatacagggagatatcaactctctttcagccgaggcgcgtaaggcgatttcggacagatgttatctcgatgcgcagaaggtatcggaggcgagatggtttgaggagaacaaagagtatgaaaaatccatcaataaatggcgcgatgtgttcgggccgttatttcctgtttacgggtga

SEQ ID NO: 447482 - DNA, 933 bp, Serratia marcescens
atgaatgccatttacacgaaccagtcgaccagagaaaacctggatttactgtatgcgcaggcccgtgtttacgacagggtaaaaaactggaacaggctgaattttatcttcagcatcatcgtgccgctcctgctttcgctcgttaccgtatacaaccggagccggggctttgtcgattcagagctgctgtcttcactgctggggttgtatggactcctggtgcttacttttaacattatcatcagcggacacatcgcggcactgcgcaggaaggcagcctcaatccaggaaatgtacgactgccgggtactgggcatccggcgcaatgacctgaaggtggaggagatcccacgggatgacatcatccgggcagctgcctatttcagggacagtccggaaaaagcacgaaagcgatttggcgaagagggatggtacgtcagtaaggtgtatgacgcgccgctggccgtaatggcgctcctgtgccacggaaaaaacctcggctgggacaaatcgctcaggaaggtgctgcacgtgttttatctttcagcttttattgtctcgcctgtcgcgatgcttgtttacggcatctccatgaaatccgggctgaatgagatcctcttctatgtggtgttcacactgccggtcatccgctatttcttgcttcagtttctggataatcgcagcagtatgaaaagaagcgagaagctgaaaaagtacgttgagaaggaattatccggcatcagggtgtccggaagggcagaagaagagcaactgggttatacgctccggaatatccaggatgagatgttcgcctaccgggcctcatgtccgcccgttcccaacggtattcagctgataatgaagcccaaaaatgagcgaatttatgttgattactttgaaacgaatctgaaggagctgcaccttcaggagtaa

SEQ ID NO: 447483 - DNA, 528 bp, Serratia marcescens
atgaaaatagatcattccgttatgaaactctatctgcaacgccaagataagtaccttgccaataaatttaccgacatcatgctggggttgttctctcccaagatcttgattgtgtcgtttgtagtgatagttatgggttcaatgtggttgattactaaacccgtaactctcggcgagacggagcaagcagcctatcattggttagctatttcaattggtgggttttttggggtttacggttttggtgctctgttcttcctttgcaagctacccaaattaaaacctttactcagttctacttacattcaagatctctgtaatgaaagcatgaaagcctacgatgaaatgatgctgccggatgatgcccctcgttctggtattaattacctttgtgacatcattagcaaaggtatccccatgaattattcacatgaaaggactgtaaaaaaccttatttcaaaggataaaaacgagcaggatatcaaagtattaagtaagaaaatggcggcggcgagtatagttttttaa

SEQ ID NO: 447484 - DNA, 267 bp, Serratia marcescens
atggaagtgattattaaattcacactaacgttatttgtattcatgttgatgtttttttgcgttcgccgtttgtctaactatgtttctaataagcggtctattagagagtgtgaggatatgataaccctaatcaacattcagctgaatgatgaaacgctcggtaaggaaaacaaaaacgatatgcaaacgactaaaaccgtttgtcagcatgaaatcaatgtacgaaaagggaaagttctgcttaaaagtggctggcgacctaattaa

SEQ ID NO: 447485 - DNA, 222 bp, Serratia marcescens
atgacgggaacaggcattaacacggtacgtatcggcggtgaagtgaagcacatcaccgatctcgatgcgccaacactcatgcatgaatggtcaaagctgaaaaaagagaatgctgacctgtataactataaccgtcaggttaaccgggggtggcgcggctttattctgcacctgatgggtatccatttgcctgacagttgccctggtaatgagatcagttaa

SEQ ID NO: 447486 - DNA, 195 bp, Serratia marcescens
atgaagaagaacggtcaatttaccggaatttgtgtgttgagtgctatctacctggcggctaccgctggtaagctcgaccagctgcaaggagatgttctgggctctgttctgtgggtgttggcagtgattcctggcggtatgtggttaatcgcacaagccctgggggcgatacacaaaacgttgctcagattgtga

SEQ ID NO: 447487 - DNA, 1092 bp, Serratia marcescens
ttgaatagccagtttgcgaatgttgagcacaacatcaatgaatccagtagctcccggcgtggcgaggctaatgcgttgcggcgcgggcaacaaaaaattcatcgtcgctatacgcctaatctgtgctgccgggtgccgaagggcatggcaagcaaagtagttgctcgcatgagcagtcacgactggcggcgtaatgatgatctgatcgagctgcgccggcagggctacatcccttatacacagcgaaacaaccccgactaccgccctaaaccgatgcgcatcgccgcgcggtcggagagccgtgaagcgctgacggtgctttccctcgtgctgggcgcaaactgcgactataacccggacagcgactacccgttcgagataatgctgcctttcgaagacgtggccaaagccatgggagtgctgcatgtctacgaaagcggccgcaaagcctatgatgtggctctgcacgcgctgtcggtgctcgagcagttggactatctcatcgtatcgcgcgggcaagataccgataccggccagaacaaaccgctgcgtatctggctgacggagaacttcttcaccagtcgcggcatccaggtggacgaaattcggcagtggctgaaccaataccggctgtgggcgattaaaaacggcctgactgaaacgctcaggcaaaaatacgagcgccacctggtgcgcatcgcgcatctggggatcgacatcgagcgtaagcactcgctgaaaaaccggctgaaaaagattcggcggtgggtggtgagtcccgacctgcaaaaccttaagcgcggcgcggaacaggcgattggcaacgaactggccaggcggcagcagaacgagcagcgattggatacgctgctggatgacaccgccgccggcatcaaaaagctggccgcagcacgtcgccagaagcggaacggcttttatcaggcctgggtgcagtggacgatgggcagctcgccgctgaaggcgatggagctggaaaatacgctcaaacgtgaacagcctggactgctgaacagcgatccagaggcattctaccggctgctgctggagcgtgccggcgccattccaggctaa

SEQ ID NO: 447488 - DNA, 783 bp, Serratia marcescens
atggcaatgttcgatccgcacagcggaaaactgcagcaggtacgcgaggtagtgcgcttcaccccgctgcagcaggacgtactgaaatttttggcattggtgttgatggttgtcgatcacgccaaccgcgcgctggggctacatgagccggttcttctgctgctggggcggggagcatttccgctgttcgccttgctgtggggatacaacctggcgtcgcggcctgtcaggcagacgcaggcgactcggctgtggatatgggctgtggttgcgcagccgggttattggctggtgatgcgtcatgacgggctggcatttaccgatccgaatattttgttcctgttcgctgccgtgacacaggcgctggccgtggcgtcgttgccgatgcgcaagggcgcacctaacccggtattggccggcggcgttttgctggcgctgtggtgggcgtatggcgccacagacggcagttacggtactgccggcgttctgttgctgttggccagttatgggctgtgcgtttccctgccggggtacgtgacggccgtctggccggtgcgcgggctggcgatcgtggcctggccgctcttggtgctgatgctcaatgccgagctgggcggcacgatgatgctggccggcctgctgctgccggcagtgctcatcctggggacgctgcctctggcgacgccgttcaatcaacagcgactgttgccgcgggggtttttcttgtacggctatgtagggcacttgttgttgctggcgttgctcgcctggttggttcgttaa

SEQ ID NO: 447489 - DNA, 555 bp, Serratia marcescens
atgagtaaggcaccgcgactccccgcccgcgtgtttggcgttgccgccctggtgctcagcggctggctgccggcatcgcccctgttggcggcgccggcggtacaggtggggttttcaccggaagggtcggcgcagcaactggtactgagcgttatcggtgaggcgcagcgcgatattcgcctgatggggtacgcctttacctcgccggaggtggcgcgggcgctgattgcggcgcaccggcgcggggtgggcatttgggtggtggtcgatgcgaaggccaatcagaacggcgccggccgggcggcactgaacctgctggccaacgccggcgtgaacgtcaggacggtcaacagctataagattttgcacgacaaggtgatcgttgtggatggcgtgacgatcgagacgggcagcttcaatttcagccgagcggcacaccgcgccaactcggaaaatgtggtggtgctgcgcgacatgccggaagtggccaaacagtatatggcgcactggcaatcccgttgggcgcagggccaggactggcagtctacttactaa

SEQ ID NO: 447490 - DNA, 537 bp, Serratia marcescens
atggataaggccactttagaaaaagaggcaacacagctgaagtcgatcattgttaacggtgagttgacggttccttcgttttgggactgtgtatggccggggttacttatgagtgcatggatggttatatgtccttttgttgcatttgaaatgacttctgaggtttatagtgactcactgacagctatagctggaggtgctttcataggtttgatttttactgttttcactttcaatattcggtcgctatacctggctgtgccaaaaaaattcacggctgagtctaggttttttagtgctctgcaaaggaaagtacgagtgtactatattgcttatatgctcttcgttgcattgtcggcatattttgcaacttactctaatgtagtgactcttttctattttggcccattgatagtttcctttgttttcatcatggtaattggcttgatggacgtgaatcgttatcgtgtccctgcgctctccgctgtatttcaaatgctaaaagccaggaagagcggaggtgtcagtgagctttaa

SEQ ID NO: 447491 - DNA, 843 bp, Serratia marcescens
atggaaaagcaaattacagtggtagatggcaagccaatgatgggtagccgcaaaattgcagtagttgtcggtaaagatcatgggaaggtttgccgcgatattcgcgtaatgctggggaagctctacaacctttcagaagaagattgcacacgtaatccagatttggcttaccttacaaatcatggtgttaagtgcgttcagtacgacaccagcaatcccaatgcctgggagtattggcttgaccatgagcactcagagtgcctggtaacgggctacgatgcatcccgtcggatggcgctcatcaaaagctggaaagaacttaacgaagaattatcccagccgcgaattgccgcaccagctccgcaggccatctctgcttcagagcacatcctgtcggtcgcccgcgtcgtggcagaggccaccgcgtccgcgacgatgaaagctgtgatggaactttccagcgcgcaggtatttgctgctcaggccctgccaccagcatcacccgaaccagcggcgcaggtaacgacagtctccgctgaaccagtggcctcacagcctacccctgaattctctccggtaatcgatctgatgtgggcctttggcatctccgacgcagcatgccggcgcctggcaagttacgccaacctgccgaccaagctgaccaatggcgagcgcggccacctgctgatccattacgcctctttcgctgaggcggtcttcaccctgatcgatgagtccacaccgccgacgggtaagcgtaaacgctggcagcacccagactttggcggcttcactctgaaggtcaccgaggccaataaagccgccgtggaggccaagcaatga

SEQ ID NO: 447492 - DNA, 633 bp, Serratia marcescens
atgaatttagctgatagagttaaacaaaagcgtttagagttgggtctaacacaggctcaattagccgataaaattggcacaagccagcaaggaatagtctcggtagaaactggtagaaccgtgcggccaagatatctcccagagttagcaaaagcgcttgggtgcgatatcgagtggttgcttactggatcaagctcaagcaacgtgacatatgtaggcccgcacgagccagggaagagatatccagttatcagcaaggttcaggccggcgcttggctagaagcggttgaagcttataatttgaaagatattgatttatggctggagtctaacgcacatattcaaggtgaggggttttggcttgaagttgatggtgattccatgacagcccccatgggggttagtatcccagaaggtacttacgttctttttgatactggcagagaagccatgaatggaaatcttgttgtggctaagttatctgactcgaacgaagcaacattcaagaaactagtaatcgatggtggtcaaaagtacctcaaaggcctaaacccagcctggcccatggttcctatcaatggtaattgtaaaattatcggagttgcgatccaaaccatgatgaaattgatctag

SEQ ID NO: 447493 - DNA, 294 bp, Serratia marcescens
atggacgctaaactgttcgatcgcttgaaagaaagcatgacgcaaatgaatgaaattattgacggtgagcgcgcaccttctcgtgagtttcaggttagtgcagtgcaagttaaaaccattcgtcaagcgacggggttatctcaaccagtttttgctgcgctaatttctgtcagtgtcggtacgctcaaaaattgggagcagggcagacgtgaaccaaccggccccgccaaagcgctattgcgtgcgattgagcgagatccgcaacatgtgctgccggcactatcttccaagtga

SEQ ID NO: 447494 - DNA, 810 bp, Serratia marcescens
atggctaagaaaatactgatggctatttttctgatttttagtatagagagtgctaacgcagaaatatatttccaggtgacaaagaaagaaggggggctattgtgggggatgttttattatgagatgcttgagtggacaactgaagatgataaaccaaacccctgttataataatttaaaatgtacaataatgattaccagctcatataatgtagggggtttctacgatgacactgatggttattggagggcttcagacgtttcatgggttgcaaattcacggacgatgggggagctcggcgagaattttaaaagaaacgtgggtctaccgagaaccgggagatttccctataaccggtaccttattgttggtggggcatgcgtagggttgttctataggagcgatgttgccgggtcgataaagcgcatgcctggttcaatatgtgcaaatccgcctgaggggaacgtttcttgtgatattgagacacctaaccttacgttaaaccatggtgctgtcaacttgggtgagttggtcggaaacacggtgtatgaacctttaaggattacctgcaataaaaaaacaaatgttgatgtttttattagtgagggtgcggctggggtggcgttaaataaagaagcgaccttaatttcaaatattaaaattaatggttatccggcagggcaaggggttaggattgtcgttgagccgacaggtgaaattgttcaggttagttcaacgttaaaatctgttggtgacatatcaccgggagtttttaatgccgttgcagtggcggttttatcaataccttag

SEQ ID NO: 447495 - DNA, 381 bp, Serratia marcescens
atgagcggctggatctcaaaactggccggcggaggaatgttgctcctgctggtaacggccatatgcctgggtggttacagctcgctgttgtcgcaccagttggcgtccgcgcggcaacaggcggcggaattgcaaaaaagcctggcgcagcaggcggggctgatcgccaccctgcagacccaggatgcgcaaaatcgtgcgctgatggcggcgcagcagcggcaggaacagcagctgcgccagcaacacgaggcttatcagaggaaataccgtgaagcgattaaaaacgatccctgcgccgctcagcctctgcctggcgctgtgtttgagctcctgcgcccggccgccggcgccgcaggccgtgccgctgttgccccctga

SEQ ID NO: 447496 - DNA, 1623 bp, Serratia marcescens
atgctgagcatcaaaccgaatttcgcacaggaacgcgcactgaacatgctgcgccgcgactggaaggggtttaactcgttcatggtctacatgcctacgggcagcggcaaaaccgggctggcggcattcatcgccgatggtcacgttagccggggcatgcgcgtgctcttcgttgccccttacacaattttgattaaccagacttcgcagcgctttatcgaatacgggctgcccgaagacgagatcagctttatctggcagaagcacccgagttacgacccatcgctgaagatccaaatcgccagcgccgacacactgatccgccgggagtttcccggcaacatcgacctgctgatcattgacgaagcacacctacgccggcaggaaatcctgattgagattgaacgcctggtacgtgaaacgcatgtgaaggtgattggtctgtctggcacaccattctcgtcgttcctgggtaattactatcagcagttggtgaagcccaccaccatcggtgaactgatccaccgtggtgatctgagccgctatgagttctatgcaccgaccaagcccgacctcaagggcgtgaaaaccagcaagtcagatgattacggacgtgactacaacgagaagcagttggccgaagtcatgtgtggtgccgatctcgttggtgacatcgtagacaactggttgaagaacggccgggatttgccgacggtggcgttctgcgtcaacaaagatcacgccaactacgtgacgatgcggtttaaccaagtaggcatcaacgctgaggttatggttgataaaaccccacaggaagagcgtcagctaatcatccgccggtttgaagccggcgccacgaagattatcgtcagcgttggtgtgctggtggcaggttttgacagcgatgtgcgctgcgtcatctatgcccgccccaccaagagtgagatccgctggcttcaggcgcttggacgcggtctccgtacagctcccggcaaagagtcatgcctcattttcgaccatagcggaacggtattgcgactgggtttccctgactccatcgaatacgacgaattgccctccaaaagcgacggcatgaaaggtgtggccgccagagctgctgaagagcgtcaggaaaaaatgcccaaagaatgctctgagtgccattacatgaagccggctggggtttacgtctgccctaagtgtggtttcaaacctctcgtcggccaggatgtggagactgacacccagcgcggtttgaaaaagctcggcaaaggggagcgcaccttcaccaaatccgacaaacagcagtggtggagccaaatcaagttctatcaacgccagcgagcatcgatgggtaaaccgatcagcgacggctggtgcaaacacacctttcacgacaagttcggcgagtggccgaacgacctgagtgatttccccatggagatcaccccggaggtcaacagcttcatcaagcacaagcagatcaaatttgctagggggcgtgagaaatctgcatccacagcgtcgcaaccctgcgccgaaatcccgactaccacgatgaaagttattggcgccagaaaacatcttgaagaaatgcgcaaacatttgaggaaagcagtgtga

SEQ ID NO: 447497 - DNA, 966 bp, Serratia marcescens
gtgaagacgactgaagcagcgagaggccgttgggccgagatttttgaatattttgggctgccgccaatcacgggcaaaaaccactacaagggagagtgtccggtctgtagcgcccgtgggaagttccgcatagacgacggcgacggcaaaggcacctggatctgtacctgcggcagcggcgacggcatgaagctgctcactttgacgcagggcaaatctttttcggcgttgtgtgtggagatcgatcagctcattggcaacagctaccgacatctgaacgtaccagtcaatagttcggcagcgaagaagcggcagcgcgtaatcagcaagtattcgaagatggttggacttcgtggcacgaccgccgcgaattacctgcgccagcgcggcataaatcgccttccaactgacgctgtgcgtttctgcgaacgtcagcgccatgctggccgggtattccaggtgctctattctctggcgaccgatgacaagggtgagctctgctatctgcatcgcacactgctggatggtgaccgaaaagcagacatcggcgaaagcgccaagcttctcaactcccttcaggaaccaacataccttgaccatgcccgctctgtggccatccgcatgtttccggtggcgtcaactatgggtgtagcggaagggatcgagacggcgctctcctgctatcagatttacggggtcaatacctgggcgaccatcaacagcacgttcatgaagaaattccgtgttccggccggcgttaagcatctcatcgtcttcgccgacatggatgcgcactcagcgaccggacaggcggcggcctttgaatgtgcacacgcgaacctgcttgccaagaacgatctgatctcggtcagcgtccgctggcccgaccacaacgactttaacgatatgctcatgaatggcgatcaggttcgtgagctggttttctacaaaaaggtggcggcatga

SEQ ID NO: 447498 - DNA, 315 bp, Serratia marcescens
atgccggataaagaaatcaaccacattttctccagcctatgggtggtgttcatcctcattgctggctggggtggtgttgtgaggtatctcatggatatcaagcggaataaggcggcgtggagctgggtaaatgccttggctcagatcgtggtgtcgagtttcacagggttaatcgggggcatcgtcagcatggagacggggctatcggtcaatatggcgttcgttggcgcgggtctctgtggtgctatgggtagcgtggcgctgacgtacttctgggagcgtttcttcgggggcatcaatgaaaaccagcgttaa

SEQ ID NO: 447499 - DNA, 282 bp, Serratia marcescens
atgatcggcgctggtggttgtagcgttggcctggcgcatgaggtcaagcacagcaccaggagcagcgcgacgggcgcactcatcgtttttgatcgcatcccggtatttcctttgatagatgtcggcctgctggcgcagctgctgttcctgctgctgctgggctgccatcagtgcacggttctgagcatcctgtatttgcagcgtggcgatcaatccggcctgctgtgccaaggtcttttgctgctcggcagactgttgccgcgccagatccaaccgatgtga

SEQ ID NO: 447500 - DNA, 474 bp, Serratia marcescens
atgccaggaccgccgaaaaccccgacacacctgactttagtgaaggggaacccatcaaaacgagcgatcaataaaaacgagccaaaacctccgtctggggtaccccaaacaccgaagcattttgataagcagggcaagtattggtttaagcggatcggtgaggagcttgatgccatcggcgtgatgaccacgttggatgcgaaggcgctcgaactgctgatcgaggcttatgtcgagtaccggcatcactgcgatacgttggcagtagagggctatacctacaggacggagacgcagacgggcgacgtaatgattaaggctcacccggccgccgtgatgaaggctgatgtctggaagcgaattcgcgccatgttatcggagtttggtatgacacccgcaagccgttccaaggtcggcgccaagggcccggctgaggttgacccactggatgaattccttaaaaagcgcaaatga

SEQ ID NO: 447501 - DNA, 1752 bp, Serratia marcescens
atggcaaccgttgcagatggattccgctacgccgagcgcgtggtatccggcgagattgttgctggcgaactggtgcgcctggcgtgccggcggtttcttcatgatatagagcacggccccgagcgcggtgtttatttcgatgaagaccgcgcgcagcacattctcgatttctataatttcgtccctcatgtgaaggggcatctggcaggtaagccgatcgaattgatggattggcacattttcatcctgataaacctgttcgggttcgttattccgcttattgacgagatgacttccgatatcgttttgggtgatgacggtgagccggtttatgtgcgtcgtttccgtaccgcgtatgacgaggtggcgcgtaagaacgccaagtcaacgttgtcctctggcatcggtctctacatgactggcgccgacggtgaaggcggtgcagaggtctattcggcggcaacaacccgcgatcaggctcgcattgtgtttgatgacgccaagcggatggtcaaactggccgctaaaacgctggggcggttgttcggcagcaacaagctgaacattcaccaggaacggacaggctctaaattcgagccggtggccagtgatgccaacaaccttgacggcctgaatatccactgtgggatcgttgatgaacttcacgcccataaaacccgtgacgtgtgggacgtgctggagacggcgacgggcgcccgcctgcaatcgctgatcttcgccattaccaccgccggatttaacaaggaaggtatctgttacgagcaacgggattacgcaatcaaggtattgcgaaacttcgataatccagacccgctatctatcaaggatgacagttacttcgctctgatttacacgctggacccggatgacgatccctttgatgaggccaactggccgaaagcaaaccccggccttgggatttgtaagcgctgggatgacatgcgccgcctggcgaaaaaggcgaaagaacaggtcgccgcccgcgttaactttttcaccaagcatctcaatatctgggtacagggcgagcaggcgtggatggatatggcgcgctgggaaaaatgccgcgattcttgggatagtgcagattcggcgagttggtcaatgtggcttggtgttgaccttgccaacaagattgacatatctgccgcggttaaagtttggttggcgtcgaatggcgatatttatgtcaaatcacgcttctggataccggaaggccggctggaggcctgctccagacaacaggcggagttgtacaaaaaatggaacgaagccggttatctggagttcaccgacggtgatgttgtcgatcacgcgttaatcaaggaagaaacgctggcctgggcgagtggcgactcgatgaacgagctggcgtatgacccgtggagtgcgacgcagttcggccttgcggtggcggcggaaggggcgccggttgttgaggttgcccagacggtgaagaacctgtccgaagccatgaaagaggccgaggcgaaaatctacgccggccgcctgcaccacgacggtaacccggtgatgacctggatgatgtccaacgtcaccgtcaagccggataaaaacgaaaacattttccctaacaaatctacaccggaaaacaaaattgacggacctgtcgccatgtttattgcgatgagccggctgcttgttaacggtggtgatgccaaagaaagcctttcaacgcatatcgaaactcacggtctgcgctcactttaa

SEQ ID NO: 447502 - DNA, 195 bp, Serratia marcescens
atgcgggttttgcattttatcagcgtgctgtccgtgctggttggtgtggccggcgccgtgttgcttacgtacggcgtttggctcatctatcggccggcaggtttcatggtagccgggctgttatgcctcctttggtcctggcttgtgtccagcatgttagggcgccacccggcaatgccggataaggagggctga

SEQ ID NO: 447503 - DNA, 1230 bp, Serratia marcescens
atgttttttcccggattgtttcaaaagtcggaggttaagccggttacttcgcaagatattgcggaaatggtcggcctgtcctacgacacttacaccggtcggcggatcagtccgcagctgtcaatgcaactcacctccgttttcagctgtgtccgtgtgttggcggaatcggtgggtatgctgccctgtggcctctttgaacagctcgatcggggaaatcggcgcgcggtgaaagagcggttgcataaactgctatcagttaaacccaacggctacatgacgccgcaggagttctgggaactgctggtggggtgtctgtgcctgcgtggtaacttttatgcctataaggtcaaggcgctaggggaagtggtcgagttattgccgcttgatcccggcagcgttgtcccccggctgggttcagattggaacccggtttatcaggttacctttcctgacggcaccagcgacacgctgacccaggatgaaatctggcatgtgcgcatttttacgctggatggcttgaacggattgagccccatcgcctatgcccggcaggcgatcggtctggggatggcgaccgaggagcatggctcccgcctgttcggcaacggtgcggtcgccagtggtgtgctccagactgacagtgcactgaccgacgaagcattcaatcgcctgaaaaacgatcttgaggctcgccaccaggggctggccaacgctcaccgacccatgatccttgagatggggttgaaatggaaccaaatcagcctcagcgcggaagatgcgcagtttctcgaaacgcgaaaattccagctggaagagatttgccgcatttaccgcgtgccgcttcacatggtgcaaaacactgaccgggcgacctttaacaatattgagaacctggggatcggttttatcaactactccctggtcccgtatctcacgcgcattgaacagcgaattaacgttggactggtaaaaccagcctcgcagggccgtttttacgccaaattcaacgctggcgcattgctgcgcggggatatgaaatcgcggtttgaggcatacgccacggggatcaactggggcatttattcgcccaacgagtgccgagacctggaggaactgaacccaagggagggcggcgatatttatctgacaccgatgaatatgaccaccaagccgccggccggtgacaagaaaaagccaactgaggaaagcaacaatgccgatgactaa

SEQ ID NO: 447504 - DNA, 654 bp, Serratia marcescens
atgccgatgactaagcagcggctggatattccattgaaaattaagtctgtcagcgagtccggcgagtttgaaggctacggctcggttttcggtgtgaaggacagctatgacgatatcgttgttcccggcgcgttcagcaattcgctggcgcgctggaaggagaagggggcgtggccggccatgttgtggcagcacaaaatggacgagccgatcggcgtctatgccgagatgcaggaggatgatgtcggcttatatctcaaaggaaagctgctcattgacgacgaccccctcgccaaacgcgcccacgcacacatgaaggccggttctataaccggcctttctatagggtacatgctgaaggattgggaatacgacagggcgaaagaggcctggatgctcaaggagctggacctctgggaagtgagcctggtgacgttcccggcaaacgacgaagcccgcatcagcgatgtgaaatccgcgtttgcgcgaggtgaaaccccctccccgaaaagtattgaaagagtcctgcgcgatgttgggctttctcgctctcaggccaaagcgtttatggccgagggatacggcgccttgtcccagcgtgatgctggtgatgtagatgctgctttaaccattttgaaatcaataacattctga

SEQ ID NO: 447505 - DNA, 1218 bp, Serratia marcescens
atggccgttgatattaaagacgttgaactggtcgcgcaggagctgaaaggtaactttgaagagttcaccaaaaagaacgataagcgcctggatgcgatcgaagcggaaaagggcaagctgtccgaatccgtggacaccctgaacgggaaattgtccgaactggataatctgaaatctcagttggaagaagagctggcggccgtcaaacgtcccggcggtggcaaagactccaaagccgcgacggaacacaaggccggatggcttcagttcgtccgcaaaggcaaggatgatgggctggcggagcttgagcagaaagccatgcagacgaccaccgatccggatggtggatacgcggtgccggaggagctggaccgcaacattatcagcgcgctgaaagatgaggtggtcatgcgtgccgagtgtaccgttatcactatgggtacgccgaactataaaaaactggtgaaccagggcggcactaacagcggctgggtgggtgaaaccgacgagcgcccagaaaccaagacctccaagctggcggtcattgagccggtatggggtgaaatctacggtaacccaatgaccacgcagacaatgttggatgatgcgtttttcgatgtggaaaacttcattgtctctgagctgactcaggaatttgccgagcaggaagaaatcgccttcaccaacggcgacggcaacaaaaagccgaaagggctgctggcctatggcagtgacatcaaggacgacaaggagcgcgattggggcaagctgcagcacctgctggctggcaagccagacgcgatcactgccgatgaaatcgtgaagttggtttataccctgcgtaagccttaccgctcgggcgctcgctggatgatgaacaacagcacgctgttcaccgtccgcacgctgaaagacagccagggcaactatctgtggcagccaggcctgcagctcggccagccgtcttcgctgctgagctacggcattgccgagaatgagcagttcccggatatcgccggcgacggcacgccaatcggttttggcaacttcaaacgctgcttcaccattctggatcgtatcggtgtgcgcatgctgcgtgacccgtacactaaaaagccctttgttggcttctacaccaccaagcgtgtcgggtcgatgatggtggacagcaactcggtgaaactgctcaagatgggtgctgcaccggcagggaaataa

SEQ ID NO: 447506 - DNA, 315 bp, Serratia marcescens
atgacgccatcacttgatgagctgcgccttcaatgccgaattgacggcgatacagaagatggactgctgaacatttatgccgatgcggcgaaggaccttgcgcaggaatacttaaatctgccgctgtttgacgagcgcgtgccggaagatgttgatgagggcgttgtgattgccggcaaggtcaagctggcgatcatgctggtggttggccactggtatgaaaatcgcgaaacgacctctgaggaaaaactgtatcaggcgccgctggggttctacgacttgttgaagggaaaacgaaagaggccgggaacatga

SEQ ID NO: 447507 - DNA, 390 bp, Serratia marcescens
atgatcgagtatgaaatcaaagcggcactggaggcactaacgagcctgccagcgtatccgctgctgttacctgacccggaacaggaaggcgtgacgtatcagaaggtcagcaacccgaaagttgataccgggctagccagcacggcactgattcaggggcgctttcaggtcacgctttatgttatcgacgattacgcgcgcctcattgaactggataaggctatctgtgtcgcctgggagagcattcagcacgggcatattgggcgctggcccgtgcagacggtgacacgcggcacgatgcaacagggagcaaccaccctcaccaacaacagcgttcagtaccggctggtgcgtgattacgtcatctgttacccggaggacgccacatga

SEQ ID NO: 447508 - DNA, 2631 bp, Serratia marcescens
atgaatttgctcgacaaggtcacccatacggccaacagcctgctgtcggcgctcaaaatgcccgatgcgtccagtcaggctaaccagctgctcggcgatatgcgtttcccgcagctgagcagcctgttgccttatcgtgattatgatgaaagctcggggctgttcatcaatgacggctctatcggtttcatgctggaagtgcagccgctgaccggcgccagcccgaccgaggtgctggcgattgagagcctgctgcgtaccaaactgccgcgcggcgtaccgctgtccatccatctgatgtccagcaagcgcgtgggcaaccatatcgagtccggcctgcgtgatttctcctggtcaggacgggatgccgacaagttcaacgccatcacccgcgcctattacctgtcggcggccgaagatcgcttttccttgccgcctggtgtcgatattccgttgaccctgcgtaattaccgggtattcatctcgatgtgcatcaaggccaagagaaataacaaggcggcctttgtgcaaatggagaacctggtcaaggtgctgcgcgcgtcattgatgggtgcaaagatgcctacccgaaccgttgatgcggatgactttatcaacgtggtcggcgagatgatcaatcacgaccccgatcagctgtatgacacgccgcgtaccctcgacccgtaccaggatctgaacttccagtgcatcgacaacggcttcggtatgaacgtctatcctgactgcctcaagataaatttgcgtagtgcaggcagagaaagcgagagcgtggctcgcgtgatgaatttccagctggaaaagaaccccgatattgcgttcctgtgggccagcgctgacaactacggcaacctgctgtatcccgagctgtcgatcgcgtgcccgttcatcatcacgctgacgatggtggtcgaggagcaggagaaaaatcagttcgaagctaaccgcaaatacctcgacctcgagaagaaatcccgcacgtcatacgccaaggtgttccctaacgtggtggaggaggccaaagagtggggggacttgcgccagagactctctaccaaccagactgcgctggcctcttacttctataacgtcacggtattttgcgaagacaacgataacgtggcgctgcgctgtgagcaggatgtgatcaatacctatcgcaagaacggtatcgacttgatcgccccacgtttcaagcagcactggaacttcctcgcctgcctgccattcatggcccatcacggtgtactggacgacctgcgcaagcacggcgcggtacatcgggcagagacgctgaacgtggtcaatctgatgccggtggtggccgacaaccgcctggcgccggccgggctgttggcgcccacctaccgtaaccagctggcgtttatcgatatctactctgaagtcatggacaacaccaactacaacatggcggtatgtggcacatccggcgccggcaagaccgggttgatccagccgatgatacgcagcgtgcttgatactggcggtgtggcctgggtctttgatatgggcgacggttacaaatcgctttgcgagaacatgggcggggtctatatcgacgcacagacgctcaaatttaatccctttgccaacatcgtggacattgatgaatccgccgagcgtgttcgcgaccagttgtctgttatggccagccctaacgaaaagttgggtgatgtcgctgagtccttgctgctgatggccgtcaaagctgcatggatagccaaatcgacgcatgcgcgtatcgatgacgtagtggacttcctcaaggagtctatggacgacagcgaattaagcaaaaccccagaggtacgcagagatttacatgcaatggtcattctgctcgacaaatatacccaggatggcatttacggtgatttcttcaattccgacgaaccaacgttacgtgacgacgccaacatggtggtactggagttgggtagcctgaagtcgcgccctaatcttcttattgccgttatgttctcgctcatcatctatatcgaaggacgaatgtaccagtcttcccgctcggccaagaaactgtgcgtgattgatgaaggttggaagttactcgatttcaaaaccgaaaaagtgggtgacttcatcgaagaaggctaccgcacggcacgccgccattatggtgcgtacatcaccattactcagaatatcaaggatttcgagtctgagtctgcgagtaaggctgcgaaagctgcctgggccaactcttcctacaaaatcatcctgatgcaggaagcacaggccttcaagaaatataaccaagaatatccggataacttcagtcagctggagaaggatgtcatcgctcggttccagtcagccaaggatcagtggttcagttcattcatgttgatggtcgcgggtcgcagttcctggcaccgactgtttgtcgatccactcagtcgggcaatgtactcctcgcaaggcaaagactttgagtttatccagagccgccgtgagcaaggggtatctgtgcacgatgccgtttacgcgctggcgcaacgcaacttcgccgaagaaatggcccggttggaacagtgggtcgaactgcaggctaaccggaggatggcggcatga

SEQ ID NO: 447509 - DNA, 537 bp, Serratia marcescens
atgaataacaacgatagacccactatccagcatttcgatgactttccctttacggggggcgtttctgcagaaatcgggaacctcgtcgtctgtggccgaaccggcgcggggaaaacaacgctgatgcagtccatcgtggataaatacagcgcggatgccgtgcgaatgacggggttatatgtctttttattgctggcctggtggggtggttggcttgcgctcgatgcgtggcgcattgagaacctgctgaccgatgccgacaagtgggccggttttcggcgtgacatcctctggtgtgcggggtcggcggcgctctccttaattttcttaatgacgggtcccaacaaaaaatcctctgtttacgcactgtcattatgcctggcactgatagtgcccatctcggtcgcaatcgttgccgggagttctttcattcactgggaatttgatgtgccggcgttcttgatggcgcatacgtgcgccggatgggtaatgactctggctgtaccgttagtgacttttttctctgtcaggatttaa

SEQ ID NO: 447510 - DNA, 858 bp, Serratia marcescens
atgagcgaagccaacgagaaatacataagtggttcaaatataggggatgttgtttcgctgatgcttaacatgcaggggatcgcaaagcataagcacgtagaccacgtaagaagcgtgctatcaatatccccatctcaagcccataaaaaactaaaggggcaagctcagtgggaagtctcccaactccaaagcgttgtggtttcagtaggtctcacgatgagtcagttctacatgattatcgagtcaggctttgctgataaggttagtgccgttctggacatcaacagtgcagagatagagtgcgaagcatatcttttgggtgtcgggcaggacgaacccagaacctattccgcagtaaaaataaatgacatatggcacgtttttaagacagaggaaattcaagagaaccagctctacatggagtcaaagcgtggggttagcatgatatccatcgactctacagtgctcacaagaaagcatcccaggatagctatccttgatgatgatgttgcgatagttgaaagcattagagggataatgcagggaaaagagtatcatattgatatcttcgtcgatattgatagcttgcttaaatctgcagtaacaaaaccatatgacgcttacattttagactgggtcgttagagaccattcagtctacgatctagttcaaaaaatccgacaatcagaaaagccaaatgcaatgatcatcatactcactggccaagtgggtgaaaatatagatagggaaattgcatctgccgttaatgatttcgatgtccttggaccatatagtaaaccgctaaggattaactcgattcaagctctagtagacaaatacttttcaagtagaccatga

SEQ ID NO: 447511 - DNA, 990 bp, Serratia marcescens
atgaacattgacatttcacaaaacaatggcagtttattattgaattcaacagatatagtctctgcattcgatttaatatacagtcccattgaacgtgaactgaccaagctgaacagtagcttggtactaaacagtgcattgagaaacttcacgatagactacagattgacgcgtgacttaacgataataaacggaatgggtgttacgcttggtgattcaatcataggcatcagtgcattagaagcaataaaaaaaattaatgaccagattagaatccgggtaattcggccaaaaaactgcgcaaaatatgtaaacgacatatactatgaagctaaggaaatcataagcaaaatagaatacatgccattttcattgcaggacatatctccaaatgataccaatgtagatattggtaatcaggtgtattggaaggacttcaatgaactagaaatgcatgattttttcatgaaaaccatagggttagactataactcaatagatgaagactggaagagaaacacctggttaaagcgagccatccctcagaataaaaaaagcaaatatatattattctgcccgtatgccagcactaagctcagatcgatccctgagaagcatcatgacaaaattgtcacgatgctttatgaaaaatttagattaccagtatacgggtttggaatatcgaatcattctaaatactttaatgtaacaagcatgtgtaaaagtacaagacagtacatagaaatgattgctaactcatcatacctatacacttgcgattcatctgctctacatgtagctgctggctacaacattcctacattttgcattttcacatcaatacagccagagttacgtagcaaatactataataactgcacctccgtttatattggcagtgaaaaagtcaatgggatgcatgaaagcaacaatccgtcactaattcaatacatagaaaagaaatttgagagctattatgaaaacgcttaa

SEQ ID NO: 447512 - DNA, 1476 bp, Serratia marcescens
atgaagctgctctctctcttttctgaacacacggcgccggaaagtttctcccggatactcaccccgacacaagcgtgccatgagctggaacggcattatctgttcggcggcgcagccggcatatcgataagcagccggtattccataacccgtaatactcaatccggtattggcgtcaccggttatcgtgaggacgcgattgtgaagcgcagcgtgttcgatgatctcaaccggggcggtttgctggcgattgatgaggaaataggcgcctggacgccgaccaaatacgcgttttacgtcgacgcggaaggccgattacagcgctatcccggcagctctcttcctgccttttatccaactgggcgcgtgatcgcccgctatgaagaaatggtcagccgctatggccggcgggcaaaaccgacggtgctgccggcgaggcagaatacgacccggaatccccctctgcagcaagctatcgctaccgcagtggcaaccgttgccgccacggtacaggccatccgtccgatgaccaaggcagaacgctggcaagaacgccagtacctgatagggcgaggcaaccgcagcatttacccggatgcgcgcatggcggcacagcgattggcggagaacaacgtcgcggtcgaaaaggcgaagttggctgagaatgtttacaagaccaccgattcactaggcgaactatctggagtaccggagggctggaaagatatcagtaatgacgagcgagctttaaataggcttggtctggacagtaaaatgctttatgacaagccgataaatcctgattttttagctcgagtttatcaaccagacgagagtatctttggtaaagcgatgagtccgacggtggtgtttcgaggatcgcgtgcgcctgagctcccggaaggaataagcactgcagttcaaaaagctttattaaaaggcgatctgtcaggcgttaaaaacctgagcgactggacaaacaatggtgctcagggaatagggcttaattctgaatactacaaaaaagcggttaatatcggtaaagcaatcaaaggcgatgttgggatatctggccattcactgggcgggggcatggcatctgcggcctccatggccagcggtaaaccggcatggacgtttaatgcagcgggtctgaatgcgggaaccgtagaaaaatacggcggttcgataataggcagagccgataatattcaggcgtatcgcgtaaaaggggagctgttgactaagctgcaggaggttgatttgtgggaggatgccaaagacctcaatttttatccgcctgcggtgatggcgaaagagcggttgtccatgttggcgcctgacgccgtaggggttaaacacacgcttcccggtggaacaggctcactgctggataagcacggtatagaccaggcgatacaatgcattgaaaatgaaaaagacgatgacattgccacaatcaagggaagaatatga

SEQ ID NO: 447513 - DNA, 1017 bp, Serratia marcescens
atggccaaacctcttcctcccggttattgcattgttgaacagcctgggccacttgcctttcaggcacaacagctttttggtggccgcaccaacgatgccagcagacaatttatggcggtcaatgccgatagttcgtggttaaagccggggcaaattgtactgctcatggatccagaaaaccccctcacgcctgataccatgcgccttttaaggctgacgaagcaaaatgtgaatcgtaccattgcgccgatgaccacagatgatgcgggatttttgcaacgaaactatgacgccattgcggcactcacgtcggcaggagacaagttattcggtactgcgagcgatgtcggtgagaagtatttccgacagattgagtctacgttacagaaaattgaacggagttatcagagtcaatttcgctctcaaggtagcctgattagccaacaattttatgctgaacgcgctgcattattcgcagaacttaaggttatggtaaataagcctgttttgtcgcgactggtgcaaaaggcggtgaagtttaaaccctatgaagatatgcggcatgcacttaatctttccagtaagtctattgttcacgaatggtctacagcgggggttggtgcaattagaggttatgccacttacctggagggcgcctcacgggctgccactttcatgaaaagtggtgggtatattgctattgcgttctcaggtttgaatgcaaccaatgaagtgatgtatgcatgcaccgctgggcgtgagggggactgtccgaaggtcgcagtcaaagagtacagtcagtttggtttcagcactggaggcgccattttggggggaagcggcggagctatgctggttggcggaatttgtgtggctgccggcgttgctacaggtggtgccgctgcgtttgcctgtggattggtaggatcgctggggggagggctgctaggcggagccgctggtgataaagttggaagcaagtttggtgacagcgtaaacacgctattttttgactga

SEQ ID NO: 447514 - DNA, 558 bp, Serratia marcescens
ttgaagggacaacggatcgggtacgtccgggtcagcagcttcgatcagaacccggaacgccagcttgagcagacacaggtggacaaggtgttcaccgacaaggcatcgggcaaggacatccagcgcccagaactggaagccctgctggccttcgcccgcgagggcgacacggtggtggtgcatagcatggatcgtctggcgcgcaacctcgatgacctacgccgtatggtgcagacgctcaccaagcgcggggtacggatcgaattcgtcaaggagtgcttgaccttcaccggcgaggactcgccgatggcgaatctgatgttgtcggtgatgggcgcgttcgccgagttcgagcgcgccttaatccgtgagcggcaacgcgagggcattgcgttggccaagcagcggggcgcgtatcgtggacgcaagaaagcactgtcccctgagcgcgcctccgaattgcgtcatcgcgccgaggctggcgaacagaaatcgaagctggcccgtgagttcggcgtcagtcgggaaaccctgtaccaatacctgaaagatgcctga

SEQ ID NO: 447515 - DNA, 2967 bp, Serratia marcescens
atgccccgccgatcgatcctgtccgccgccgagcgcgaaagcctgttggcgttgccggacaccaaggacgacctgatccgacattacacattcagcgataccgacttcgccatcatccggcagcggcgcggcccggccaaccgcctgggcttcgccgtgcagctttgctacctgcgctttcctggcgtcattcttggtgtcgatgaggcgccgtttccgcccttgctgaaactggtcgccgaccagctcaaggtcggcattgaaagctggggcgagtacgggcagcgggagcagacccggcgcgagcatctggtcgaactgcaaacggtattcggcttccagcccttcaccatgagccactaccggcaggccgtccacacgctgaccgagctggccatgcaaaccgacaagggtattgtgctggccagcgccttggtcgaacatctacggcggcagtcgatcattctgcccgcgctcaacgctatcgagcgggcgagcgccgaggcgatcacccgcgccaaccggcgcatctacgattccttggccgaaccgctgtcggacgcacatcgccgccgtctcgacgacttgctcaagcgccgggacaacggcaagacgacctggctggcctggctacgccagtcaccggtcaagccgaactcgcggcacatgctcgaacacatcgaacgcctcaaggcgtggcaggcgctcgatctgccttccggcatcgaacggtcggtgcaccagaaccggctgctcaagatcgcccgcgagggcggccagatgacgcccgctgacctggccaagttcgagccgcaacggcgctccgcgaccctggtggcgctcgccatcgagggcatggccaccgtcaccgacgaaatcatcgacctgcacgaccgcatcctgggcaagctgttcaatgccgccaagaacaagcatcagcagcagttccaggcatccggcaaggcgatcaacgccaaggtgcggctgttcgggcgcatcggccaggccctgatcgaagccaagcaagctggccgcgatccgttcgccgccatcgaggccgtcatgtcctgggacgccttcgccgagagcgtcaccgaggcgcagaaactcgcccaacccgaggacttcgatttcctgcaccgcatcggcgagagctacgccacgctgcgccgctacgcgccggaattccttgccgtgctcaagctgcgggccgcgcccgccgccaaggacgtactcgacgccatcgaggtgctgcgcggcatgaacagcgacaacgcccgcaaggtgcccgccgacgcgccgaccgacttcattaagccgcgctggcagaagctggtgatgaccgacgccggcatcgaccggcgctactacgagctgtgcgcactatcggaactcaagaacgcgctgcgctcgggcgacatctgggtgcagggatcgcgccagttcaaggacttcgaggactacctggtgccgcccgcgaaattcgccagcctcaagctggccagcgaattgccgctggccgtggccaccgactgcgaccagtacctgcatgagcggctgacactgctggaaacgcaacttgtcaccgtcaaccgcatggcagcggccaataacctgccggatgccatcatcaccgagtcgggcctgaagatcacgccgctcgatgcggcggtgcccgacaccgcgcaggcgttgatcgaccagacggcgatggttctgccgcacgtcaagatcaccgaactgctgctggaggtggacgaatggaccggttttacccgtcacttcgcgcacctgaagtcaggcgacctggccaaggacaagaatctgctgctgaccacgatcctggccgacgcgatcaacctgggcttgaccaaaatggccgagtcctgccccggcacgacctacgccaagctggcctggctacaagcctggcacatccgcgacgaaacctacggggcggccctggccgagctggtcaacgcgcagttccgccatccctttgccgagcactggggcgacggcaccacgtcatcgtcggacggtcagaacttccgcactggcagcaaggccgagagcaccggccacatcaacccgaaatacggcagcagcccagggcggacgttctatacccacatctccgaccagtacgcaccgttccacaccaaggtagtgaacgtcggcgtgcgcgactcgacctacgtgctcgacggcctgctgtaccacgaatccgacctgcgcatcgaggaacactacaccgacacggccggattcaccgatcacgtctttgcgttgatgcacctgctgggcttccgcttcgccccgcgcatccgcgacctgggcgacaccaagctctacatcccgaagggcgatgccgcctatgaggcgctcaagccgatgatcggcggcacgctcaatatcaagcacgtccgcgcccattgggacgaaatcctgcggctggccacctcgatcaagcagggcacggtgacggcctcgctgatgctccgaaaactcggcagctacccgcgtcagaacggcttggccgtggcgctgcgcgagctgggacgcatcgagcgcaccctgttcatcctggactggctgcaaagcgtcgagctgcgccgccgcgtgcatgccgggctgaacaaaggcgaggcacgcaacgcgctggcccgcgccgtgttcttcaaccgcctgggtgaaatccgcgaccgcagtttcgagcagcaacgctatcgcgcttccggcctcaacctggtgacggcggccatagtgttgtggaatacggtctatctggagcgggccgcgaacgccttgcgtggccatggccagaccgtcgatgacgggctgttgcagtacctttcgccgctcggctgggagcacatcaacctgaccggcgattacctctggcgcagcagcgccaagatcggcccgggcaagttcaggccattgcgaccgttgcaaccggcttag

SEQ ID NO: 447516 - DNA, 273 bp, Serratia marcescens
atgaagatggacgagcgatacagtaacgccacctacggcagcgctggtcttgcggctttcttcgccagcctgtcgttacaggactggggcttcatcattggcgttgcattcagcattgtcctgggtgttttgacctacaggctcaacaagcgtgagcagatgaagcgcacgaagatactgcaggacattctgaccaaaaccgacgccagtaatccttcggcgaccgcccgagtgatcgccgaccttagccaaaaagccccgaaggaaatctaa

SEQ ID NO: 447517 - DNA, 576 bp, Serratia marcescens
atgaaacacttacccctgcgagaagtgatgcgcaacctcggcttaaccgtcaccgatgacggctatgagttaagcaacccggccggcactgcgcgctatgactttcatggtgtgcgtactacggtaagcggcatccctgaatacttcccgatcatgctgtcggtaaaaggtggttatgtgcctgtcttcgatgaccaagggccgcctgctggtggtttccctggcgccgaggctttagctgttaagcccaagcctgaggattatcctgcgggcatttcccttgctatcaatgttgatagcgcgtcgctgactgcgctggagagccagcttacgcgcattgctgacctgtgtgagcgcatccagaagactcagcaccttggcgagcctgccgagtatgtaggtcaatcagctttcacgatcagcgcgggccaggtattcatcggcgatgcgtcgattaaagagggcgctatcaaccattctgacctcatgaaagaagtcaccaagcaggcaaagaaaaccgttgagaccgtaatcgaaagggagctacagcccggcggcaagatctggcgggtttag

SEQ ID NO: 447518 - DNA, 156 bp, Serratia marcescens
atgaaaacactgattatcgatgctatcgggctgactggcctcggcctgctggtgggcgggatttacctgcaatttggcacggcaaccgctttacagtctgccggagctgctctgttggtatttgcgcttattgccgccaggagggggaaaacgtga

SEQ ID NO: 447519 - DNA, 390 bp, Serratia marcescens
  misc_feature (372)..(381): n is a, c, g, or t
atgaacgccaacctggagaaaaagtggctggcgcgtgacgtgaaaaggagcagattggttctgaatattaaccaacccgttcacgactttggcagtttctacctcaatggttatcaacagaactactggcacaacagcaacgttgagagaaatttcctgtttgggttctcaacgagccaaggtagtgttagctacaaccttgcattgagttacaatagcggaccctatacggataaacctgacaagatcgccacgctcaacgttcaggtccccctgaacaaatggcaatcgaacagctgggttaactacaccgccagcaaaagcagccaaggaaaattcaatcagcagttaggtttaagcggaagcgctctnnnnnnnnnncagttataa

SEQ ID NO: 447520 - DNA, 1056 bp, Serratia marcescens
atggctatagcagcaagtgaagttccatcagccggcggagaaacaatgaaatcttatgcaatctggaacaacaaaggtggggttggtaaaacctatctatcgttcgcaatggccacagaatacgccaggcagaatccagaaaagcgtgtgatttttgccgatatgtgtccgcaagctaatttatccgaggttcttcttggtggtaatgggactggcgcccagcgactggcagagcttattgctagaagaaacactgtcggtggctattttgaccggagaactcgtagccctcatatcattactggtgctgagacaagctttctgattccagtatctgaagtaaatagccacattcctgaaaacgtttttctgatcgctggcgatccaagtctggaagtgcaagctcaggttataaaccagctcagcagcgtaaatcttcctgttgactcgtggaagaccatccacctatggttacgcgatctattagttgcttgcgcgcagcagttgggagtggatgagacagtttgttttattgactgtaaccctagcttctcagcctatacagagctatccctgcttgcagcaaatgcgatcataattccatgctctagtgacggctcttcagcccgtgctgtcgataatcttgggcagttagtttatggaatcggggtccaaaacgaataccgttcggttaacttttacgatagatgtcgtcaatttggcttggctgttcccgtcattcactcacttgtttttaatcgttccacagaatatgacaagcgagcgagcaaggcgttttctgctatgtttgatgaaatcgaggctcgtgcacaggctctgaggcagatgaagccaacagcattccaaggcggtgaactgaaaaccttcaccgtcccagataaccattctgttgctatcgtttcttctcacttggggcgacctctgtttgacattaagcccggcagctaccaaattcacgacacaaatccgcagataaacccagaaccacttgaaagatacacgaaagcggttgaggatttagtctcaaatctataa

SEQ ID NO: 447521 - DNA, 150 bp, Serratia marcescens
atgccaaacgcaaaaatcgatagggaaaaagcagaaagaattcgcgcggagtatggcactggccagtacacccaaaagcaaataggcgagaaatacaacatctccagaactcaagtcggaggcattatccgacgcgaacaatggggataa

SEQ ID NO: 447522 - DNA, 237 bp, Serratia marcescens
atgaacatcatcggcaaccagctggttgaatggatcgcacggttcgatctccttggccagcagtcgagcgatggagccgtgcgaaacgtctccgatggcagtaatcaattctgcaacgtcgcgttcatccataacaccagtcgttccggccagcgccgcacgtatttcagcccgaagccatgcgcggcgctcggtctcgaactcggcgaccacgtcatctttttcacccggatttga

SEQ ID NO: 447523 - DNA, 273 bp, Serratia marcescens
atgactgaaaaaacgacgctccctgagaagcagaagctccaggacaaaattcaaaagatgcaggccaagctacgtgccatcgaggccagagaaaaagaaaaagaggcaaagaaactggcgaaggccaaggacgatcttttcaaagtcctagtcgatctcggcctatccggtgtcgagccggcaaagctcaagtctttcctttcgcagcacaaggcgtctttgcttggcacgcctcaagcgatcacccagccggctcaatcggaacaatcctag

SEQ ID NO: 447524 - DNA, 684 bp, Serratia marcescens
atgagtggaagacgggtcaagggctgcaccggaggccgcacgcggagcgcagggcgaagcccgagcaccgaacgggtgaggatgcaggcgaagcgcacccttgacgcggctggaacgccccaagcctatcggcaaagggggaggtcaagggcaacgcccgccgcacctgcccctgcagccagtcgggcaagaaccgacgcgggaagtccagaaaccgaagcggtttccggtcaagcccaaagggcgcgaagagcgcagcgggagtgcagaggggcgcagcccctctgctcgcaattttttggagaagcaggggggggggcagcgctgggattgagtatgttttctttgtgtgctacgatgtatttaccgcgtaacacatcgagagttatgtctatgagtgaagcaacttttacctttcgggtggatgaggcattgaaatccgagttctccaccgccgccaaaagccgcgaccgcaacgccgcgcaactcttgcgcgactttatgcgtgactttgttcggcagcagcacgaggcggcagagcatgacgcttggtttcgccgccaagtgcaaattgggcttgattcggcaaactccggcaacctagttccatcggccgaggtcgaggccaagtttgcagctaggcgggcagaaacacgccgccgtcttgaaacctctgttgaatga

SEQ ID NO: 447525 - DNA, 933 bp, Serratia marcescens
atgcgccccgccgaatttgcacccgaagcgatcatccaagccggtcaagaactgcaagcgactggccgcaacatcaccggctttgcccttcgccagaaggtcggcggcggcaatccgaccaggcttaaacaagtctgggatgaacacatcaacagccaaaccacggccaaggccgagccggttgcagaactgccggttgaggttgccgaggaagtggcgagcgtgaccaaggcgcttaccgagcgcctggccgcgctggctgtggagttgaacgacaaggcagtaaaggccgcagaacgccgcgttcatgaagtagtccgcgccgctggcgaacagcgcgagcaggccgagcgcgaactagccgacgcatcgcaaaccgtggacgacttggaaaacaagctggacgaggccgcaagcgccgccgccgcgctggaaaagcgcctggccgacagtcaggccagccaccaggcgcaagccgtcgaactggcccaggtgcgcgaacgcctggcgctgatcgagcagacggccaaggccgcgaccgagcaacacgccgccgagcttgcccgcttgaatgccagcatcgagagcgaacgccaacgccaccagcaggacgccgagcagctacgcgccgaactggcgaaggtgcaggccaaggccgaagctgccgagcaatcgcaccaggagcagcggaagaccgccgcccaagaagcccaccgcgccgccgaacacatgaccaaggcccaggccgagcgcgacagcgcccgcaaagaggccagcgccgcccgcgaggaagccgccacgctgcgcggccaggtggaagccttgcagacccaagccgccgaccagttgcgcgcccttgcaatgcgccaggcaccggacaacgaaagcgaggccaagccagcaaagacaaccagggcgaagaagccggaatga

SEQ ID NO: 447526 - DNA, 627 bp, Serratia marcescens
atgcaagctctaattgagaaaatcattcctgcttacccgtatacgcaatataacgccgatcccaacatcgtcgcgttcttcaccgcctataacacgttggcgcaggggtatctcgactatctcaatgcgcttaatttgccgtgctggacttctccctccatcacgggggagttgctggattggatcgcgctcggcatttacggggaagggcggccattactgcaaatatctgaggatgcgatcgcccgcggtgcctataacaccatcgagtacaatgccattccttatgcaggcctgaaaaattacgtaccgggctcggcgtcatacgtacccgatgattattttaaacggatcctgacctggaatttttataaaggtgacggctcgcacttttgtatcgactggctcaagcgccgcctggcgcgatttattcatggcgcgaatggcatcgatccgccgttgcaaagcaccttcgacatcagcgtgacggtcaataacggcgtgttcaccatcacgatccccgattatggcgatggcgtcggctatttcctgaaagatgcgatcagccagtctctggtcaagctcccctttgtttatacctactctgtaacggtggttgcacaatga

SEQ ID NO: 447527 - DNA, 1227 bp, Serratia marcescens
atgagcgatttacccgttatttatgatattaccggccccgtcgccaaaacggcggaagagttgcgccagcaggttatagaaacggcgacgcggctttcacctgggatcacgaccgatttaccgggttcattgatagaggacatggtcagcaccagcgttggcgcgctcttggtttgtgaccaggcgcgggttgatctgattaactcgtgtagtccttacggctcgaatgttcatctcctgacgcatttgggggggatctacggtgttccgcaaggcgagggcacaaacacgtcggtctatgtcgttttttctggtccgcctgggttcgctatcccgaaaggatttactgtcggggatggcacctatttgtataccgtgagacgggacacggtgatccccgacagcgggcaaaccgagccggtgtattgtctggccaccacgacgggaatatgggcggtgccggcaggcacggttaaccaggtgaaaacctccgtgccggagtcgtaccaggtaacttgcaccaacctgacggcgggtctgccggggacggacgaacaaagccccgcgtcgtatcgtgcgcaggtgatgcaggccgggatgttcggtgtgcaaggcacgcccgactgctaccgctccgcgctgaaaaaagtgaacggcgtacaggaaaacctgatttcgttccgtcaggcaacgctcggaaaatgggtggccgttgttggtggcggagatccttatgaagtcgcttatgcgatttataaagccgtgccggatatttccattttgaccaacgatgtatcgaatccatcgggggcggaggtggaaaagaaaactataccggtaacggtctaccccgacgtctaccaggtgcctttcgtggtgccatcgtcgcaaaacgtggtggtgctgatcacctggaactcagcgtcgacgacctacatcgatccggccggcgttgcaaaagcggtgcagcagaatatcgccgattacgttaatgctatcgccgttggccagccgataaatattttccagatacaggacatttttctgaaatcggttgagggtctcgttgccgcgtcgctgctgtccatgatccaggtgcaaatcgggatcaacggcgcaattaaaccaccggcaccggagtcaagcctggtttatggcgacacctacgcctatttctccacttcggcggcacaaatacaggtgaagcaatatgcaagctctaattga

SEQ ID NO: 447528 - DNA, 333 bp, Serratia marcescens
atgagaacgtacgggcaagacgaatccggcaagtgggtcacgatcgccactgatgcgaacggcttcaacgatgccgtctatctcaccacgctggtgcagaatctcaagctggcgccgcaggagtccccttttttcgcgaatcacggcattcccgccaacggttcagtgatccagcagattatccccaccttttacgtgaaccggctgcaacagcaattcagcggccatttttcttcacttcagattgcactgaccgaagttgatccgccggtgtacgacatttcggttatcaccaactcgggctcgaaaatagtggcgaaggtgtatgtatga

SEQ ID NO: 447529 - DNA, 717 bp, Serratia marcescens
atgagcattgagaaaaaacagagtttcgccggaaacatgcatcggttcgccgaacaaaaaatcgcggacgccatgcagatggccggcaaggtgctgccggcctcggtggtgagtcgctcgggcaatatggtcacggtgtctttcctgctgcgcgatattcctttcatgttgccgcaggtcacccttcctttgtttgggccgcagtatatccgctatcccatgcagccgggggatcgggggatcgtcatcccggcggatacgtatctgggcggtgccagcggacagggcggcggtactgccgatctcacgccgccggccaatctcagcgcgctggtgtttttgccgatcagtcacacggaatgggagagcgtcgacggccatgtgctcacgttgtatggcccggaaggcgtcacgatacgcgatgccggcagcaagacgacgttcctactgacgcctcagagcatcacgattgccacgcctgatcagttcaaggtcacggtgggcagtaccgtgttgacgctgacaaatggctcatggtcgttgaccggccagagcggaaccctggcggatgggcaggccagcaccagcccggccattatgcatgagggctggcagcagctgcttacctgggtgaattcccatcagcacagtaacggcaacggtgggcaaaacaccggcgggccgacaacgagtttcgacgggagcattaccgaatga

SEQ ID NO: 447530 - DNA, 798 bp, Serratia marcescens
atgtcacaactctcttttgatgccctgttttctgtgcccgtcgatgcggtgcgcccggcggaaaagaacgtcagggctgatgctttagaacagccaaaacccgccgaccctgtaccaggacggaaacggacaatcaccggcgatgatccgcggaaggcgtttttgagtacgtttcgtgaaacggcgcgtaatcaccatcggtacgaggttttcagcgatttcgtgaagttggcggcctgtgctttggagaatgcctgtttaaagtcgccggatatcgaggcggagtatatggccacaatacaacgctatgagaaggcagacgcgcagcgcatggcgcagctgctttcgtggctggtcatcgggctggagcagaatatgggggattttctcggctcactgtttatggagctggagctgggcagcggccacatcggccagtttttcacgccgttccatctttctgagctgatggcgggactggtggccggtgatcggctggcggcgctggaaaatgagccgtatatcacgctgtccgaaccgaccagcggcgcgggcgggatggtgatcgcgtttgccaaagtgatgctggcgcgcggctataacccgcaaacgcagctgcgcgccgactgcgtggacatcgatccggtggcggcgcggatgtgttacatccagctgtcgctgttgggtatcccggcgcgcgtggtgatcggcaacagcctgacactgaagtatcagcgcgagatgtatacaccgttttggtatcgcgtgacgtccacgcgctggccgatgtatcgctaa

SEQ ID NO: 447531 - DNA, 285 bp, Serratia marcescens
atgaacacacgaaacgtcaaagtccaaaccgccacgaaggaacactctgaaagatacggggaaaagatcatcgctgatttggattcgttgctgcagaaaacaagccgggcgctgtttaagtttcagaaaaatgcgaacagaagtgcactcggcattcaaacagctgcgctgagccaggaacttgaaatattggtgaagggagtaccggccatcccggatattcaggaaagagtgaataaggtggccgaactgctgcacattatggaagatttttcggcccaataa
